United States Patent Application Publication US 2008/0114160 A1 - sequence listing, part 13

SEQ ID NO: 5470 - DNA, 121260 bp, Oryza sativa
gttcgatgactatgctcatcaaactcttcaagccaaccatctctttggtaacctggtgaaccacattagtggctacatccaggggtcgaacgacttggattattctgagcacttcacacttcagaaagtcatataataatatgtggtggagaatgcgttaacgcgcaacggctttcgtgctagttgctcaaagaatcatataaaaatttataaagagtgaattccactttaggctaggtttagttacctatgttgcacattagaccaggcattaccgtattagtaagcctcttcacctagaactaggtattgttaccaattttgcaccttgtaccggtggcccacatgtcattggatcttccttctccttcttcctcaaaactccctgagcccaactctctatccacactggtgagctgagcttgtctcttcagccagtaccagcatatagcggccggccagctatcccctgagacctgctccaactcctattacacggccagctacagccttgcacaagtgctagcgagcacacaagatgaagaacaatgagattgaataattgaatcaatgcatgcacagggcagcctgagaatgggtgattgtacgaacggtgctggagcagagccactgcattgtcagctctcctctatttgcctaggacttaataatttcctccaaatcacaaatcgatcgagatcgtcgcgaccctcggcgaaggtcgagcgtggctgcagcgctaacaaagtttgagcgcgcttagtcttctcatccagcctcccctctctcacggtctcacctgaagtttgtctagagcatcaagaataaatggagatgaagcaagataacagaacaggagcatcggagcatcgcacaaggtgcgcgtcggcaagattcacttgagaacagcgccagtggaagaactggcccaaagtgaaacattaatgtaaacttttctgctccaaagtaaaaactgagttctatccctagtccaagttgtaacttaagtaaaatatagtggtccaatatgaaatttactctatagaaatcaagcaattaaaaggttatggaagtgcattggccatgggactgtaaatcctctttccttcactgggcctgggccctttgggactgttaaatcctctttccaaacggagtgtgtggtttgattccactttataacgatagcgagactgaacgaaagaaaagtgaaacgagacgagaagcaaagattcttcagtgcacgtgccccgctagcttgctcagctatgaaaacttcatcctcatggtcaaaaaggttcttcctcacaaacgtaatatagatggcgaatgactaactcaaaatattccactactaactaacaaggaataaataccaattaaaatgcgaaaaatacaaaatcattgccaataaatagatcttgattttagatgaatttagctgtaagtttcactagatttggacttaggatgagtgagttatgggtgtttaaagattcaaatttaatttaattcaaacaattgtgaaaacctactgtttgcatagttttcttttagtgtccgaattggttttataaaacaaaagaactctagtcactgataggtggttccaaagtatttccaattaatttgctaaatattttcccaaggggtataaaattttctaataatttgtaaatatttttccaaggggtttaaaagtctttatcattgacaagtggagcagggatcaaagtcgactgggtcaaattgactagtcaatagtctaatacccacatgtaagtgacacaaaacataaaaatatctatctatctataatcttctataataatatactaaacagtccattaacctcccaaaaccgctctcaaaatgccacgtggttccctcaaaacactctcgagttgtcacatggcgctcaaataaattattagagaaattcttaaaaattataaaaaacagaaaatctacccttaatttcagttaaatcggtgggtctactattataaaccattagattaatctatccaagaaaactaataccctaattccgcccacacatactttcgcggcgccgttgcccgtctcctctgcctcacccgcgtgcgtgtgtaatcctccctcctattttttctctatagtaattaagatttgcagcattattctgttaacatgagtaatttaaaatagtatattagatacttcatatctctcaagacgcctcacggggccaagggcatagacttccatcgttatatatagcccaatctgccagctgcaagaagtgtcttcatgcaagcatatatgcatgcgtggacatgcactacgtacaaataatttttaactttatgttgagtcgatttatttttagtttattttttaatatcctgacatttcaatcaattatttaaggtgtgtatggactatgattattgtcaaatggaaaaaaagtgcgagccatgtatcttcacgctttacattttactaattagttcctccggtttttcatagattgacgctattacttttttagatataaatttgatcatttattttattcaaatattttttttaaagtataaaaaatgtaggttatgtgaaaagttccattaacgataaaccaacttacaacaaaataaataaatgatagtcacgtaacttattaaatgaggtgaatggttaaatatattagtaaaagttaacaacggcatctattaaaaactagaaagaatataattcttaaaaaaaaataatatgcaattaggtgaaaagcccataacacaactgtcaggttacaaataaggtataccctctacccctggatatacgctatacatcgatatggtatatctgcgcgtataccgacgttctctgtatacgctaaggaaattcatcacggagtccacagatggaaagattcctatccggataggactgggtcgtcactgtatcgtataggtccgatggtccgatgtctctgggtcctactttgaaaccacctgacctgcggtataaaagggacccccgggaggacctaaggcatcgaatctcaccgccgagacaaccaccatagcctacgaagccggagcctacaggagccaagtcgccgggtgatctagtcgaaccaactcgactacggtctcgtcggtatcatcgagttccactgttccctttgtaatctgtgatttccatcatataatcccatatcaactggattagggctattacctaccaaggggcctgaactagtataatccctgttttctatttgcttgatgtcatattacgtagatcctcgtaccagcgtaccccaataccctctatatctggtctacgggtatcccccgtcgacaatggtgcaccaggtagggggacttggtgctcaaggttctactactatgtcgtcaagtctcgtcaacaacagcgtcgaccccagcgtcaacctaggagttccgactacaacaatgctggtgtggactcaagtcggtgaaatcgtcttcccggtttacaccacggtgccggtctcgactggtccatcaatgaccggaagcgagaatgtcgtggccataaccccggacgaccccatgtcgaaggatcctcccgcagtagcggagaacggaacgtcgacgacatccaagcccgaggaagatcctagtgtggccaaatcttgtccttccgacaagaatcacgagctgacaaggacaacttctgaggcgacaaggtcctggtgtcctattcacaaaactaggaaacacaccttgcaagcttgctgggtttttctcaacgcacaagctgacatccgtgcctgcaaagagagtggaatttagcgtacttctccaactcatgatgtctattgtctatccacaagacaaagaatcacgacctctcaagctgcaagattcttctcaaagccatgaagacgtagcctcctaaggtccagcactcacaaatctctcctagagatgtgaacaaggaacgaggagcgacggtcatctcagaccgattcgttggggtgatcgacattgatccccacgagccatcagtcctacactcgctcgacgaccagggttcatcgtcgacaagcacaccacgcgatgtgtttgctatcggcgggaccagcgcgtctgcgcgcgccgatgcggaagcagagaatcaagtggttacaccggctcagcacatcgggggcatcaacgcaatactgagggaaaccccttatgatcctgttctaaatgatgatctcgcacggtggacagaacggctacgggaatcagtgaccaacctcagcaacgcgttcgaggaggccgctgccacagcacacccaaaatagccgccagctggcggtgccaatggcgaaccacctgagtagcgggcctcacctcaacaagccacccctccaccccgcggcaccagcgatctccgtgaccatttaaatggctgtcgagaagcatgacgcgcgcaagacaacgaaaaccgttccagacatcgtctctcttcacgacgtcgagagaacgaagagcgaggaggacacccgagcgagatccgagaccgtgataaccgccacaaccgccacgaacgcgatgatcgcgaacagcggatgccgggtgatattggtcgaggacgccgccataacgatgacgatgacggagattgacgccgggacaacaacggtggacgacgacaggattcccgagaacccagacgtcatcctcggaatcgcacgccagagccgagtgactcatcgtcgtcgtcatcatcctcttcatcctcatcatcagatagacatccgcgaaggacagacgatcgccgacaacccaccgcccccagcgccgggtatagagctttcaaccgttcgctacgagatgtccgatggcctgagagattctaaccaggagcaacagagaagtacgatgggagtactgacccagaagaattccttcaagtctactccacggtactctacgctgccggagcagacgacaacgtgttggcaaattatttaccgacggcattgaagggttctgcgcgttcatggctgatgcacctcccgccctactgttcacgaaaaaaatcgaacacaccggcctgggagatctgcttagctcctatgcaggtccaaatcttgatgagatgcgggcgtgccagtcagtttgatcctgcaactgacaagatatgcaaatagtagatcaaaacagccaatcggctaacaagccgatggagtagttccagccgatagccgacaatagcccatgccgataccagccgatagtgatagggtttaagcaatcggctatatatccaatgtagataatgataaaaaggcagtcggctgatgatgatgtaatgaaataacaatataatccagtataaaccaatcggcaaataatgatatgataaataagcatccatccgaaggttaaagcacacatcggctggaagtccaatgtcatgaaatccacaagattagattaaacagtgaaacctttattgtcatgggctaaatccaacttatatgtatatgcaatccttatgagccgatgcaacatacagataactcaccggctgaaaccccgatgaaacccttattggcaatcaagaagcaggctagagattatggttctaagtatgacttagtagatcaaacttaactgatgcagcactaagtatgaaaagaatcataatatccagacaatcaagccgttgactgattttcagggtggtagatgtctaaactaatctaatatagcaacgcgatttagccgataccggcagaaaccctaaaacgagaagcagccgatagagctaaattgatatgctaagactagattaacaaagacatatgataaatggttaggcaaatatatcatccaaaccagagcaatccaagaggtcgaatgtattgatgcagccttgaacgacgccgacgtagacgatataattgcctgggccgacggaacattggacttatccttgcgccgttgatcgaagacaatgcagcaccgcgtcgggtgccaagttccgcctgaacgtaaaaacaaaagtagaagtaaaaagggtggcgatgcgccgaattgtattgatcgtagcgatgattacatagaccccgggtgtacatatttatacccatgggttgatacaagtccttgtcggccaagaaagaaacgttcctaaagataaaaggaaaagataaagtccttatagcacactaaacacactttcctaaagataaaaggaaactaacaaactattcctaattaatagataacttgccatgccgcattctctttgaactcggtctcttctggataagcttcctttagtagatcaatttccttaaccgaatatagcaagaatccgacaactaacggcttgacaactctcatcggctaatctcaagacttcgaagccgatgctgactctaagccgatgttgttcctccgttaaattctccactgtgaccatgatcttggcattgacttcttcttcagacatgtggatataaaactcgtgtcccactgggcgtgccaatttgtgttgacgaaaaaaatcgaacacaccggcctgcttagctcctgtgcaggtccaaatcttaatgagatgcgggcgtgcgagtcagtttgatcctgcaactgacaagatatgcaaatagtagatcaaaacagccgatcggctgacaagccgatggagtagttctagccgatagccgataatagccgttgccgataccagccgatagcgatagggtttaagcaatcggctatatatccaatgtagataatgatatagaggcaatcggttgatgatgatgtaatgaaataacaatataatccagtataaaccaatcggctttaatgagtgcagaaatacaaaccccgaaatccccgatgcctctgtgattcgtgctttcaaaaccggtgtcagaaatcgctatactacccaggagttggcaacaagacggatcacaactactcgaagatttttcgagatcgtcgatcgatgcgctcatgcggatgacgcactttgacgcaagaacgacaagccgaagttggggggagagaagaaaccagccaaggacgcacttgaaccaagcaagaagaaaagtagcaaaagtgggaaaaggaaagctcaagcggaagtcctcgcgtcagaatacaagcgccctcccaagcacccagacccacaaggcagcgacacgaagagaatatggtgccctatacacaagtcggacaaacattctctagatgattgcctcgtcttcaaaaagtcgctggaaaagcaactggcattggagaagggcaagcgagtacgagtagtcgagaaggccactgaggcaaccactcaggacttggactcggcatacctagattccgatctccatgtctcgcacatcttcggaggttccacggcgtactactcaaagcgagaatacaagaaaatggagcgtgaagtttgttcgacatggcagggggccgcacccaagatgaagtggtccgaacagaagatcgagttctcagatgaggaccatcccaaggctgctatcatcccaggacgatatccgatcgtggtcgagcccactattcggaacatcaaagtcgcgcgagttctcatagatggtggcagctccatcaacctcttcttcgcctgcaccttggatgtgatgggaatcccacgaagcgagttgactcccaccaatcaacccttccatgggattactcctcagtcgtcgtccaagccattgggcaaaattacgttgcctgtgactttcggccaagcaaataacttctaaacggagcatatcacctttgatgtcgctgaatttgatacagcatacaacgccatcatcgggagaaatgcactcgcgaagttcatggccgcatctcactacgcgtatcaagtgctcaagatgcccgggccgaaaggaacaatcactattcaagggaatgcaaagctggcggtgcaatgcgacaagcggagcctcgacatggtcgagcacactgccagcccacccgccacagctgagccacccaagaaagtgagcaaagcaagcaagacgccgaaaccagacggtgcaatcaagatcgttccgctctccagcgccaacgccgacaagaccgtcaagatcggggcatcactgggcgagaaataggaactcacgctcatcaccttcctccgcgacaatgcagacgtgttcgcttggcagccgtccgacatgccgggggtacctagggaggtgattgagtacaaactcatggtgcgacccaatgccaagccagtaaaacaaaaattgtgaagatttgcaccagatcgaaaacaggccatatgagaagagctcgacaagcttctcaaagctggtttcatcagagaggtactccacccagagtggctagccaacccagtcatggtgcggaaggccaacgggaagtggaggatgtgcgtcgacttcaccgacctcaacaaagcgtgcccccaaggatcacttccctcttcctcgaatagaccaactggtggacttaacagttggttgtgagttgttaagcttccttgacgcttactccggctaccaccaaatcagcatggcaaaagaggacgaggagaagacagcattcatcacgccgttcagtgtattctgctatgttaagatgccgtttggactgataaccgcaggaaacactttgcaacgcacggtccaaggggcacttaacgatcagcttgggaataatgtcgaggcctacatcgatgacattgttgtcaagaccaagacaggcgactcattgattaacgatctacgggaaacatacaacctctgacgatatcgcctcatactcaatcttgagaagtgcacgttcggagtaccatcgggcaagctgctcgggttcctcgtctctggcagaggaatagaagcaaatcccgagaagatcaaggcaatcgagaacatgaagtcgcccacaaggctcaaggaagtacagaagctaaccggatgcatggcggcactaagcaggttcgtcactaggatgggagaacgaggacaaaccttcttcgctctgctgaaaaaacaagacaaatttgtatggacacagtaagccaaagaggcgttcatcgcactcaagcgctacctgtcaaacccccctgtacttgttgctccccaacctaatgaagaattattcctctatattgccgccacgccatattctatgagtactgtcatcgttgtcgagagagaaaaggtgcaaagaccagtctactacgtcagcaaagctctccatgacgcgaagacaagatacccacagattcaaaaactgctctatgcagtaattatgacgtcaaaaaagctacgccactacctccaagcccacagggtcacagttgtttcctccttccctcttggtgaagtcgtgagaaacaaagatgttgccggccgcattgcgaaatgggtagtcaagctaagccagtttgatgtccattttgtgccacgaacagccatcaagtcccaggttctcgccgatttcgtagccgattggactatgccttaaaacaggttagacagtcaaaccgacaacgaaatgtggacaatggcgtttgacggcgcactcaatagccaaggagcaggggcagggttcatcttgacatcaccttcgggagatcagttcaagcatgcaattcacctcaacttcagggcgaccaataacacagccgagtacgaaggactactcgctgggataagagctgcagctgcacttggagtcaagcgactgatcatgaaaggggattccgaactagtcgcaaaccaggtgcacaaagactacaagtactctagccccgagttatccaagtacctcgctgaagtcaggaagctggaaaaaagatttgatggaatcgaggtctgacacgtataccgcaaggacaacatcgaaccagacaatctggcacggcgtgcgtctagacgggagccactcgaacccgacaccttcctggacgtcctgacaaaaccatcgatgaaagaagcaaacgacgaaaatagcacagtcgcacccgacatcagctcgagggcaacagaggcagaatgcaccgttgctgacatcgagaccacagacgactggcggatcccactaattaaattcataagtagcgacgcgctgcctgaggacaatgcagaagccaagaaaataacccgtcaagccaaaatctattgtatgatcagcaatgatctatacaagaaggcgccaaacagggtacttctcaaatgcgtctcgtccgacgacggcaaacacctcctcctcgacatacacgaagggatctgtggatcacttgccaccggtcgtacattggtcggaaaagcctttcgacaaggatttttctggccaactgccctcaaagaagcttgcgacatggtacaacggtgtgaagcttgtcaattttatagcaaacacacaaagctaccagcacaagcactgcaaaccatccccctcacttggccgttctcgtgctgggggctcgacatactcggaacattcccacgaggacaaggcagctacaagttcctgttcgtggcgatcgacaagttcaccaaatggatcgaagcaacacccatgggggaaattaaggccgacaacaccatcaaattcattaaagggatattttgcagatatggattgcctcaccgcatcataactaacaacggctcccagttcatcagtgccaacttccaggattactacattggactgggagtcaagatctgcttcgctttggtctctcaccctcaaagcaatggacaagtcgagagggcaaacagcatagtactacaaggaatcaagacccgtgtctacgacaggctcatgtcacatgacaagaagtgggtcgaagaactcccctcggtactttgggccgtgcgcaccacaccgacaacgtccaacaaggagacacctttcttcctcgtgtacggctcagaagccatgcttcccactgaactgcaacatcagagtacacaagtacagaagtactccgccaggatcaggaggagtagcgaggcgacgatgtgaaccttctcgaggaacatcgagaatgagttgccgtcagagtaactagctaccaacaggcccttcgacgataccacgagaagcgcatccgagcatgcacgctttcgatcggcgactacacaaaggcacaaaggcagttggaaccgacaaaagttttacaaaccatgattaattaaggagtacaggcgaaccgaagtcctactcttcaaaaagtgggagaacagactctcccagattaccgacttcttccatcacatccttacgcgcgtcgttagccgccccctgatccaagatcctctagagatcgagttcagggtgcgccaaccttacgcacgcgaggatgtgacacgtcccggtgtagatcccgtttgacgtctcctccccgatcctggccgcatgcttggaggggatcgcctccatcatcatcgctagtttcgcgagcgaagtcatcagcgagaactcatcgggattcaccgggatggtggtcgtgacactgcactccccggtgagctggtgcaggccggtgtaggtaacccgcagcgagccacggatgtccgacaggttgttctcgagcttcgacatgcggtgctcgagcccctgccattgccgctcgttgccggccaccagctccctcatcttctggaggtcctcgcgaacctccgccaggtaacgcgccaacttgtcggcgcgttcgttcgccgacgaagccgccgccgccctcgccgccgcaatctcgcgacctatgccacgagcgccagcctggaggatgcgccccatctcgatttggagctcctcccaggtgaggacgtcagcgggtgggcctcgagcaggcacaaggtcgccggcagggccgctgggcgtcgcctcacggctcctgggcacgaccacgacatctgtcaaggccactgcaggagacgcactagagttccctccagacccgtcttgtgccgccttcgcccacaccgccctatgaaaaattcccgtaatggccatcaagacgagccgcctgaattcgatgaatcaaacgacctcaaactcgtcaacttacttctcgccaagtgtcaccagcctctgccgtcgcggaggtgggggagacgcatccgaggcctaagtaaaccgagtacggtgtgaggacaacatcttccaactacgcaatcaataaccaaagacggcttaccgatggagtgggtgctttccgacggttaccgagcacggaggaaaacttcctccccttcttcggaacggtgccgccactggtcgtggcagcaacgggggcaacatcggacgcttccttggcgacgtcctccttcagcgatgccgccgcctggtggtccacgagcggcccgatgacgtcagttagagggagagcctgcactacatgaagtcacgatgcgatcctggaagaaaaagagaaagggtcatcgagtacactcacgttgattgcagcttcgccctcagctgcccctttctcgcaaagaggggcagggacgttgctcgccatcgtggggccgctcatcatcacctggccaacacggcgctccacggtttcgctgttcaaacctatagatcaagaaccagattttgataagtcaggaggaatgtatgcataaggaagggaacccagaatgcaagaaaaataccccgaggagaaacccgggtcgcgtcctccgacccagagtagtcagaggctgggtgggctcgagcctggagcggctggatccgcctaccaatgaagtcggcagcgacttcataccccgacaacccacgtactcggaggtcattgatgatatcgatgaatgactgaagtgtaacaccctgaaaattcgaccaataaaaacaaaactctaaaaatgcggaccttcgaaaactttttaaattaactacatcatgccgattctattcgcctattttatttggatttgatttcgaaattcattagtcgtgagtaaagaatagttaattacgaataaaccctaaaaataaattggcaaaataaatataatttaaaataaagattaggtgaggatagaaataaataaaatattatcgcgaccataatggtaataattaaatttaagtgcgatggagcaagaattaaccctaattaaaaattcaaataaattatataaaaataaaatatgggtaatattaatttagggtgaatttttagttagaataacacaaatattgagtaaacttcatttatgcaaaaattagaatttatagggctatatttaaatagaaaataggataaaatcgggataaataggaaaagtcactattcattgcccgctaggtgcacgagtgcgtcccctagccttccccctcctctgccacaccgctcctagccgtccttgtgccccgcgccgccgtgggccgtcaccgtcgccatcgccttgctccgccgctgccgccgcgcgccgtcgcgtcatctcgtgccccgagccgccgcgcgccgtcgccatcgccgccttgagcccgtgtcgccgcccgtcgcgtcgccgcccatcgcatcccgccccgagccacgtgccaccgctgtcgccatcgccgtcgatgtcccgtcgccgcgcgcgttccatcgccgcctcgcgccccgcgccgccgctgccgcgccgtcgctgtcgccgttccgtcgccgcgcgcgcgtcccatcgccgcctcgcgccccgcgccgccgcgccaccgtcgcgtcacccccttcacttccctctccccccttatcccctctctcccctatataagcccaccattctcccctctccaaactccattccctcctcctctcctctacccactacaccgtgtcgccgttgtgccaccacgccaccgccttcgcgccgccgcatttgagccgccacgccgccgacctcggtgacgccgcaccgcaccgagtgccgcgccacgtcctgcgccgccgtcaccgtcgtcgccgccaccaccgccgccggtgagctgtctcctccccccctcgcgcacaccgccgttgccgcccgggtgagcaagagccgagagagagagaggtagaaagaagccgggagggaggagagaaaaagaaaagaaaggaaagggagaaaaagaaaagaaagaaggagagaaaaagaaaagaaaggaaagaggagaaaaagaaaagaaagaaaagaggagagaaaaagaaaaggaaaaataaatagaaattagtgggagattaaggaagtttagaaaatttaaaataattagaatttaattatagattaattatagtcgtagaattgcaaaatttaatataattatagattatttttgggtaatctctataagtaatcgattcacggtagaaattcggatttaattactaggaattttagccgtgtattatatttaatcatttagtcatagactaaattaaatcgtgcaatattataagataattttaggattttgtccgatatttagctcgcgatagaaatttctaacctattatatggatgtaatacccgggcggattaaattaaaaacttgtgctaataaaatatttatgccacaaaatagtttggggatggatagagttaaatagacggagtagctctatttcacgaacgaaaatagataatgtatgaaaccgacttccgcgctcgatatcttcttggatttacttggatctttatttgaattctaaccgaattcaaattgtttcttcgcatgtaattttagagcccgagggagttgcggatccgagcgaggaccaagacccgcaaagcttcgagcaaggcaagtcatcactattctttgaacatgttgatcccaattgtgaaattattttgtttacaaataaattgcatgcaatgatgaacatcctacttgtgattatgccatgccttggttcttgtttaccccttatgcctttgtaaccatttacgtatgagtccctactcagttatgacaattgcttagaaatgctattctagaatcatgcatactcatatttatcaaatgctatatgcttgggcaattacctttgggaaggtaattgagatgcagcatgtggggacatgagcgccacattgccatgatgttgatgacatgatttgtgaaaggagaaatgaaattaaacaactattttcgactggggcggacggaggatttgggtggtatccggaaaaggctagtgccatccccggtcaattaaggaccgagccatgaagttaagcatgaaacgacccccgtacaaccgcacttctcgtatgggtatagacctagcggagtagatagctgagcggaggcagtatccatgcatagtggtttcttgttatgtgaggcaggggctctatggtggggcagccattggtaggaccgcgaggcgggtgtctacagtggtgtcgctgtcggtaggactgcaatgtgagaatctaaacgtaattataacttaatgcatgtgtgagtcttcccttcccgggtgcaccagaactcctctcactgctagaaaccgtgtacgcctagagtgcatgaggatgtaaagttcatggagcgggtactgccaatgcgaggttatcgaaaagctttgccgtgacacgtctcatgtgttgggatgaggctcatgtgttgggcagtcgcggagtgcgggtaaagtgtacatccactgcagtgtgagtaaaccaaatctattcgaatagccgtgctcgcggttattgagcactgggacatgtattacacttggctagactctaaattcttaacttgtgtgggatgggatattgcatgatgatttctatgctgatggagccacttcctgaggggcgggaatgtggacgtcctcagaaaaccatgacgactcaatagcgggaagctatccttgggatcacaatggatggtggacagaaccgtcattgtttaatatgaacactggtactaaaatttgatcagtctgtgctaggtctcaggtttgtgaaaagaattacaaaacttgctttgcgcaaaagaaccatagccatcctttgaatacccctgtcatgtgcattgttgctgtggtggcttgctgagtacggttggtactcacccttgtaatatacaaacttaatcagaggtcggagatgaagcttcggaggatccctacgcttactaccaggagggtgatggagacgatggcgctcagtaggtcttagttacggtcgttgcctgtggcaatggcgtgccgctgccttgactccgctgccttacctacttctgtttttggaatgtattctagaccgctcggtccgatgatttgagactatgcctgcgggcttatgatgtaataattcgcactagactctcgtgtatgtgcatttggtatttcagctatgaactcgtgtataccagactacttgatccagggaaatggtactgattacacgatagattcctgttataaaaacaggggtccacagagttggtatcagagccatacgactgtaggaaaagaccaaaaggcgccccaccccttttctaagattggccaagggagaaattcccatttagtaatactttcaaaaataaaaactctatgtttacaaaactctgtacgattttcatcttactcttaactactttcttcacaaaacaagttttactctcagctgactttgggtttttcttaaaattagatggcagatcaagattcacccaccacctgggagatgggcgtaccccgctcagagggatacgtcatagagctacatcgggtgatgaggcgccttcggtaccccagatttccgatctaccgagtgagacaatgtggacccttttgggagggccggattgaggttcatccgcgagtcccttcagagtcagactacagcttctcgacacgccaccgtcgtgacttaccggagaccgcgatgcaggacgcagcccgggaggccttcctctgacttagttctattcactgggcagagttagcgagtaccgagtttgctcaccatccgtttcgggaggagagcaactctgtctgcacagttcaggacataccttgctgctataacccgatggtgactcgactgtcccgatgggctgaggctgtggacgacttctacgaggaggccctgttggagatcgacgaccagcagaggcgtatgggagagttggagaccaaggtaactgacctcacagcacaacagcttcagctagaggaggagcatcaggcttggggcagcgagatagactcgctgaaggcacagctccaggtccacagcgaccagttccagcagctatctgatcagtacaatgatcgccgcgggatgatggatacactcgaggagcagctgagagagagtcaggagcacgtcagccagcttgaggagcagcttcgagcagctacagtcagcaccacaggagcttctacttccacaacagtagggcgtgaccgctacttcttccttactccgccgtacccaccagcgttccacgctcttttgggagaggttaatatggtagccaccgagtcagcaccttacctggtggaccagacagtgacacagccacctgctccagagattaggaacaccccactgatctccacttcttcaccgcagccagggtccagtttagagactccgattcaggtcgactccgagacagaggggaccgacaccgagccagagatagagccggacatcactgatccttcagaggacgcgactcctgtcccccgcattaccttcatcggaggccctcgtaccctcagcaatgcccgcaagagcacacgacctccgggcaagaagcccaagccagatttagaggccactacttccgagccgtggggactcaagtttgcacgagccagcgaccaccctcttcctgccccaggatcctgcggatggttggatgactagactggaggacttttgcagcttcgatctcgcttcagatggtttttgggtagcatgcgagacacacacacccccttacctagattgacgagtagcttgatgattagtcgatgtatcttttggatgaactttatttggactgcgtatatgtgcggtcgattgcatcatgatttatgtactatctgtggaactctgcgatgttctttatgatgttgttactgttgtgttatgaatgagtttattccaccatgcttgcaaaacaaacttcacatcaaaacaactcccttaatgggataaaaccataagagctagttagaaaattaggatacttacttaatcggcctacacagatggcaagccgacgtcgggcgtcaatcagcaatgaagaaactcaaacacctgacctaaccaccctggccggagttatggccactcaaacccaacttctgcaagccattgcaaacaaccaaggcaaccgcggacgatcaagctttggagagtttatgaggaccaagccacccacgttcactacggcagacgagcccatggaggcagaagattggctacgcatcatagagaagaaactgactcttgtccgggtacgcgaagccgacaaagtgatcttcgcagtaaaccaactggagggacccgctggtgataggtgggatacttacaaggaagctcgggaagaggatgctggagaacccacttgggaagagttcactgcagcatttcaagagaacttcgtgcctgctgcggtaatgcgtatgaagaagaacgagtttagaaggatgcgacaagggaacacaacggtgcaggaatatctgaaccggttcactcagttggcccgctatgcaattggagacctcgcagatgaagaggaaaagatcgacaagttcatagaagggctgaatgatgaattgcgcggacctatgattgggcaagaccatgagagcttccagagcctgatcaacaaagtcgttaggctggagaacgatcaaaggactgtagagcacaaccacaagaggaggcttgctatgaatcgcccacctcagggagtgcctcagcgactcaagggagccacttcgtctgggtggaagccccctattgtggcacccaaccgtcccgccgcgcctagtaatttcaacaggccggttgtgattcagaaccgcacccctacaccaactctggctgcccctggagccaagaagaatgtggactgcttcaactgcggggagtatgggcactacgccaacaactgccctcatccacgcaaaactcctgtccgtactggcgctaatgcaatgactgttcgtggaactactacccctgctgccggacgaggtctattcaagactccgcaaactaacaggaccgctaccggatttggacgcggacaagtgaaccatgttcgagctgaagaggcccaggaagaccagggcgtactaatgggtatgttctctatcaattccaccccggttaaagttctcttcgattctggtgcatcgcattcattcatatctcggaaggctagtcaaaagcacaacttaaccctagtgggacttagaaagcctatgatagtacactcacctgggggcgagataactgtgagtcatgcttgcatagacgtacctattcgtcttagggatgtggtgtttccctccaaccttttggttttgatacctcagaccctggatgtcatattgggtatggattggttgacgaagaacagaggagtaatcgactgtagacgtagaaaagttaccctgaccacaccctggagatcggatatgagagcaaccatggatcaagatcctagactaatcgaacgtgccggaggcatatttaccatgctacccctgaaaggaatgcccatagtgcagcgatttcccgatgtgtttccagaagatttacctggaatgccaccagatcgtgacatagagttcattattgacctgatacccggaactgctcccatatccaagagaccttatcggatgccagtcaatgagttggaggaacttaaaaagcaaatcagagagttgcaagagaagggatttgtacgtcccagttcgtcaccttggggagccccagtgttattcgttaagaagaaggatggtagcatgaaatgtgtgtggactaccgctcactgaacgaagtaactatcaagaacaagtatccacttccacggattgatgatcttttcgatcaacttaaaggagctaaggtgttctctaagattgaccttcgatcaggataccaccaattgaaaattaggaccggggatgtacccaagactgcgttctcaacacgctatggattatatgagttcacagtaatgtcgtttggattaaccaacaccccggcatactttatgaatcttatgaacaaagtgttcatggattacttggacaaatttgtggtagtattcatcgatgatattttaatctactccaaagacgaggaagagcatgtggagcacttgcggttggtactcgagaaacttcggaagcataaattatatgcaaagtttagtaaatgtgagttctggttaaaagaagtcgcctttctaggccacgtaatctcagccggtggagttgtagtggatcctgctaaagtggaggctgttacggaatggaaagcacccaaatctgtgactgaaattcggagttttctaggcttggccggatactaccgaaggttcattgaggggttctctaagataacccgaccaatgacacaactactcaagaaggaaaagaagtttgtgtggtcagaacagtgtcaggaaagctttgagcagctcaaagaaaagctgacctcggcgcctattctagttcttcccgacatcaggaaagactttgttatatattgtgatgcatcaaggcaaggactggggaggagtactgatgcaagaaggaaaggacgtggcttatgcatcgcgacaactgcgaccacacgaggaaaattaccctacccatgacctagaactagcagtcgtggttcatgagctaaagatttggagacactatttgattggaaaccattgcgatatctacactgactacaagagtctgaagtatattttcacccagtcagatctcaacttgaggcaaaggcgatggttggaactaatcaaggattatgatctagaggttcactatcacccaggcaaagcaaacattgtggccgacgctttaagtcgaaagagccattgcaatcatctgaggatggaagggataacccctgaacttaaggaggaaatagcccaactgaatttacatttagttccttatggtcaaataaacaccttggacatccagccccttttgaggacccagatagaggaagcccagaaggacaacggagagatccaagaggtgaaggagcgcatagccgctggttgtgcgaaagaattctcaattgatgagaaggaaacactatggtataagaagaggatttacgtacccgaacagggtggactgaggggattaattctaagggaagctcacgaatcagcatattcattacaccccggaagtacgaagatgtaccaggacctgaaggaaggatactggtggcccaacatgaaaagggatgtagcagaatacgtagcactctgcgacgtatgccagagggtgaaggccgagcaccagcgaccggcaggtttgctgcaaccccttaggattccagaatgcaaatgggacgagataggtatggactttatcgttggattgcataagaccgcaactggttacgattccatttgggtaatcgtggaccgactcactaagactgcaaggttcatccccgtcaagacaaattatagcggagccaagctagctgagttatacatgacaaggatagtatgtcttcatggtgtgcctaagagaattatatccgatcgaggcacacagtttacctcgcatttctgggaaaaagtacatgaagccctaggaagttaccttgcttttagcacagcttatcacccacaaacagatggccagacagagagaacaaaccaggtcttggaggacatgttgagagcttgtgctttggattttagcaaggattgggagaaatgtttgccctacgccgaattctcctacaacaacagtttccaagcgagcctaaagatgtcgccaaatgaggcattatttggtcgacgatgtcgtaccccactaatgtggtccgagactggagaacggacggtatttggacctgacattatccaagaagccgaagaaaaggttcgcctaatccgtgaccgtctaaaagtggcacaatcacgacaaaagagttacgctgacacccggagaagagatctagaatttaaggaaggggattatgtatatctgaaggtttctccgatgagaggtacaaaaatgtttaaggttaaagggaaactagcaccaagatatgtgggacctttccaaatcatcgctagacgaggagaagttgcatatcagttacagctaccagaaaatatcgctgatgtgcacccagttttccatgtgtctcaattaaagaagtgcttacgagtgccggaggaacaagctccgttggaagaaattcatattagcaatgatctcacgtatccagaacacccagtccggatattggatgaagcagaaaagaggactaggaccaaagtgtggcgtatgtacaaggtacaatggagtaatcatactgaggatgaagccacttgggaaagcgaagaattcttggagacagaatacccgcatctattcgaaatccgataagaaatctcgggatgagatttatttaaggggggtaggtttgtaacaccctgaaaattcgaccaataaaaacaaaactctaaaaatgcggaccttcaaaaactttttaaattaattgcatcatgccgattctattcgcctattttatttggatttgatttcgaaattcattagttgtgagtaaagaatagttaattaggaataaaccctaaaaataaattggcaaaataaatataatttaaaataaagattaggtgaggatagaaataaataaaatattatcgcgaccataatggtaataattaaatttaagtgcgatggagcaagaattaaccctaattaaaaattcaaataaattatataaaaataaaatatgggtaatattaatttagggtgaatttttagttagaataacacaaatattgagtaaacttcatttatgcaaaaattagaatttatagggctatatttaaatagaaaataggataaaatcgggataaataggaaaagtcactattcattgcccgctaggtgcacgagtgcgtcccctagccttccccctcctctgccacaccgctcctagccgtccttgtgccccgcgccgccgtgggccgtcaccgtcgccatcgccttgctccgccgctgccgccgcgcgccgtcgcgtcatctcgtgccccgagccgccgcgcgccgtcgccatcgccgccttgagcccgtgtcgccgcccgtcgcgtcgccgcccatcgcatcccgccccgagccacgtgccaccgctgtcgccatcgccgtcgatgtcccgtcgccgcgcgcgttccatcgccgcctcgcgccccgcgccgccgctgccgcgccgtcgctgtcgccgttccgtcgccgcgcgcgcgtcccatcgccgcctcgcgccccgcgccgccgcgccaccgtcgcgtcacccccttcacttccctctccccccttatcccctctctcccctataaaagcccaccattctcccctctccaaactccattccctcctcctctcctctaaccactccaccatgttgccgttgtgccgccgcgccgccgccttcgcgccaccgcatttgagccgccgcgccgccgacctcggtgacgccgcaccgcaccaggtgccgcgccgcgtcctgcgccgccatcaccgtcgtcgccgccaccgccgccgccggtgagctgtctcctccccccctcgcgcccaccgccgtcgccgcccgggtgagcaagagccgagagagagaggtagaaagaagccgggagggaggagagaaaaagaaaagaaaggaaagggagaaaaagaaaagaaagaaggagagaaaaagaaaagaaaggaaagaggagaaaaagaaaagaaagaaaagaggagagaaaaagaaaaggaaaaataaatagaaattagtgggagattaaggaagtttagaaaatttaaaataattagaatttaattatagattaattatagtcgtagaattgcaaaatttaatataattatagataatttttgggtaatctctataagtaatcgactcacggtagaaattcagatttaattactaggaattttagccgtgtattatatttaatcatttagtcatagactaaattaaatcgtacaatattataagataattttaggattttgtccgatatttagctcgcgatagaaatttctaacctattatatggatggaatgcccgggcggattaaattaaaaacttgtgctaataaaatatttatgccacaaaatagtttggggatggatagagttaaacagacggagtagctctatttcacgaacgaaattagataatgtatgaaaccgacttccgctctcgatatcttcttggatttacttggatctttatttgaattctaaccgaattcaaatcgtttcttcgcacgtaattttagagcccgagggagttgcggatccgagcgaggaccaagacccgcaaagcttcgagcaaggcaagtcatcactattctttgaacatgttgatcccaattgcgacattattttgtttataaataaattgcatgcaataatgaacatcctacttgtgattatgccatgccttggttcttgtttaccccttatgccttcgtaaccatgtttacgtatgagtccctagtcagttatgacaattgcttagaaatgctattctagaatcatgcatactcatatttatcaaatgctatatgcttgggcaattacctttgggaaggtaattgagatgcggcatgtggggacatgagcgccacattgccatgatgttgataacatgatttgtgaaaggagaaatgaaattaaacaactgttttcgactggggcggacggaggatttgggtggtatccggaaaaggctagtaccgtcccctgtcaattaaggaccgagccatgaagttaagcatgaaacgacccccgtataaccgcacttctcgtatcggtatagaccaagcggagtagatagctgagcggaggcagtatccatccatagtggtttcttgttatgtgaggcaggggctctacggtggggcagccattggtaggaccgcgaggcgggtgtctacagtggtgtcgctatcggtaggactgccatgtgagaatctaaacgtaattataacttaatgcatgtgtgagtcttcccttcccgggtgcaccagaactcctctcactgctagaaaccgtgtacgcctagagtgcatgaggatgtaaagttcatggagcgggtactgccaatgcgaggttatcgaaaagctttgccgtgacacgtctcatgtgttgggatgaggctcatgtgttgggcagtcgcggagtgcgggtaaagtgtacatccactgcagtgtgagtaaaccaaatctattcgaatagccgtgctcgcggttattgagcactgggacatgtattacacttggctagactctaaattcttaacttgtgtgggatgggatattgcatgatgatttctatgctgatggagccacttcctgaggggcgggaatgtggacgtcctcagaaaaccatgacgactcaatagcgggaagctatccttgggatcacaatggatggtggacagaaccgtcattgtttaatatgaacactggtactaaaatttgatcagtctgtgctaggtctcaggtttgtgaaaagaattacaaaacttgctttgcgcaaaagaaccatagccatcctttgaatacccctgtcatgtgcattgttgctgtggtggcttgctgagtacggttggtactcacccttgtaatatacaaacttaatcagaggtcggagatgaagcttcggaggatccctacgcttactaccaggagggtgatggagacgatggcgctcagtaggtcttagttacggtcgttgcctgtggcaatggcgtgccgctgccttgactctgctgccttacctacttctgtttttggaatgtattccggaccgctcggtccgatgatttgagactatgcctgcgggcttatgatgtaataattcgcactagactctcgtgtatgtgcatttggtatttcagctatgaactcgtgtgtactagactacttgatccagggaaatggtactgtttacacgatagattcctgttataaaaacgggggtccacatgaagggatggggtcaaggcaggcttggcggtccaaaacggaatcttgtctagttgttcctcagggacaacaaagattggatccaaattttctatctgaagatagaaccacctcgcccgccatttgctacgagaagaggggcacttgaaggggatgtatcgcgacttcaggccatcccgaagtcggaaactaacacacccggacacatttttacgttccatccagcgcagctcgtagtagaaacgaaagagatcaagaaacagctctaccccaatgtagacctcacaaagatgggaaaagatgctgaggaaggccatggagttggggttcagatggagcagagaaagaccgtagaaattcaagacgagaaggaaaaactcagaaggcggcgggagaaaaccgcagagaatgtagtcctcaaccgcaaccatgcggcccaggacaggttcaggttcaatacctcctggttccctctccatggtcccgcgaccggggagagcgccttcctcctgcaacttcttcagggacgcgctggtggaagtggacttgtcgaggtccattgccgccggagatcaccggaggagggaccaagatgagcaagctagggtttgtgcgggagcggagaagacgaagagcgcttggaggctaggaagtttttgcaacaggcgggctccaaaatggatccccaaaactcccttaaatagacgcactaccgacgatgcgaattccaaggaaaggagagagatggccgccggaaatttctgggtccgttacacgcggcagtttttggacttcaatttaaattcactcacgaccgttgaacttcgcatggcgtcgtcgattactccttgtctctacggtcctcacgccgagatcgaccagtcgagaacgacaacaaacccgacatcagaagtcgcgatcggttacatgagttcatttaagcagaagtcaggggctactttcagggttacgaataaggtataccctctacccttggatatacgctatacatcgatatggtatatctgcgcgtatacggatgttctttgtatacgctaagaaaattcatcatggagtccacagatggaaaggttcctactcggatcggactgggtcgtcactgtatcgtgtagggtccgatgtctccgagtcctacttggaaaccaccttacctgcggtataaaagggacccaccggaaggacctaaggcatcgaatctcacagccgagacaaccaccatagcctacgaagccggagcctacaggagccaagtcgccgggtgatctagtcgaaccaacttgactacggtctcgtcggtatcatcgagttccattgttccctttgtaatctgtgattccatcatataatcccatatcaactggatttagggttattacctaccaaggggcctaccaaggggcctgaaccaatataatccatgttttctattagcttgatgtcatattacgtagatcctcgtaccagcgtaccccaataccctctatatccggtctacgggtgtcccccatcgacaacaacataataatcaccgggtcttaattgctagcgaggcttctttgtaaatactaaattaacttattgaaccacatgataaaacccactcttgataattagctgtcagttgtaaaaagtaaacaaaaatcgaagatactaattaaatttgaattcttactgtagtatttgaaattaaatacattgcaaaagaaacaaacaaatatacgcaaaggaaataaattagttccaaccaattacttggatgatttgttggcttatataccaaaattcctaggttgagatcataaactattcggtaaattggtcagattcaataaacttcaaacattttaggacaaaatttgacttctatagagtataagtctatctttaattagatgacgtagtcatattagcaatatgtttaataaacaaatatcttcaactaatttatcctaaaatcgaaaaacatctacagtataaaaaacatcatacaaaccaattccatggttgtgattgcgacaccatattttctcataaataaattcaagacttcacgatttcacatgattttagtttacaatttatatgatgcaagggtaattagaaaaaaaaatcatttccaacgtaatcccaaataaattagaatagagtaaaaaagatatttcaataaaaatatcactcacgcatatatatttgttataaaattttgagtggtgatccgatgctctctactgatactattatatcaccagtagaaatgatctgatccattcgttatttactaatacattgattaaggctaaccttttcatttatatatttttttcgggctagattgatcaatctgtggttatttattgtgctggcatcgctcatattccatcgaaataagccaaacaagaataaaactaggtttagtgactactaaatgataattataccccttacgcactttttttatagtaatgtctctccatgtttgaactactgctatttagggtggtagtataaatagatctaaatcattcgatcaaataagatcaacggattagattactttctactatcaatagagagaatcgtagtgggtctcaaattttaaacgtgttaaacaagatgcccgcgcatgtgcacgggctaccttgttataattagattttctaaataactagtacccacgtatcaacctacagattttctatcgtatcgccataacagtgcacacgtgtacaaataaaaaacgaaatcaaactaccatatctaactgtaggccattcggccattgacaacaattttctatttccacgctgaacacgagccacagttgacagttgaatcgctgagcctcactctatttaaacccgtcactcgtacccatgctaatacaacaaacataccacagtcgcgagaagttaatcgcgatcgagatagctagctagatttcaatttttaatggcaggtcagcctcccaacatgttggcaccaccgaccgacgacgagctgctgcacgcgcaggccgacatgttgcgccacagcctctacttcgtcacgtccatggcgtttcagtgcgccgtcaagctcggcatccccaccgccatccaccgcgccggcggcaccgcctcgctgcccgaccttgtcgccgccctctccctcccgcccgccaagctcccgttcctccgccgcctcatgcggctgctggtcaactcgggcgtcttcgccgctgccgacgacaccgccaccgggtgggccgggatgtaccgcctcaccccgctgtcgtggctcctggtggaaggcgaaggcgcagcgcccgtcgtcgacggccacccgagccaggtgcttgtggtgctcgccgcgacgtccaggcacttcgtggaggcggcgatggggctcgcggactggttcgggaaggacctgccgccgtcgtcctcggcgccgccgtcgccgttcgaggaggtgcacggcgccgcgctgttcgacgagagcatggcgaaccttgacccggagtctgactcgatgttcaacgaagctctagcggcgcacgaccactcagacttccccacggttctccgggagtgccgtgaggtgttccagggggtggagtcgctcaccgattgccgcggtggtgacggcagggcggcgaaggccatcgtcgaggccttcccacacatcaagttcaccgtgctggactttccccgggtgattggcgagacacgaactggtgtggtgaactacgtagcgggcgacatgttccgtgagatcccacctgctcaagctgtgatgctccaggtagtattaactgaaataaattaaaattaaaagtgattttcagcgcacgtatatataccagtgagagtttgatttattattttttataacttgtgatgattgaatttgaatttggatgtttttaaagtcatatatcatatatcgatatatcttgttattttttttataatattaggataacatgcaaatacggaagacatcgtcttgagtcttgagtaattaattagaatccatttcctatatagaagaacagttaacgactagtgcgccacgaagtgtgtaattcaaattgcgcatttgttaacttttctatgacttttttgtgcatggtagcttgtgcttcaccactggaatgacgaggattgtgtgaagatcctagctaattgcaagaaagctattccaacccgagaagatggagggaaggtgatcatcatagatatagttattggtgctccttcaggactgctgctagaagcccagctcctcatggatgtggctatgatggtggtgaccaaaggccgacagcgagacgagaatgattggcgtgatctcttcagcaaagcaggcttcagtgactacaatattgtgaagaaactgggagctcgaggcgtctttgaggtctacccatagcagtggttccaacactaattgtgtgggtcccctctgtggaggatgtgatctaagtgaataaaggaaggaagggcatattttctgaaacaaattgttatatatgtgatctatgtcaagcttggttttgtgaattaatacgtgtaaaacttctgttgaatgtttcatgtgagttaatgtgtccggcttgcttatgtaaaatttcaatatgtaaaatcacttaggccatgttcaatgcgtagccccaggtcgtccccctagcaccctccgtccgaagccgttagccgtttcgcccgaggcgatggaacgcgcgcctctgctgggggacacgtccctcgctcgcttttggcaggggcatgcagcggaacgacgcgttgtgtgccggtgagaggagagggagacgagcggcggatccggctgccgttacgccagatccggttgccggcatgccagatccatgcgctgctcaccgttgaccaccgcgctcataagtcgtcggccaccagcaacggcgttgctccagcggcggcggcggccctcctcatcgcccttccagccgccggctacgggttagagaaagaggcgagcggaggcggagggagagagatggagagggagtaaggcggcggtgtctagacgaggagggaggcgacggcggtgtctgtggcggtgcggcgcgagactcccgggaggacggcgacgggcgaaggaagtgagacgaggcgaagaaaagaagaagaggaggggcgacgaagaagaagcaggagcaaagaaaaaagagaagagagagaggggggagaagagaggggtagtataggaaaacacccaccctgggttttttggttgggacacccattgtggggttgagtacctttattcggttgcttcagattttgaagagaccacttagatgtaacctccattgagagatgagtgcccctgggcactctaggtgtggctttgattgtagatgctgatggagggaatactttaaacatgcaagtcatcctagatgaataacaattcaacatcacccacaaccaacttggtctccccagccttaagtatactggacacatgtttgatttcttttgcatggacgaataagtccatgtaacctcacaattctatttagagggtcatgtccctacactaataatacccgaaatttttgcttggacaaataagtccatgtaaccttgcaactctaccttaatctactggacatgatttgcttaatggggtaggtttgtaacattctagttaagaaaaagcattaaggtttcaaagtttttaaaacttttgcatcatgtcgtgatcattgcttgagttgtatggaaatttattttaaaacaaacctacgaataactaaattccaaagcatacgaagaaaacatgataaaatatttcacgaatcacatgtaaagcaaagacaagaaatcaaatagattaaataccaatttaaattataatctaattatacaacaaacatttgaccaaatatatatattagtaataaaaagaaacatttgaccaaattgtgcatttgttaattttttttggtgactgttttgtgcatggtagcttctgcttcaccactggaatgttgaggattacgtgaagatcctagcccaatgcaacaaaactattccaaacggagaatatagatggaaggtgattatcactgacatagtgaatggggctccttcagggccacttctagaagcccaactcctcatcaatgtggttatgatggtcgtaaccaaaggtcgacagcgagatgaaaatgagtggcgtgatctattcaagacagcaggcacagcaggcttcagtgactataagattgtgaagaactgggagctcgagctatatttgaggtctatcgatcccaagcagtgctcccaaatactattattgagtgggtttcctctatcactactaggaaaatgtttcgcatacgaggtccttttcactaagcatgcatgcacgatttttgctcccaaacgtccaaggcggaggcttaactacgaaaatgtatcattccaggcagagatttaagacgtccgacatgaaagatagtatattatcctagacggacatctttagagctttgtctgcgaagatatttcttcgtgggaggaaccttaagtcgtccgtctgggataatttttttatgaaaatagatgcacaacggagacacgaattttacgtggaaaaacccttgcgggaaaaaaccacgggcaccgaccgacaatgatcaatattgagaagttggatacaaacgcagggggatgcattgggttgtcacacactcctcataagggttacaagagaaatataggagtcttaataggcgaagacacaaagtccaagtaggaaactaatcttataatatagagtcctattagaaaactaatctaaatatactgtagtcctaatatttggatcacatgtttaacaatcttcaccttgagaccaattttcttgtagcataaaaattgtcaatatccaaagaatctcacatagataaaatcattgtgcgccaaacaatctctatgactataatgtaacaccctcgattcagaagaagtagaccatactctcaccattgggaataaatcctgaatctgctagtataaacctgtgtgaactaagcagcgacgcgaaacatgatgcccaaacttcaaactcgccatggaaataaaatcttgagtctactagcatgaatttatgtaatcctagcagaatcatgaacttttgtatacaaaacgaagtacttagatctcatgataaccagtttcgaccatcaatattatccaatatatgaagactagctatgcttgcaatgcataattcctaaataaaataattacttccactatatgctatgctactaacatgtatgcaggagaagcactcataaatgaagagaaggaggaggaaatatatcgatcaattagtcgaaagtctgccggtgatgtgcaattgcatgagaaggcctaaatgtccaatttaacaatcacaaatgggcctagaatgtatgtcactgatttaggggccaacatgggagtctactggagaaagctggggccagaagagccagcaaggggtcggccgacccaccactgagcccaatcagcccccatcttacacaggctactcactacctaaggtcgttatgaccggttcccgcgctattaccgacttcaggaggacagatggcatgaggagaaggaagatgttcgttggatgctatggaggatctccaccctcccaagtcatctccacctataaataccccttcacttccttcattccaagcacacacctcaagaagaagatcaagagctctctcaagtattgtttagtagttctagtgctagtggagtaggaaatagaatagtcttcatagtcctcaagtcttcaggagatttctagtatggctttaatagctttactttcttattttgtaagacttattgaattaatagaatattcttctttatacaagttcggtattttattccattcatattacttgagtgccgactttactttatacttgaatcaatatagtcgtgtaactagctttccagataggtgtattggtgtgggtttaatgtccgattattcggttgctctatgtcggttgcaaggatgtagagtagtatttagtaatgtaagcgcggtgcttagattattagataccattaattggggtaatatacagtggttcagatgctggccgctgatggtgacagcttagtacgggtgtcctctgcatgtgtatattgtcctaagttaatttcctggggagggtactcctccgtatttagccccggttgtatggtcatgacgggctgtcgtaaggaactcggcagtcaggggtggcttctcgaaacaccaggaggacactgggtatgaggtattggttgcatgactgtatactagcaagtatagactaaagatgtatgtatactagaagtacaggaatgatatttttcttattctttctccacttagcttaaactatattttagtgagagtagttcttagttctttcttctgtgtgtcaccctaccctttgaactgaattaacccctgcatagactttgatgtatataagtaatatatgaattgttagcatagttctctcttatcatatcttctcttgcgataccttggaatactcccgggtgaaatgctacaatgatatatccatgcgcttgcggatcatatctgtaaccataatataccaggattatttctagtgctactgctgggaattagtcgctaagaaataccaacaatatcatgttagcaaaattcaccgaaaaatttgatcaccttgtgatctagataggagcaaggctctctcttgacaacttggatgtgcttcttgttttctgcatgcttctcctcttagatagatgtgccaacttgcatcttcacttgccataatgagaatattgcatctcaatctaggagtggtcgataatacttcaaactcgccttgtgaataaaatgcagaaacacaaaacacattcagagtgcaaaaactaagtatttggatcaccgtataaacctcttggtagacttgggttgttaatttagcaattgaacatgaatttggatttaccagaacagaatagaaatcgctgcaaattgaatttatttcctggtacgaaggatgtgtgcacatagtattgatcgcacgtgaaattaaattcatgtagatagggcaatgatggctgattgccttgacctggctagcagatgtgcacaacagtcaacttaattttactccggttacaagcaaatgcatgcggtagatgcacctggcaatatggtagtcctcgatccgatgtggaagcgctgtggctttggttttgatatatgtgaccagttcgatctcatcgaatagaccgaatttatgagaatcgacaaacgtgatggccacaggtaagagatagatatctcctaacaattgaactcgacgaaatgatgggaggatgcgcgcctgccgccacctgttagattcatcgatggacgggccgatagctggtatagatagaactccaacactctgataccacttgttatgaaaatagatacacaatggagacacaaattttacatgaaaatacccttacagggaaaaaactacgggcactgactggcaagggtcaatattgagaagttatacaaacgcaggggatacattgggttatcgcacactcctcgtgcggcttacaagaaatatatatatgagaaatatacgagtcctaataggcaaaggcacgaagagctagtaggaaattaatcctataatacgtagtcatattaggaaaccaatccgaatatattgtaggcctaaaattcagatcatatatttaacaaatttccctatatagctttctttctccccaaccgctattcagttcaaccaaagatctattggtcacagtaaaaaaaagatctattagtcaaatttgtaggattcttcatgacttatagattttctatgatccattaatgttgatgcgacatacatttcattatcttcttggtaatggtttggggttaaactaatttttaaccatatttctagttgtgaatggtgaactatatatgtgcaccctatgtattgtcacatgctaattttctgacatacacgtattatgattccattcttcatatgatgtaggcttataggcctatgcaacattagtttcgtcccattttatctcaaacaaatttcaaaagagtaggctttctttcttcatttgatgatatttgtatcatcatcttggtttggggcttttaatacttgtatgccaatacccaatccaaaatttcattaacagtccgctatcaaaggatcaacttgtgggttgatcctttagttgatttttcaacttctacttgactgctaatgaattttactatgtaaataaacattttccataataggtcttaatgccaacttctattgtccataatacaattttcttatgcttcttgttctcgcttaatgcttatttgcgtaggcatggttctttaagtgtgccagcattggtatgtactccaactgcttgttctcttccttgatggaaagatgtggcatgtctattctgaggtttcataccatttgccaggtctcaacttgctctccctcaattatggggtgtacatttagtgataataagtatgaaagttacatttgttccttttcaccagatgtctctaattactttaaggatttaaggagctggagttcttggcatattattttcgacgtctctagacaagatgatagatacctttacattccttatacctttacattccttggtatttcaccctcgtcttgttcattacattagggtagatgcaatttagtcatgctcttataatcacaaaagtaattaaggacgataggaaattctgacaatacatctgttcttttgatgccttgcattccttagagcttgattgagtatgcaataatcctttgtttaaccatttttctcacaagaatcatctaagactgggtttggctgttggaatccctcacgcacgcaatacagaatgactcattagtgcatgattaattaattattagctaatccttcttgaaaaatggattaatatgatttttttaaagcaactttagtatagatttttttttttgcaaaaaacacattggttagcagtttgggaagcgtgtgctagaaaaatgaggtagggtgagttgggaaaatagggtaaagagcacaacttaagggttcattttctcctcctcaatgtctagaaacaagtctccttttagtcaaggaatttaggctccatacatacctccattcaagcttcctaactttcgaaaagagctcatactgtggtcgtgagatatgcacatgtaccagggaccaccacttggattcttgagtggatggcacatttcaaatggttcaaatgttgataattcgttgcttttgagactgcatgtccattcaagatgcgggaatttgaataacattgtggcgaacccttttaatccatccttagtatttactccatttttgtggatatccagtacttagtgccttttcttagtgtgcttatgacaatatgtgtgttcttgctatatcggtttggcaagagcatagtgtcaaaaataggtaagcacgttatttcccggaatttgtctgcagatattactagtttctttctattttgggtatacctttcaaggtatgtagggtatggatcaatttttctttggttcaagacatggtggtgcgtgcttcatgcacgtccaaggttcgacggtatgcgcaatcaaagtggcacgaggtatgcgaccagtgtggttacggtgtggctgacggtgtaacacgcatggctaatacggcacggattggctggcatgcggtacaacggggttgctagtcggtgcacagtgcaacgtccaacgcgtagcgctggtgctggcctcggtgtgcgtcacggtgtgacgtggtgcatgccgatgaatggctgtaacataccaaaaattagctattttcaaatcttgcatcatgccgggtcttatgttcttaataacctctttaaacctaggacattataattagcgagacctcctaaagctaacctgcataaaatccttctttgatattcaaaagcttttgtgattttcatttaaaattttatcttgaaatattccttgatttggttttaatctaaaaccttctttcgcctaaaacttcctttatttaaatttagtttgaaaaaccctttttactattatgaattatggtccaagaaaccatcctatactgtgctagaacctaaaccaaagcaattccaattttattggaattaattgttaacccatcctttgatcttaaacctatcatttgattctcgatccaaatattcgagtttctccttttaatctagccaccattttaatccctgtggcttgattccctcttcggcacaagaaatattattattacaaatattgtgagtaattgctcttgtgctaagagaatagactttatccctccgccccaaattcaaaacctcatttagcccatatctaattctttaaatttcataccacatattttgggctagaattctatttactctattccctccatattccctccactcaaaaatattcaaatctagagccatattatttatggttttgaatattttgaatttctatttgagtatattaaataaactcctcaaaccaactggagaaatatttcttttggaaattatattcaaatataatttccttctaaactctctctcagtcatttttccttcaaattcaaattattcaaatcctttttcaaaatctagccatccaaattcctctaaatctattatttgaatctctaggaaaattagacttcctccttttcaactttgggcagaattcttcttctctctcgcgcggcccaagtcggcccatagcaagcgcgcgtgccgtgcacgcgcacgccgccgccaacgccttccgtcgccgctaaggaaccggccgccgccatttggtgcgccgtcgccgttgtcctgccttcgccgccaagttgcgccgccaccatcgccgtgccgtgccctccttctccgccgtccaactctgccacggccgccacgtacgcgcgccgcaaatgtcgaccaatcggaagacaaagccggcaccgtcatcctcctctccacgccactgccgccgtgctccccttctccttttcctccgaaaccgtcattagccaccgcctttagtcgtctataaatagacggcaagactcgccattcctcttcagaactcaagctctgagatctttttctctctctcctcccatggccgatcgtcgacatcgtcggtcgatctccccatccgtagctcctcctttcctctcctcgcaccaccggcttcgcctccatctggcgagtccgttttttccctttcccctcttccctacccacttcatcaagccaccacagccacttctcttgccgccggagataagctcttctactcgctgttccggccatctccctcgctccctctgcttgccaccgacctccccggatgcgcagtgagcgggaacatgcgtggccgatgacgtcgccgccctccagccaccggagcgccgccgccccgctcgccttctcctctctcttctctcggctctctctggaaccgagaaaaggaagacgagaagaaggaagaagaaggagaaaagaaaaagaaaaagagaaagaaaggctgacaggtgggcccatgaacagtacattttcgtcttttctagatttaattcaaattccaatctttagaagcccatatctcctaaaccgtagatctgattctagtgaaacttggacctaaatttatctaaattcaaaccctacttttgataccaaatttgctatttaaagattttatttgaatttctttaatttattcaaatatcatttgaataaatatttgatttaaacttataattgaaacttatattcacctttcaattatttccttttattttcaaaataccctttagccactaaacaaccaccgtttggaactttacaccttccatggggacgttcgcacggtctactgaccccgacgtcaaaacgttggttgtaaagtctgacaaaacccaaacctaacgtcaaagtgttgcttctgacaccttacgcctcaatgcgtataacgatcagagcttcactattccctcgacctccactgtacgccacacagtttgctctcaagctctgtgtgatcctagccgctccgccgccactcacggttgttggagtaacacttccacccctctaaacctacacaaacttcctatccctctagccataacattgtctgctgacattggctagacaccaaacctagtcgtcatactacccaattctatgacgactagtaaatacccaaaacccttgccgatgtttatcctacctcgatatcggcttaatcaaatgaaaccctagccagcctgctatccaaactccataccaactatttaccctccaaactacccatagcttaaacatgaaatacgagccgatatgctatttcagcatcgactcgagaacaactaaaccctagccactattccaccaaagcctaatcttgattccctctataacctagcctccaaccccttagagcctacgtataaaatactagctcaataacccattaaggagatatttatacccccaaacctagcctttctcgctcttcatcgttttcttgttattttatggcttttattgaatttggttctctctcttctttaatagagtctattttattctggatggcaacctgtggtatttcgagcatcggataatcaggttgcctatcttggatttatttgtgttggagcaaggcaagttatcattactctcctttgagcataattatcctatactctatagttttattctatgcattagccattcatgattttgaatgcataacttgaacatatagcaaactagatatatgctagattttgcttagccatgcctagttagattgcataaaaatataacaaacttagattgggacaatacttaagatttggttgatttccgggtggctagtactgtctcgatcgatataattgccaccaaatacttatgtcaaatgagtacgactgcagcttctagaatggggatagacctagttattaggttaattaacaatgtggtacctctgtacagtggttcttatatgtaagtcctcgcgaaggaggcaaacttatgccgcgaagggcaaatgtgatatttaccgaggcgcaggtaaatatcttgattatattgcgatcgctgtgtgtgtatattgtgaaaacctaattgagatgacgtggggtctctcaaccagttctctctaaaaacctcgggaacgccagaactcctctcgctgctgataacgttacgttcagagcgcatggggactagagttcatcgaacaggtgccactattgttaataacctaaggctgggctacgactaagctaatgaatattggcaagtcgtggattgcgggtaaagcgtacatttactgcagtaaagtataaatgaatctattcgaatagccgtgctcacggattgagtatcgggactcatatggtatttggttagaaacctaattcaagactttactaaatactgttgcataaagacatcccaggctttcttcctctatattctcagctttctgcaattgaatctagctctactcaaatattaccatttcatacattcattgttgattaatataatagcttgctgagtacgttgtactcacccttgcttcaacctcctttttcagagtccattagatgttcttgccgaagtcaggagttcaatcacataagttaattccctttttacttaatcttcaagtctaggttatttacatggtttaagtctatagtaaaacaacagagttaggtcattctaaaacttctgctgtaatagttagccacaatctcgtaaataccctattactttatgtaataatatcttcttcaaagctatgtctaaacgtatgcaaagacgatccagattgttgaagctgtatcaacttactgatccagggcttgatacagttaaatatgtcggtttccgaattattagttttgggacccaacaatggcgcgatgcgcatggtcagtgtgcgtgacaaataatgtctcatcgttgcgttcgggcatatgatatgagatgtatttgtcttatcgttgcgttcgggcatatgatacgagatgtatttgtactatatccattgcaattttcatgattcttaagattcaacaaaaataactaccaaaatagtcttcttttagcctagatttcttagtgacgaaattgatttcacattctttctaatgattatgctttatgtgcaaatgttttttttccaatttttagggatattgacatatagtcgtttctctagggaaacaatattgtcaataatcgctgtgtgcgattcgaaagatagttcaaatcttttcacagattgaacttgtcttgcatctctcaattttgtattttgtgatgcttcttttcacaatgtttatttcctcttcaacataggctatacaaattgtctatggaaataaagtaaaacatcactatttcataataaggagtaataatttataatataactaagtgtaataatatcaaaaataaattctagccatgcatgacaaatcacggaataaatgttgtactctcatagagcttataaaaccattatttaaagttgttcataatgcaaccaagccaaatcaaaataagcacattatgccctcaaacagaataaataagtgtttagcaccacaaacatttgctcctgcctgacattctcttcacgtgttatgcctgttgcagcggcaaagatgtggagtggagtagtagtggagggagttgccgtggcgatgacgatgacgtgcttggccttcctcttggtctagaatatgtcgatgatgtgctcgggctcctcacagatacggctccagcagccccatgtgccacacctgtagaatgtgtggtcttgctagttgtatggcttgtagtcgtgggatgtcttggcttcatgcatgcacttgccttcctgtgctccctacgcatctggatcattttctgttgtagccgacggcgctccgtggatgcgcatttgaggtgagaaaaacattatatatgccggtttttactattccggcactataacctatagcgccgtatcctttatttgttttttagtagtgtttctctcttattctctctctatttttaagctatgctatgtggtagattgagagtgttttaaaaacatcgcacgtcagcttaactgggtattttatattgataatattttttgaacaaagaatcctatatatctatacaattgatccccactaagtatcaatgatgctattttccagccctatggtgaagccacgtcacttcaattaattttagccatcagattagatttgtctgtccgagatttcttctttctccaccatgcacaacctatatggccttttctgtatcccaatgaacattgctgcgagtaggacagcccagcaatttcccaccaggccatttattcctcagtttctctcccctaccaaccgaggaagccgaggagcttcgcgttaggccagtcacaatgggtgtttcatttgagtgtcatgcgcatttaatacagtgacaagtcagcaaaagagcaatatttgcatgaaatgggtaggagagagagtaaactcgtttcaccatggtgacacgagatagcgccgtttcccaggtcactgaaacggggtgaaacagcattgagagttcatcgtttcacctccgggatcccgtgcgagcgctgctcttcgccatcttcgcgcgcatcgccggattcttcccgcgcgagtcccccatcttcccgcgcagcacctccatgttcccgcccccaaagcactggctcgaagcttttttccccaatctcacctgcaaccctagcgccagactcagtccccatcgccccgtccgtcccataccctagcgcaagaaccacgagcggagattgcggagctggatccacaagtaggtggtgaatcctgtccatctgccgccgtccgccgtccagcagccatggatccacaaggaggtggtggatcccgtctgagcgccgccggcagaggagggaataagcgtgggggcaagcagctgggcctgaagaggtcgtcggcgcctgctccatcaccggcaacagctcagccaccgctgcctgcaagttcccctcctgaagctccatcgccggcaacagttcagccgcctactccatcgtcaagtcctgctgttgctgcccccagttcatcccctgctgtaccgatgtcaaccatgcccccatggccaccgcaaggagcaggatggggctctgtaccccccaattttgcttttctgcaaggaaaccaacaaggcccaagttcatggtattttctccttgtcacagattattcattgtacactatgatacatgatatgactctcttcttcatgcattagtaattagttcctgtttatgctcaatgaaatttgttagaatcagtatgtcagtacattggtaatttgatatatgcctgagtaatgaatagaaaaaatgtagtattcagtatggattgcagtaatactttgttagtgaaaattcagtattcagtatgcagtatggattgcggcttgtataacagaaattgaaagcaaaagattcagtttgcaatctggacagtgtactgtacaacatgtaattcacatacgtaaagcttgttaaatatctccttgtcagtacattggtaacaaatgctttgagtgtaaatgccaagggtatcatcctaacattggtatatatttttagccttctgtatggaatgcagacatggtcttctttgcaaccacagcaacagcttgccctacactctgtgctgtcgtcatagctaaccaaataacctgttagtactgatatatatggtcttctttgcaaccacagcaacagcttgccctacatggtcttctgtatgcttgactaaacttgttacttgacatatatgcttgactgaacttgttgcttgactgaattattccttacacatactgtagtacttgcttgactgaactatgtcaggatcttattaaaaaaaatctatgtcagcactgctactatgtcaggatcatcagtatgatgcttaagtaacctgttagtatgtcagtacttactatgtcaggatcatcttctggaacttactatgtttgattttcttatgctgccatcggtttcaattggatttgcttcttatgttttcaggttgtatcctacagaaggcttcgtaaattttctccaacagaactgtctgccgcagccacaagaaggtgaaaattttcaccttgttggtcagactaccaacacaatgtctactccaccaccaacaccccaagctgcagctaacaatacagtccaaattgatattcatgaagatgcaatcaatgatgcaagtgctaaaaagagaagtttgagatattggactcatgatgaggaagagagattggctagtgcttggttgaatgcttctaaagatcccattcatgggaatgaaaagaaaggtgatacgttttggaaagaggttactgatgagttcaacagaaaagggaatgggaagcgtacaagggaaataaatcaattgaaggttcattggtcacgcctcaaatcatcgattggagaattcaatgattactggactaaggtaactcaaatgaatacaagcggatatgacgatgacatgctggagaaggaggcacaacagatgtatgcaaatacatttggaaagccttttgcacttgtgcattggtggaagatactgagaaaagagcccaagtggtgtgcaatgattgagaaggacaaaaacaaggctgaagtggttgatattccagatgaacaaaagcgtcccattggtagagaagcagcacaagccgagcgcaatggaaaacgcaagaaggacagtatgtcagaaggaattgtcatcctaggggacaatattgaaaaaattatcaaagtgacgcaagatcggaagctggagcgtgagaaggtcactgaagcacagattcacatttcaaacgtaaatttgaaggcagcagaacagcaaaaagaagcaaagatgtttgaggtatacaattccctgctcactcaagatacaagtaacatgtctgaagaacagaaggctcgccgagacaaggcattacaaaagctggaggaaaagttatttgctgactaaggttagatatctaatctaatctgagctgcactattatttataataattaaagaatgctgcaatatttagttatattgtctgtatatctgtgctgcactatgcagtcagctgcatatcacgaatttgtcaaatctgagctgcatatctgtgaatggtgcaatatttagttatattaattacccagtgtgaatgatgtattgctgtcagtttcacatatagtatgaatgctgcactatgcagtcagtttcacatgcagtgtgaatgctgcactaggcagtcagtttcacatgcagtgggcgcctatttatgcagagtttagccatctctctactcctctcagaaactcattccctcttttctcatacgaagacctcctcccttttatctttactgtttctctcttcttcaaagatgtctgagcaaaatactgatggaagtcaagttccagtgaacttgttggatgagttcctggctgaggatgagatcatagatgatcttctcactgaagccacggtggtagtacagtccactatagaaggtcttcaaaacgaggcttctgaccatcgacatcatccgaggaagcacatcaagaggccacgagaggaagcacatcagcaactagtgaatgattacttttcagaaaatcctctttacccttccaaaatttttcgtcgaagatttcgtatgtctaggccactttttcttcgcatcgttgaggcattaggccagtggtcagtgtatttcacacaaagggtggatgctgttaatcggaaaggactcagtccactgcaaaagtgtactgcagctattcgccagttggctactggtagtggcgcagatgaactagatgaatatctgaagataggagagactacagcaatggaggcaatgaagaattttgtcaaaggtcttcaagatgtgtttggtgagaggtatcttaggcgccccaccatggaagataccgaacggcttctccaacttggtgagaaacgtggttttcctggaatgtttggcagcattgactgcatgcactggcattgggaaagatgcccagtagcatggaagggtcagttcactcgtggagatcagaaagtgccaaccctgattcttgaggctgtggcatcgcatgatctttggatttggcatgcattttttggagcagcgggttccaacaatgatatcaatgtattgaaccaatctactgtatttatcaaggagctcaaaggacaagctcctagagtccagtacatggtaaatgggaatcaatacaatactgggtattttcttgctgatggaatctaccctgaatgggcagtgtttgttaagtcaatacgactcccaaacactgaaaaggagaaattgtatgcagatatgcaagaaggggcaagaaaagatatcgagagagcctttggtgtattgcagcgaagattttgcatcttaaaacgaccagctcgtctatatgatcgaggtgtactgcgagatgttgttctagcttgcatcatacttcacaatatgatagttgaagatgagaaggaaaccagaattattgaagaagatttagatctaaatgtgcctcctagttcatcaaccgttcaggaacctgagttctctcctgaacagaacacaccatttgatagagttttagaaaaagatatttctatccgagatcgagcggctcataaccgacttaagaaagatttggtggaacacatttggaataagtttggtggtgctgcacatagaactggaaattgagaatcagtaaatgtaattattttatttttcttgtaatttatatatctatggtccacttgtaaatttctgaatgctcatcgccatattttttaatctctgcaggttccaatctatttacaggttccctaaaaaaaaatctatttgcaggttccagtctgttgtcttcacaatgtaagttctgagaatcaaatcactatgtttttctcttttttggtagctacagggtgttagaacatgtgttattttctttactatgcaattgtgatcctccaatatttatctactgcatgtgtaaacctgtttgtcatgtctgaactactttcatttgtacagggtgaaagaatcaatgaaatctatgggtgcatcgtcaatttgcctccagttacctgcttgtcatcgtcatttgtagcttagttctgtcatatttcacctcgagttaacatctattcagttatctaaactttgctatgtagtgaacttggttgaatggtcatttaaatttatcaagtgaacaatcgtacctatctgtgctgaatgcatgtattttgttttgtgttcaagtggctacacacgtttgtgttacatacgatcccactatgtggctggaattaaatgccttgaatttgcattggaaacgctagagtgaaacacagcattgagaaggtctgtttcattgtacgtttcaacttgtttcatcttcgtttcagctgatgtggcgtctgggaaacagtgtaatgaaacactgcattgtgaatggccttactaggccgccgctgctagcatctttcccgtcgtttcctctacaatggaatccgagacgacagcctcacctgaaactgttacacacgccttcacttcaacaaactgattgggggcatttatttaccgaagctgcagcggcgcagtaatggccttcagccttcttctcaatctccctcctccctgtcctcctcagcttctccacatgagaagtactaatcattaagttatcctcttctttataaactccctgaaggcggctccattgcatatgccgaaaatctctgtctgtctatctctgaactaatgcaaactggattgcaaattttcatttcactgacaaattttcacgttggaggaatttccattccggtgggcttttcttgctggtgctgcaggcgcctggatggttaaattttcaatgatatttttggtatatgtagaagaaaatgcataatccacgttgtttttctgaagaattgcaccgctcctgtcgtcctcaagcattctgtgtttgtaccttggtatgtgcttcctaccgaggatggatcatatatgcttaaaattcatcctccttgtccaggttttaatgagttctcacacctatttggctattttattagattgattcagttgtccgtgccagattatatgcagattttactgtgcgtctaagttgtttttcacatattgtaggcttaaaggagatgtagacgtcttcgtcactaaagttaatgcttacaaatatattctcttaaatccctaatctgtttttactcagaaggactagctagctactcagtattttttttatttagggttaccattagctgcatatgtaactctgattttgttgagatttactttaccgttcaatattaaaactggaatactgtggagggttccaaagcagccctagctgcaactacaccgatggatataaaaggtttctttgcaaaaccccaggacctgctttcttaatttgtatcacgagcaaaaccgaaacatcaattttcacatgctctgccagtataatgagcgatgtaatggatcgagtgattattcctataataacagtacacagggttcaatatttcagaatggaacttctggaatttcacccctgcaataggatattacggccaaaaatttgagtatttttagttaacgaaaattcattcaactttcaactttttcagccagaaatttccacaatttcgcttctatcagttcccactgaaatatttagattttcaagttgtagattttttattttttttgcaatttcaaacttgcagtacacttggttagttttgcaagcttaatttgactataaaataatttcgattttaaatatgttgaaagatcttaacaaaattttaaatttgttgaaagttcctgttttcgtttaagaagaagagaggtggcctagtttttagggaaaaccgggcccgaaaacctcacaagtgcgtggttaattaagggaaaccggccaaagacccacatgaggaactactgaagttcgaaacaaaagtcatcgttgccaagctcagaggagcagctccgacttcttaagaacaaactacgaactagctaggcgaccacaatgacaacgtagggcagggtcttccaaacgaaacctccaaggaaaagcgtcagagaacacaaacaacgtccgtccaagaatcggaataaagttttcacccgaagaaaaggagagcaagcaacaacgccttcaggaagggaacggcgcccacaggcgtcgacgttatcagccgtagtccaagaccaagcagggctttcacccgtgctcttgctccctgacaaccacgaaaccaaggccgccacaatgcttcacaacccttagacgcttccaaggacgagagaagggggttattgttgccgagcttgccactgcaagaagctccgactccacccccaactcaaccacacggttgcgccacaagagcttcgagcaccacacacctcgctgctgcaaggactttgaaggcgctgacagagtggacggtcttccgatcttcaccaagcagaaccttccaaccaaacccgtgtctctctccttaacatggggcaccccacgactgaagtaggccagtctaagaggtgtagggtctccaatggacgggaggagggaacaacaaccagttgggaggaaccctcgccgtcgaccaggacactgaccacactgctgatcatcgtgtcccacggctttccaacaagcaaaactgcagcaaacgatcggcctctccaagtggcgactccacctaacggcacctgctgcgcctctccggccatcttctttttcagcctctccaccggccacctctactagcaccttctgccggcctcccccaactccactggcctcccccaactccttatggccagcctcctccctccgagcatggaggcgaccagattcggcataggccggattgaccgcctcctccacctgccggctaccagcttctcccaacagccagccaactccaccactgcgcctcctccaactccactcccgtcggccttccccttctggatccaaggtgaaggcagccagatccgaaaccggttgaccgcccctccatatccggccacacccacaccgccacatgccgattccaactcgccgctgcctcttctcaccgcctccaccccgctgctatcgctggagcagctcgccgccgggacgccgcagctgccgctaggacgtcgtccctcatcccctgcgcaggagaggactcgtcgcttcacggctgcctaccccgccgccgccgtccttgctcgccgagccatggctcggccccgcttgctctggcgggggcgaggtggaggatggagggggaaagcggcggtggctagggttttttccgcccgcccagtcgcccgcgatgggagcgacgcaagcaggaaagacaagttttttacaacgcatggggaaagcaatcaatctttataacagtccgcagtaacacatagggaattatctagttttatttatagctaggtttagcagcgaggcctctaaattatagatccggtctggtagggagggggtcaattgatcaatatggctgatgctccgattctctagtgccagtttcatatgaattcgtgtgatactcaagatgaagtgaagtgactgctgaaatagaaagaactcgatccgtccctagaaatcacaggaccatagagataagcacagggaacagtacgtcgagtgcagaactgtcgctgcttttactcgtagatggcttcttttgggctctatcgtatcggcgtatcgccatgacggtgcacacatgtaaaaataaataaataaataaattaaaatcaactaccaaatctaactatataaacgccattaattcggccattataagagcaagtttaatagtacagccaactactagctccaaatcatctatagccaatattataatcaattcatacaatagttgcttactatactattaatatctgatcctacctgtcatacacacagtacgtcttgaagtccgtgctgcagctggctacagatttgtagcccgctgcttatctctctctttctttatctctttaaaatatgtttgtagctggcttatagcctgctattgtacctactctaagcaatatattttctatctccacgctgaacacgagccacggtagagtcactgctcacagcttcactgtatttaaaccccagatgctcacacccatgctaatataacaaacagaccacagaccagagtgaggctagtacatctcatttcaatggcaggtcaggctcccaacatgttggcaccaccgaccgacgacgagctgctgcacgcgcaggccgacctgtggcgccacagcctctacttcgtcacgtccatggcgttccagtgcgccgtcaagctcggcatccccaccgccatccaccgcgctggtggcaccgcctcgctgcccgaccttgtcgccgccctgtccctcccgcccgccaagctcccattcctccgccgcctcatgcggctgctggtccactcgggcgtcttcgccgccgccgacgacaccaccgggtcggccgggacgtaccgcctcaccccgctgtcgtggctcctggtggaaggcgaaggcggggcgcccgtcgtcgacggccacccgtgccaggtgcccgtggtgctcgccgggacgtccaggcacttcgtcgaggcggcgatggggctcgcggagtggttcaggaaggacgtgccggcggccgcgccgccgtcgccgttcgaggaggtgcacggcgcggtgctgttcgacgagagcatggcgagcctccacccggaggtcgacacggtcttcaaccaagctctcgcggcgtacgaccactcgggcttcgccacggttctgagggagtgttccgaggtgttccagggggtgcagtcgctgaccgactgccgcggcggcgatggcgcagcggcgaaggccatcgtcgaggcgttcccacatatcaagtgcaccgtgctggactttccccgggtgattggcaataaacgcggtgatggtgtggtgaactatgtagcgggtgacatgttccgcgccatcccacctgctcaagctgtcatgctcaaggtaatttgtaaaattaatgcaaccgttatctttcacccacaaagaaacttgcacatattgtgagccagctagtgctccctccattccataatataatgcacaactattttttaaaaatgttttgtaatattagacatgcatccatacaattaactaataacttatatccactaaattattatttttaaatcatccaccctcaagatctataattttattgggtgcatgcattatatttattagggtaaaataaactaggatgtgataataaattatttcttgatgtttaggttaagtgtgtttatgccttatattttggaatggagtgagtactatgacctattacttcctcaattttcaaattaattataggcccatgcgttataacggtttttctatttagtttagtgataggattcgcactgggtgagttttttttatatactatggttggttcttttatagaaatacgatttttcacagttacatgagggaagaggtttttatgaggaagtggaggggaggacgattccctctttttaagtatagatatatgactatactgatttctagcatgatgtttgaccactttttttatttaaaaatttagtataaatataaaatataagtcatgcttataaagtacctttaatgagaaaaatcaagaaaatttataaatgatacaattttaaaatgagataaacagtcaaacattattttctaaagtcaacaatgttatacatataataacagaggtagtatattcacgatagacttgagaagtaaacaagtaatagttgaaaaataaaaggttcatcttttgttgctatgtatttcaattttatagttcctgcagaagttgtcaacaaaagtttgcgacttcaccataaagaagaacggttaacgactagaactaaaaaaaagaactgtgtaatgcaaattataagtttgtttaacttttttgtggcttcatctatggtagcttgtgcttcaccactggagtgacgaggattgtgtgaaaatactaactcaatgtaagaaagctattccagcccgcaaagatggagggaaggtgatcatcattgacatagtgattggagctccttctggaccactactggaagcccaactccttatggatgtgggtatgatggtggcgaccaaaggccgacagcgagacgaaaatgactggcgtgatctcttcaagaaagcaggcttcaataactataagattgtgaaaaaattgagagctcgagctgtctttgaggtctatccgtagggtgctcctaaataccatggaggatgtgatctaagtaaataaatgaagggagtgcatactttatgaaataaagttttatatacgtgagcctatgtcaagcttggattgttaatatgtgtaaagcattctgtgttgaatgtttcatgtcagttatgtccagttgctttgtttcgtgtgagttaatatgtccagttgcttacgttaatgtgtaaaacttttgttcatatatctgtggatggatggaatactttcagcatgcaaacatgacaatttgacatcaccttcaaccaacttcgtccaccgaccatcagtatttgggacacaaatttgttcgataacactgtcttcaataaaattataccatgttggaacatatcatatatcattgcttgcttgcttactaacacgatgtaattcaaatggtaaaaaaacaaagctccgatatagtttcaattagtacatttttggtgacattttaccttatgtccgtggttgacggctgaccagaattatcctacttccaatattataagcagaggcggagctagagcgaaatgaagggtggtgccacttgtttaatttactctattttagatcaagtttaagctgatatgagtgcctaagtttgtattgagggggtacatatatacatgctaaaaacttttcttgaccgagttcataggcaccccctaatatacgctagctccgcccctaattataagctgaggtttctgtttgttgaatttaccatacaagattttgcatttatttcctctaatctattcctgtttcaaaattttacttattgtaatcagttcatcaaaacgacttgaaaatttttctagtccggacaaattttaagctttaaattaaatacattgatttagggcatgtttggttgacacgccgaaccccatgcctgagaaaaattgaagcctgaaggtggcctgagaattcatgggttcttcttgatcaggccatcttacgcttatgtgtttggttggaagcctgagcctcataagtcaaaaaatatggtttatgaacgagaaagcatataatactcaataaagaattgcgtttccttaacccatcttatatgaattatacgaagaacagagaggggcaccaagtgagctcgccggcagggaagttcggcctcagaagtaccaacaaccatcaaaatggaataaacagagcaattcgactctaatggtggttgtttgcacttcgtggagcagccgatgatgggcatgcttgtagtatcgaacaccgcaggtcttgtggtagcaataaacgtgtaaagttttgatgaaattagattgtgggttttgattagggatgttttggctgcaaggaattggtgctcggtggccggacttgagaggaagaaggtggtgctcggtagctgaaacccacaattaatgtggggaaaatgcttaggagatagggagcagtgcacacatagaaggaatttttgtttgttttcctgtcggcgacgaattgaaagggttttgcgagcaacttgaagctcattctagtgattttttatctgagtgaaactaacgatgcttgatgttggaatctcctgaaaatgaagatgaaaatagggttggtaataatatgtgactaattaagttttaattattacaaacttaaaaaatggattaatctgatattttaaagcaactttcatatataaatttttcgcacgaaacgcaccgtttagcagtttgaaaaacgtgtcacgagtatccaaaatttatgcttgcagaagaaacgaacagggccgtcacgcctgacgacctgagtcaggtgacgtttttcactcgcctgagtcgtggaggaacccatgatagcaactaaacaacccccaggccttagcctttagtgactacagaagaatttgctttcatttatactttagtcggatatacagtaccaaatatagatagaatatttttatgaggactcgggttagattctaaacttgtatgtcaagaaaataccagggatcctagtcggttacgattgtattttatctgtaatcccatattccgttaggatatggactgtactttgtaatacggatccctttccctatataaggaggggtcagggttcctctcgggacgattcttttttctcccaatcatacaatcaataacacactcggtggaatcatccccggacaggagtagggtattacttcttaaataagaaggcctgaacctgtataaaattccttgtctccaaacccatccactttcctagcttgatagccacccccttttattattgccgaaatcttgtttcgacagttggtgcgccaggtaggggtagcgtcaagttctcgccgactaagtgcgatgggtttcgtttctggcatcgacaacttcgccttccctcccgggcaggcgttccggttcggcagcctcaacttcatcaccaacgacttcggcaagatctctctccttgactcggattcaaaccagtcggggagagaccaggtccccgtgccattcggtattccgaactcggccgaggcctactccaagatcatctctcccgagtcggcttcaaaccactcggacgagatccaatctactcttccgcgaccagatcaagacgacgggttctatccctcaatcctgatgaagcttcctgatgacttggccgccgtcttcaccgccaagacatctcctactcgaagatctaggcgagctccggcttcggccctgatccaatctagatctagagaggttggcgttatactccaacctcttgggacagtctcgacggaagagttggatggttaccttagctcccccggcgtcaattctcgaccaaccgagatcctcgactacgacgacttcggctaccactacgaccacggtgacctcgacaacttcgacgacagctatgaggataactacacgcccctcttcttcggcgtattcatggctgacaacgaaacggaggagcagcgccaagcccgagaagcggaggaagagcgcatacgacaagaaaccgaacatcgccgactggaggaagagcgacagcgacaggagcgagaatgactacagcgcgagcaacaagatcgtgaacggattgcaaaggaggctgaagatcgacagcaacgcgccttggaatccaggcgccgagcgagagagctcattgggcaacaagacgtcgatggaacagtggtctttcgcaccccccagcagaacgcggttgcagcaatcactctcctcgacaccctcctcaaggaagacgcactcaaccaagctgatcatgttgtcaacatcttgaaccagacgaagaccatgatcgctgcctcggttccagccaactccgcaagcacccgcactccgactggtagccaagtccctcacctccgatctcatgattatcatcagccaagcctcagcatcatcggcacaggatctagtcgcaggagcaggggtcacgacgaacgatctgttcactcgcctcccgaacgtcacagggagcgccgagtcgaacggcctcactctccacctcaccagcgtcctgtcgatcttcgcgacacgatcaaccagcgccgtgcagcacgaggtcaccgccattcaacaaatcgctacgacgacgacgtggatggagtagctgccttcactaatgacctgcgtcgagtggattggccagccggctttaagccgactggaatcgagaagtatgacggcaccactaatctggagtcttggctcaccgtctacggactcgcaatccgcgcagcaggaggagacagcaaagccatggcaaactatctacctgtggccctagcggactccgcccgatcctggctccacggactaccccgtggcacgatcggatcatgggcggaacttcgtgatcacttcatcgccaacttataaagcacctttgaacgccccggcacacagtttgatctctacaacgtcgttcagaagtctagagaatcccttcgagattacatccgacgcttctccgaacaacgcaacaagatctccgacatcaccgacgacgtcatcattgccgccttcactaaaggcattcgccacgaggacctagtcagcaagttcggacgtaaaccccccaggatggttaagcagatgttcgaaaaagccaacgagtatgccaaagccgaagatgctattaccgcgtccaaacagtcgggcaccacttggaagccaaagaaggatacatcgaccgcaggagggagtggaagtaacaaccacaaggatcgcaagcgtaagcccgaagaacttgtggcgaccacctctccatcttcccgacaacgttcccgcgtcaacaccttcgacaagataatgaactcccaatgtccgcatcatccaaactccaaccacgtggccaaagattgcttcatctacaaacagttcgcggagcaatacgtcaagaacgcacgtaaaccttcagacggagatcaaggcacatcaaagaagaaagatgatgaagacgatgccccgactggtttccaagatcatcgcaaagaacttaatcacatcttcgacggacccctggcgtatgagtctaagagaaaacagaagctaacagaacgggagatcaatgcggttcagcctaacacgccccaatatcttcggtggtcagaaatagcaattaagttcgaccgctcggatcatcccgaccgagtggtccacccggggcggtaccccctggtactagacccagtggttcgcaatgtcaagctccgacggactctcatcgatagtggcagcgcactcaacatccttttcgctaagaccctggacgatatgcagattcctcgcacggaattaaagccgagtaatgcacccttccacggtgttatcccaggattgttagctacaccactcggccagatcactcttccagttaccttcggcactcgggagaattttcgcacagaaaatgtttgtttcgaagtcgctgatttcgagacagcatatcatgctatacttggacgaccggctttagctaaatttatggccgtcccacactacacctacatgatgatgaagatgcctggtcctcgaggagtcatatcactacggagcgacatcaagcaggccgtcacatgcgacaaagaaagttgcgagatggcccaaacccacgagactactctcgcccgcgaagagatccgactggctgcgaccacggcaagcgagggagaagtgcctacaaccaagctgacgaagaccgaagaaagtgatgccaagaccaaaaagattcccttagatcccttcgatcctgataagactgctgtaataggcgctgagttagattgtaaataggaaagcgcgctcatcacctttcttcagaataataaagacatttttgcgtggaaaccatccgatatgcctggtatccctagagaggtgattgagcactctttacatgttaaggaagacgccaaacccatcaagcaatgactccgccgttttgcataggacaggaaggatgcgatcaaggaggaattaaccaagctgttagcagcaggcttcattaaggaagtccttcatcccgactggctggctaacccagtcctggttcggaaaaagatggggcaatggcgcatgtgtgtcgattataccgacctcaacaaatcttgtcccaaagacccttttgggttacctcgcattgaccaggtggttgactcaacggccggctgcgagttactctgcttcttggactgttactcgggatatcatcaaatccgactaaaagaatccgactgcttgaagacctcgtttattacgccctttggggcctactgctacatcaccatgccctttggattgaagaatgcaggagcaacctatcagcgcatgattcaaagatgtttttcaactcagatcggtcgcaatgttgaagcttatgttgatgatgtagtcgtcaagaccaagcagaaggatgacctgatcgcggatttagaagaaacttttacaagcattcgtgctttcaagatgaaactaaacccggaaaagtacatcttcggagtgccgtcagggaagttgctcggatttatggtatctcaaagaggcatacaggccaacccggagaaagtcaacgccatcctcaacatgaaaccgccaagctcccaaaaagacgtccaaaagctgactggttgcatggcggcactcagccggttcgtctcacgactcagctagcgggggatgcccttcttcaagctgctgaagaagactgacaattttcagtggggacccgaagcacaaaaagcctttaaagacttcaagagacttctcactactccaccagttttggcctcgccgcatccacaagagccgctgctgttatatgtgtcggcgacctcccaggttgtgagcacggtcctggttgttgagcgccatattcaaaaagtccaacgaccaatttattttgtcagcgaggttttagccgactccaagacaagatatcctcaggttcaaaagttattatatggtgtcttaattaccgttaggaaattatctcactattttcaaagtcacttggttacggtagtcacatcgtttccactcggagatatacttcacaatcgtgaagcaaatggacggattgcgaagtgggccttagagttgatatctttggacatatcattcaagccacgaacttcgatcaagtcacaagctttagctgatttccttgccgagtggaccgagtgccaagaagacatgccagaggaaaagatggaatattggattatgcattttgatgggtcgaagaggcttacaggcactggagctggggtcgtcttgatttccccgactggagaaagattgagctacgtattgtggatacatttttctgcgtcccataacgtggcggaatacgaggcgctactccatggattaaggattgcaatctctttaggcattcgccgattaatcgtccgtggagactctcagttggttgttaatcaagtcatgaaagagtggtcatgtctagatgataatatgaccgcttatcgacaagaggtacgcaagttggaaaacaaattcgatggactcgagctcacccatgtcctccaacataacaataaggcggccgacagactggccaattttggttcaaaacgggaagcagctccttcagatgtgttcgtcgaacatctttatgaaccgaccgtgcctagaaaagagatagtcgaagccatggatactcaaggcgtaagcatgattgaagcctactggagagaacctcttgtaaaatttttgaccaaacaagaactccctcaagacaaaaatgaagccgagcggattttcagacgcagcagactttacattattcatgagactgagctgtacaagaaaagtccatcaggaatactgcagcgctgtgtatctttggaggaagggagacaattgttgaaggatatacattctggtatttgtggtaatcatgctgctgcacggaccattgtcggcaaagcttaccggcaaggttttttctggcctacagctgtgtccgatgcggataagattgtgcggaccattgtcggcaaagcttaccggcaaggttttttctggcctacagctgtgtccgatgcagacaagattgtgcggacatgcgaaggttgtcaattttttgccagacaaactcatttgccagcccaagagttgcaaaccattccgttgtcctggccgtttgcggtctgggggcttgacatggtcgacccgtttaaaagggtagtcgacggttacacgcatctctttgtggctatcgacaaattctccaagtggattgaggctaaaccggtcatcacgatcacagcagataaagctagagattttttcatcaacattgtgcatcggtttggagtacctaatcggatcatcactgataatggcactcaattcactggcggagcattcaaagatttttgtgaagacttcggcattaaaatttgttacgcctctgtggcacaccctatgagtaacggacaagtcgagcgcgctaacggcatgatacttcaagggatcaaagcacgagtttttgaccgactacgtcccaatgctggtaagtgggtagatcagctgccgtccgtactttggtctttacgcactactcctagtcgggctaccggccagtcgccgttctttttggtttacagcgcagaagcaatgttgccgagtgaagtggaacttgaatcactacgatttcggaacttcaacgaggagggctatgaagagggccgagtagacgacatcaaccgactagaagaagcccgagaagcagctttaattcaatcgactcgatatttgcaagcgttgcgccgttatcattgtcgaaatgttcgattgcgagcctttttagtcggtgacctggttctgaggaaaattcaaacaacacaagatcggcataaattatctcccttatgggaaggaccgttcataattgctgaagtcactcggccgggttcttatcgactcaagcgcgaagacggtactctcatcaacaattcttggaatattgaacaccttcatcgattttacgcttaggcatttcgtttgtatctttcctctttgactgttaacttcaagttttttccttgaagttttcagtcagggggctactataataataatggagtgtgatttttatcaattcaatttgcttacttgatgtatcattgccctgtttgatttcttggcttagtcaatgaggactgaaagttttttaacaacttttgcgggttttaggctcaacaaggtttgacaaaaacttttaagaaatcaggaactagttaagatatcaagcatagcataaattcatcagtattgtataaattgtgcctccatcatcattaatcatcaaaatcattggtacattaatcagtatcagtcttttcatcatcagaattatcaggaccagtcggtcgaagatcggtgtcctaaaatctctcaactacatcagcagcaatcttgtcagcggctttctgcgcatcactgatgaggtcaagagcaacttcttcgctcgtcccgtctgcaaagccatcaatggcatcaacgtcaaccctcggataaagagatttggtcatcgccaacgccagacttgctcccatacttctagcttctttgatgttcttgaaatatgtatccggagcaactcttagcttgtcgaaaatttcagaagcatcaagtgcgcttggccgttgttattgaagaacatcgcttgaacaattggggcagcagcgttagcaacctcatcccgggatccttcaagtttttttatcttgccaaccaggacgtcgaattgagcttgagatttgatcttgcggtctgcatcaacagattcacattaataagtcagcatatggaggataatggtttttgaggtattgattgttgataccttcaacttcttttaaagccaggtttctttgtcttgccagttctgccttgtcattttccaggatttgaatttgcttctccaactgagatatcttggcagcttgcactacattgattacggttaatcaagattgcaaagataacagtatgagtcaattgagcagagtttgtgcataccttttgatgagccactcagttcaaaatttgattcctggagctcagcgatccgatcccgtagatcatgttcattcttcctggcaagttctttcacttcgtgcagttgattcctggtggcttcgagggttccgagatgagggactaacctctctaaggttgccgttttggcttcgttcctaagatgaatcctctgcaagacagtttaattagcgcatgaattaaatggcaaacgagatggttgagatcaagtaccagagggcttacatttacaatgcgtgttgcctgaccgagtgccttcttcagtaggcataactcttcgtcctcttttttcttacttatcacgatcccttgaggctgcatgttgtcatcccaccacttgaccagaatcggagggcatgaatcctcagctgcttgtatacgggggatttcttcttcatcaccaattattggtcctaatgtattcactaacaaaggttagacaattgatcagagttatttgggtcaacatggtttcagacaaagtgtttacctgtaatgatttctggacgaggatgagtggactcagatgcttttaaaggagatccagatctccggtcattgctggcgtcttgtccctgagggttgtctgcttgggtttcgacttctggaatctcttcgtttgcccctgcatccgactggtttccggtcgggggctcctggttagcaccgacttcagcttcggccgactggttcccaatcgggggctcgttgctgggttctacattgtccgttgccggctgattgtcactcggatgatcctcagcagttggtccggtttctttggaagaacttgtgtctacgttagtcgggttagagtctttcccggacggatctatatcagatggtttcctgcaaatttgattatcggtgttattgccgcaatggatgcgcatcaatgcaagagagatcgttatgtgagttgtacctagaagacttcctgatctttggtgcagggcgactgaatgttttcttccttggagtagcctgttttggtagtttcttggttgtctctcggtctccaggcttcctggtggtatcatcggcttcgtcgtcacttagaaccagcttcctctttcgagaatctgactggccgactggatcagaagcacttggttgagtttcggatcgaattcttggtcctccgctcccttgcccagtttggcggcggggagattggcgttgagcaattgggggatccgacttcatcaaagcaaattcctgggtataatatctttcattgttaactgattcaacaagaagacgatcatattttgaaaaaggttgaagtgtatgaatgcgtaccggtggaggaggattgaatgcattgaacggtacgactggcagcaagtgtgagtagctgacaacgatggcgtttgaaaagatcttatacatcctttccttcatgaccttgaagtcaagagaatctgggtcttcacggtttgggtcatgcttgccgtcgaattcgaaggctgtacgagatctttctttgattggagctaaccgacacttgataaagtgcctggtgatctgttctccttgaaggccctgttctttcagctttatcatcctctccatcagttctactgcttgtgcggcttcatctcccattggcagcgagttccaagtatcctgataaactggaggaagacaggagtactcgggaaggacaggctcggggttttgaacataaaactagtttgcgtgccagcctttatttgaggtcttgaagggcatggagaagtatttttggcttagagttcccctgagttggaaaccagcacccccaacgacgcatggtttgctcttatttggctggggcttgaggaagaagatgcggtggaacaaggcgaaatgaggcctaatgcccagaaaagcttcgcaggcatgaataaaattggcaatatgcactatggagtttgaattcagatgatgcaagctaatcccgtagaagtttagaattccccggaaaaatcttgaggttggaagagaaaatctgccatagaagaaatgagcgaataccacgatctcatgtgtatctggggtcgggaatgcctcaccaaatgccggtcgccacccgatgatctcttttgctggaagaacgacgtgcgccaccatctccttcagattgtcttccgttacatcggagggcgcccactgactttcgaagctttctctttcctctgccatgaatgtgaactggacggtctgatttagttcgagatacggctggaaagggatggggaatcggagcggtggatgcgaggagaaatttcgcgaagtttttgagggtggattggagcggatcgatgaaccctagtttgcccggcgcagttttgcactgtagcagggaatgttgaaaatggcgagagtctcggcggggaagacgaagagccgtttttcacttcggcattattagggtatcgggagtactaatgggcctggacctatacagtacttcagcccaatactataattagcgtggcctgttgtgatccctaggaacttaggcgctttttgctttggcaatatgtgctcacgatgatgcggcccgatgctgttaaaatcctttttaacgcgattcaataattctttggaattattatgatgcacattaaaaggtgcccgacagaaaggtgttataccatttttgtaaacctttttaggctacaaaagctattgggttaatttgagatgactggtttattagtagtcattctcctagcatgttatatgcttattttgattgtggtaagggttatagcctaggctaatgaacttattaattaccatgatctttatcatatttggtggatcattttaagagtttcttacttggattcttaccaaatatatctatttttggaccttttgagtgtttatcattcggccctttttatattttttgtccttgatatgttctagttgaggagcagtcggctgggtatcttactaagtaccatgcgtgcttcgctataaaaccactcggttcttgactatatgtttagtttttcacatagtcgggggctacacctaattaggtgcatctactcgatgcaccatgttttattttcgcccttcacagtttctgatttttactactcggcaagctggagcaagttgaattgaagcactcggactactggtttttgtttcgagaaggttatttcgtcaactacgaaggtctcgggggctactgtggagataatggataccccatatctgcatgacagttatattttagtcggatatacagtaccaaatatagatagaatatctttatgaggactcgggttagattctaaacttgtatgtcaagaaaatactcgggatcctagtcggttacgattgtattttatctgtaatcccatattccgttaggatatggactgtactttgtaatacagatcccttcccttatataaggaggggtccgggttcctctcgagacgattcttttttctcccaatcatacaatcaataacacactcggcggaatcatccccggacaggagtagggtattacttcttaaataagaaggcctgaacctgtataaaattccttgtctccaaacccatccacttttctagcttgatagccacccccttttattattgccgaaatcttgtttcgacattgatcatttaaggtaacaaatacaatttcctctacagattactaccatcggagcatccttttccttttggcatatcccttttaacaaaaaaacgttgtgctctaccacactcaaacttatcattttctaaattaatttgcaagaaattgattcttatttcattctaccaatgtctgaagcaaccgtgcaaggtatcaactagtttaagtaatatattgtatttgttgattaacattatgatgagtcgaaaaccgggaaatattcatgctctggacatgggctaaaaggaggtaatggggagaaactagacagagtttgttccaatttaaatttgaaacgaaggctgtgaaataattcaggaagattcctacaaatacatactactataaagtatatcaccttaagcattgtgaaagtaaccttaagtattgtgaaagtggaccataagaatctgacatcaaaaataagcattagccttatggtgtggcaacaagactatagaatgtggaagcgaggaactcctacggtgaggaggttacgtgttgataataatgccacaatcgggcgacaggattacaagagataaatagcttcggtgagagtttgttgtgtacagctaaactacagagattgatcatatcttatctaactaacacaacaaactctatcctcagccatacgggagtattatcaaatgtacatgcaatatatccaaactctaacatagaatataatacttttgtgatgtgttgttcacgctagtacttttggggaattttcattgtgcaaagagtttcacaggaggataagaagtgattttttttatccttcggtgggacccattgggacccagcttattttctcccataggcacagccattgtggatatggacataactaatgcttactatagcgggtcccacatatatggctgatggaaccataagcattggccttgccctaacctattggcacaaaagattttctaaacatattgaaattaccatagtttttcactgagacaataaacaactaaaatgatttctttggtatagcttcagatccaagatcttttaaagtgggtattttacacatgacacatcacatcacatagaacctgaaaatcttaaacatttataatttaacatatgaataaactattttttttattttaaatgaaatctaaaattcttaaacatttataatttaacatacaaccttcaaataatctattatgtaactgtgacgtggaactgtgccaaacaggacctaagcgtgaaaaaagaaaattatgatgggccgaaaagccattgaagaacagcccaataagcccactgatgggaacgtatagctgtccctccgcggtcaatccccatccacagcacgcccctctctccccgacctcgagcatccgccgtcgacgtcatccccacccgccgccgccgccgccttctcaccggagctcggctttcgcccgggagacagacaaaaccgtcctgctgctgctcggctctcgggagcaggcggttcccccaaatctcccacatcctgctcctgctaatggctgcttcttcccccaaatccctaccctaaaaactctgctgctgccgctgcataggccatgggtactgacgccgttcgcaccccctctgcgcgccgcgcagcccgaacccgcagcgcatcgtcgggtggggaaacaccaacggagagctccggccgtaggcgctccaagcaagccgccgtaactggcgagcgcggtggtcggcgccgacccgctgccggcggtgaggtaggtgcctatgctcttctctccggttcgaattctgtgctagtgctaccctttgtgagctttctcaggtattgagctgtgaaatttgagcaaaggccttgtgtgtgcttcgatgtggggggttttggaaccctaatttcaatatatctagtgtttcatctctttctctttttttttctgctacgaggagagtgattaggctacatttgagttagtgatagtgatttgctgttgatttggattctaggaatcatacttgtaggggggcagagatgaagagggtaggaatggatatgtagtggcgcaggttcttcctcctctactacttgtttctgctcgtcctgcaatcttatcgttgtatagaaatggttgcgcatacatgcttgtactgttggctgttgatgtttggacaaggtcaagtgtggctccttcccatggtggtgatgtgtggctgctatatgacataatatggctggtgacttgtaagtgttttgggtattgctagaggaaatattaagctagattaagacacctaacagagcttttatgtaggtaattttgttgtctgtacatgataataactcatggcaaagctagatttatacttcggtgtattctgcttagtttgttgtatgctaaacaaagtgtatgcactgatgtaattttaagtattatacctcaaaatattgttatactcatgtttgtactaattatggatggtgaagatttagtgtattaccacaatttgtataatttagacaatagtatcatgtctaattaattttttgtatataatttgggttaaaaaagttctagcttctaaatttttaaccaagttgccattcttttgtttaaccaatcgcatggatcgaattaagatatacaatttttaattagaatctaattaattgtgggttgtttcagcttctcaaaagccctcgctctggccgccccaagaaccaaccatcaccgccaccgcaggaggaggaagagggaaaccatggaagcgcgcgctatgactgcacttttcaggatgagggaggccatgattttgcaccgccagagcttgtctggggcaaggtgcggagtcacccatggtggccgggccaggtgtttgatgctgcagatgcttccaagcttgcgctgaagcataccagggcaggcgctccccttgtcgcctatttctgggacaagaccttcgcttggagcgatgcctcctcacttctgccattctgcagcaacttcacgcgcctggccagccagagcaccatgtctggttttgtatccgctgtggatgctgcactgcaagaggttggtcgccgtgtagaggtaggcctctcatgcacctgctttggtagtagcattggcaagaggcaagagattgagaattctggcatccgtgaaggggcttatggtgctgttgtagatggtgcgtacatgaggggcgcatatcatggtagaccatttcttgactacatcttagctctgggaatgaatccactggctggtgccgaccgtctcgaacttacaactgccaaagcacagcttagggcattcaattgctcaaggggtagtaggcacctccctgagtttgtgacctttgaggggattgaggatgtttctgtggcgatcccacacaccaagaggaaaaggatggataaaagtggtggggatgatgtgatggacatggagaagaagccaaggcgtggtgagagttcatcacgcaagaaaaaggttttgccggaggctggaaagaaggagattatggatggggaaggttctgtgccaagtataggggcaacagaagatacattaagtaaaacaaagaagtcgaagaaccagaactgtgcagcaaagaagaacagaaacacctcaaaagatgcagatgggcttgatatggatgacaaaggttctgtgccaagtaaaggggcaacagttgatacatcgagacaaataaagaagtcaaagaaccagaacagtgcagtaaataagaataaaaacacctcaaaagatgcagatgggcttgatatggatggcgaaggttctgtgccaagtaaaggggcaacagatgatgcatcgagtaaaacaaagaagtcaaagaaccagaacaattcagcaaagaagaacaaaaacacctcaaaagatgcagatgggcttgatatggatgacaaaggttctgtgccaaggaaaggggcaactgatgatacatcgattaaaacaaagaagtcaaagaacaagaacagatcagcaaagaagaacaaaaacacctcaaaagatgcagatgggcttgaaacagttggtgcaagcaaaaaactgtccaagaaggctgtggatgaaaccttgagtgacagcaaatcagcacgcagaacaagatcaacacgcatgaagggaggcaccccggtagccttgaaaggcaggggaaaggatagtggtgctgaatccttaaaggtggaagagaagaatactgctttgctcaaggagaataaggtggggcgtagagctggctctgcacgcaagaagtataaaaccacaggggatggggacggacttgaagatggcaatgccaatgtttctgtttcttctggcaagaggtcaacgcgtggtgaaacctcggtagcttcagaagcgcgaatctcagagcagggtaggaagaagaagaaactttctgaacttatggcagtgacagatgtgcctaatccttcttctggtggtaaaagcaaggctcgaggcaagcgttctatggatgcatcaactgagaaacttgaggatcctgatcgtgatttggaggatacaatgaagactaggaaaagaaagaaacttgacacattgggggatttgtcttcccagccacagcctgtctcccgcaagagcactacaaaggttggagaattgatgcacaaagctgctggacaaatgtcacagacacgacccgttcgcaaagctaatggcgcagtatctcagaagaattctcgtagcactaaagaaagacaagtaaatgctccagacaagtctgcacattctctgaaggtgaaaaagggcaagactgataccttgacagaaaattccctgtcttgttctgaaatgctgtcacagctctccctagcagtatttaatcttaagaaaaaggagagattttccagtgcaggcatgaacttctttactgatttcaggaagtactcgtatgcttctaggtctgatgttgagaaggagatatatgggaaggcaactaacactggatcctgtgcttcattttctgatgttgatgaggatattcctgagaaagctgccggcactgagcccactcctttggaacagcccttggctgatcatatgcaggatgattattgggctgacattctgattaatgtggaggaaccactgtctagtctcagaaaaaagaaagataagggtgtgaacagaacaagaaagaaggaacatgttaaaaaacctgccatgaaatcatcatcactgggaaatatagagggaccaactgttgaaggttcagagaacaagcaaccgaatgcagaaacacaactgagtgttgcaaatggaactaaagtaagttctgaagaaacggaaagttcctcatttgctggactagtgctgcacttcagcaggccaggtgctgttccgtcacgcagtgaccttatcaaaatctttagccaatatggacccgtcaatgaagccaaggcagagactgcaaacaatgctaactgcgctcaggtgatcttcaagaggcgcatggatgctgaggcagcatttgcaggcgcagggaaaatcggtgctcttggaccagctcttgttagctttcgcctctccgacttcccagccgctgcctcaggaaatgatcctcggcagggtgcatcgaagagtgactagagagtgtttacccacctgttgaacctgttgatactcggtgaggtaaattcgatgtatttcttcctgtatcactgccttccattgacataacaatgcggtcaccttttgctgtattgttcaaatattaagtgagtagcattcttgttttcgcaggtgaaggagctgagttagtcagaaaaatgtctgttaggtggtagattgttacaggattaagcattcataggaacaaaaggttgtgcatttgtcatgtaaacatgtgattgttaagctgtccgcaggtcagatcagtgaccaataaaataggctggctctgtaagaacatgttgtaagctgatctatacctaaaaagttgagcttaatttgtcaatgtgagtagcgatactgatatgcgtctggaagctatttgttgtgccctcgcggaacaggaataggtgggctactgatgaaggtactagatgaataagcgcggcttcaagccacgcccgtcaatgtgtacatagagttagttgaaagtaactaaatgagaaataccagtatataatcaagtatgtgattcagttagcatcacaaagggagagagtatacatttttagtaacaatagtaaggataattggttgtttgttacaaagacaatagtcagttaaacaagctttgccacataactacacatataaggatgccatcaacatgtaactgcaatcatcagccaactggaatgccataagaagcaaggtccaatattgctcaaattgccacatcacaccaacatttttatacatctgtatgaacaatgcaccgagtaacatgaacttgatttctttgtactgtaataaaaccaatatatatataatggattggtaaatgccacgctcaagaacaaaatcaataatttgccaaaaatgccttgatgctcttttcattcccttctggatggatgcaatctcgtggacaggacaggtgtaacaatctgatgcagaacctacttttgagatttcgaataaacatgatcacagaaattgatgtaactgcaaagggaagcaaagcatgatgatatatatagtgtgtcatggtttacctgatatatgaacgtaagaaagaagatacacacaggtaaaacatatgacaatagcaatggcaacagagactactacattgccaagccaatttggtaggccaccagggttcctgcaaatttaaggtacacatcagtttggttgatttaaattaattgatatggtgccttataaaatctattagcagttaagttacaaagtatttttagtcctatcacaaaaacagcatatcttaaaacagagaaccctcttggaggtcgcaagctcaatatatgtatctatcaatgcgtacaatactcccaattacaacatcaaccatgcaaataaccaaaccagcatatgacacaactggtgcagccaatgccaaaatcaatgtaataaccttaagctgtttaggtgaacgagcatgagatagtgttgcttccataagaccatctgaaaagaaataacagatgtgaataatgaaggtaaatattaatccatcacctttatcgtaattagtgatctactgggcttactttatcaacagtggctcatatacagtaataactacatcagttgctgcattcttgaggcgtatattggccaagtaaagttgcaagaggtaatccaagaactcagtttgaagaaccaagatttcataattttcctgctgtacatactaacgaaggaatagatatgcactcactcgaacaatgttctgtgcttctatgctttgccttccttttgagatagcctacaaaaatgaagaaaattaagcacaagattttgcactttcctggtcaattcaccatccagtgttcattatacagcatatccaagctatcaagtatcaatgtgcatcaatgaactgaactaccagagttaatgaaatcatgatacacagtagtttgataattttgcacaaatcataatgtttcatggatctatatctatatatgttatggaggactcttgatcattattttttcccaaactttattttccacctagacacctgcaataatacttatctagaaagagaaggatgtagaacctaacatatacctccaacattatgatctaaggggtcatcaattatatgtggtgaacatgatcgcagttgaccccaactaaactacagtaggatcagcaacattagcaccacttacatgtaacaagtcacaaatgaaacatgaaacagaatagcactaaagacgtagcccactcgataaccatgaaaaaagaactcctgacgaacaccatccaaaatttatagaactacagttgagattttggcaccaaaaaatcagagtacatgcacctaacaattcagtccatcctaaaaaaaattcaacaccctatttgaaatttaaagccaactcatccgccaaatctagaacctctcccttggaaacccctagttctcacagaatcaaacatctcaacctctcccaagagaggaacccccaattatcacacaatctaatatctcagcttcaccccggtctagatttgattaaaagcaccagctcactcagatacaataaataaaaacacaagggcagaaaactcgccttgatgacctcaatggcatactcgacctggaacagacgcccgtccagtgagaaaatggttaacccgcggtcttactccatcctgcacccatccaccaggaaaatcccaataaaatcagccccgccatcgccccaacgcggccatagatcgaattcgagttcctgcaacagaattgaagcatacctcatgagaaacatcaagtgggagctaaggattcccccggtggcatcagttccacgcgccacccgcccgacaccgccgcgagcggagggagaagggggggggacaccggcgccggctccgacgccgccacctgacccaacgtcgccaccagagaagggaaaggtaaagtttttggtacagtatctgtggtcagtatcctcatgctgtcagatattcagacattttgagtccaaacggaactaaatggagtactggtacctacctccttgagaacattctcatggctcgctctgctgatcagtgagaatgctagcacaaatatatccgctcctctgtagctcagaatcctcagcctgctgtaatcctcttgtcctggatgaatcaaacaaaagaacacacgatgttcagagattggacagttgcatgagtaaaaaggaaaaataaaatctcagtagaagagagtagaacaatggaagaatcagttttaccagcagtgccccataatcccaagttgatgatgttcccatccactgaaacattagcactgaaattgtcgaacacggtggggatgtaatccagcatagccaagaaacagcatcacaaacgctaccaagaaatgcgcgcgggcacacacacacatggtctaaggcaaagggtgaggggatcgagatgattgggaagatacacaaaacgaggtaagccattagcgcatgattaattgagtattaactattttaaatttcaaaaatggactaatatgaatttttaaagcaactttcatatagaaattttttacaaaaaatacaccgtttaatagtttgggaagcgtgcgtgcggaaaacgagtgacaatctccccaatctcctttgaaagaaggcagcctaaatctgatgcgctgcacactcgtggagggctcgatgctgagccagtccctcgtcctctcgcaagtgggggaggatacttttgggggcggcggaatggtcgagacaggtgaaatcgtcgccgacggctggcccggtgccggggttggaggagacaatcgtcattttcgtcgcagctgccgtcagcatcattgccgtcgtcgcagccaccgtcgccgtcgtcgttgtcgtagctgccgcagccgtggccgctcgctcccgcccgcctaagcccgccgccgccgctcccgagggcggaggcggccagatccgcgcgctgccggcgctcccgctcccgccaggccgttcccgaggacagagaacactggatccgcgaggagaaggagaagggggaggggcgcaccgacgccgacgcacacgtgacgtcccgtgcaagggcggcaggcgatgaaggcgaagatggtgccgcacctgtcggcctccgccgctccgtcgccagcgcctatcgcggtcatcttcctccgccgcgccgtcttctccggtcgccagatccgacagcggcggcggcggatacagccgagggcgtagccgcctcgccagatccagaggggagggccgccaccgccaccgccctcccccctcccggcggagccgccgccgcgtccaccctacacggcacgcgccgcctccaccatccacctccgcctacaccggatctgggaggagggagggaagccgccgctggctccaccctccgcgcagccaccgccttgagccgcctctgccaccgtcagtagccgccgctgccgccgccaccgccctccggcggcagctctggccggaacccgcgccgagagaggagaggtgggaggggaggagagggagagaatgggggaagggtttcgggattggggggttagtgtaggacgttttgtagaaaaccccctatggtttttatgtttacagcgctacccctagaagcggaattttctcttcttcgcattgtattttcctagaagacgaggggttatacgcaagaaatacaacgggatgtcaggcggtccgaggacgtatacgatattccgtgcaaacacaaggagttttttacaaaaatgcccagccctctcacctggagcagccctccaccccaacccgtatgcacaccaccacagcgcccaaattttaattaaccggcgcacctcttatgggcggttgcccctgcgcgcgcaaggagcaggagaagtagcagccacgtgtaaaacaatgagatagcccaaaaataattaaaaaaatgagaaaaacggtggggttaggagagttattgattgatgatatgcgtcttgaatagagggttcactcacttctggaactcttggatcattatggatttttggccttatggggaatggatgtgcatgacactgcggctttattccagaaatatgcaaatatgcaatgcagggtggcgcagctctagcttgctttgctaattgctcttaatatttgtgttgtagcgtgtattacttactagtatttttttttctttttttactctagtaaaggccgttgggtctgcaggattaaaaccaggattaagggcccctttgatttgtaggaaaaatgtagaaattttagaggatttcaatctataggaaaaaaatcctatgaaggctccaatcctttaaaattcctatggaatgggtaatcctatgcacattttggaggaaaattagcaagaggtctaacctcttggaacatttcttctgtgtctatctctctcatctaattcctgcgtttttcctgtggtccaatcaaacggccatttctgtgttttgcaatcctctgttttacaattatattcttgtcagtatcctgtgtttttcatatttctctgtttttttattcctacgattcaaagggccctaaagcagggtccagctatgagctgcaaacaagccacggtacgatagtacagtactgctaacaaacaagccttatacgtctctgtatccaaaatttacaaagatattggccctaccaaccattatagatcgacaggagcacctaaacagaactaagtcgtgcaactttataatcaacatattggcagtgagtaaaatactaaatctatcgtttgaatgttatcaatttcaagtatggcaacaaataacaatcctacaatgacaaagcccaggctgcattggccacgtagtgaggccttgcatctggggccctgctgtcagagacagcaacacagcgagtagcagaatcagacatgatgtgacctctgtgtatcataacggtactatcattataagtatactaacatgtgagataatataagggtggaacccatacactagttgctataatcatagggacattatgatagagaattcttacctgtgatatttatctgcaaaatggatgacatcggtaaaaatatcatgagatcctaccacccactgtgacgtactatgttgtcatttatgtatttcagtttaagatttgcaatttcacgtatgatagatttttgcacttctatctttcgatttttcatccatatgaagctgcattaagattcatgtttccatatccaacttttagttacacccaattatagaacacttatatttggttatggagcacttagttacaatgaatttccactcagttgcagagcacgaaattaaattttataactgtttttgtctctagatttacaatttttgacctgttcctttttttcttatttcattcaaaactagttgtatccattagttgaaaattctgtagatttgaagctttaaatttatcgaacaattaataggtaatcccgtataaataagattatcgcacgcaatgatgtagtagtattgtgcttgcacgaagaagttttgatcctcccgcagtactagaggatccatacaatgagaaattggtacaccgccaacagggtgaagtttcatcagtaataatcaaaacacttttatgtctacccactcccctagcttgcatcccaaccctcattggagagtctacatatagtaatgcaagtagaaaattaattaagtagagtcaattctcaattctttacagcagtgatggtgtcatggccaattattttatttccaggcaagagacgttagttccatgaccagaaacaatactttccctcatagaacatatcctatgcatacaagttttttatatgcactccgtacaaaccaattaacaaatatcacgaaaaattctcgaaagagaatctgacatgtatttttaatagtattacaaagtcttatatgcaaattcattatattttagccttaaaaaagtgagagatctgacagttttcagagtaaaaatctgtcagaattttgtcttttctacaagtaaaatataataaatttgaagatgagatttcatagataatgaatttgcctattgaaaagtccaatcttttttagaatttttcgtgatatttgctgattggtatgcatagagtatgtatggaaaccttgtgtgtataggatatgttccctacttctaattgttaagtagatggtcgttgtcattgattcttatgcttgtatttgactattcatcttattttcaaagaaaattataattataattatttttatttggttttgtcattaataaagataatttagaaccacttttatttttatatttgcataaaaattataatatgataaatgataagtatatcctaaagccaatagcgtcccctattaaaaaccgaaaggattactatttataaccctcgtaatcgcgccagagtcagacagacgatcgataggaagtaatgcaatcatttccatcgttcaagctcagagaagaagtcgagcagacagaaatggcagcatccgatcaggctccaagcatgttggtcccgaccgacgacgagatgctgcaaacgcaggccgagctgtggcgccacaccctctcctacctcacctccatgactctccggtgcgccgtccacctcggcatccccaccgccatccaccgccacggcggcgccgcctcgctgcccgacctcgtcaccgcgctgtccctccccacggccaagctccccttcctccgccgcctcatgcggctgctggtccactccggcatcttcgcctccgacgatgcagggacgacgtaccgtctcaccccggtctccttcttcctcgtggacggcgccgccgccgccgtgcccgtcgtcgacggccacctcagccaggtgccccacgtgctcgcctcgacgtcgaggcactgcctcgacaccgtggcggggctcgccggctggttcagggaggacttcccggctccgtcgccgccgtcgccgttcgagcacgtccacggcgtgacacctctcgagagcacagcgaggcttggcccggaggatgcggcgctgttccaggaaggcctgagggtgtacgacgcctccgggttcgccgtggttctccgggagtgccgcgacgtgttcgacggcgtcgagtcgctgaccgactgcggcggcggcgacggcacggcggcgagggccatcgccgaggccttcccgcacgtcaagtgctggacctcgcccgtgtggtcggcgacgtcccggccgacggtgttgttgagtacgtggcaggtgacatgttcgacttcatcccaccgagtcaagcaaggtaattaattaattaattaacaacatgagtgagtaattcgtaatccattttgtatatatatcttacacgaaaagaaacctgcactagttctgaatcggtgaaacctttaatttaatctgaacacatgaaagtttttaatataacttgaggcgaacgcgtgcttcgcacgctgcaccagtggtgccatttaggagaatcagtgattacataagttgaggtaggcagttgaaacaatgttctttgtaagttcaatgaaggacatgtataagtataactaaatgatgtatacagattgaggacagtaaatacataacaaaacttgccatgtgtacgatgacaggatatacagtacatagtagctttatagcagtagcattgcaacagttctgctagatgagcacatacgactatattacagatggctaaattctaatgtggtttggatgcctttgcagtaattgacctttttccccatgaattcagaggattgcattgctggtttactgcaagggccttcttgttgatgtgtaaatagaaggcacattttttggtacgatgaattgcttccacttatgcatagttgctcgagaagtgctgcaaaaatacaattttagtgtcaatattgagagccaataatgttgtggcgttgaactactcaacaatattagtcgtcccctcctaattttctttttctgaatgtgaataaaataagttaatggagttatttttgtggcgtatgtttaaattgtaaggatgaatgcagtagtggtgtaatctgtgaatgaattaaccgaaggagcaccagcaggtactgtaccaatcttagaccaatgtgaggaaatcaatcaaacatctcaatgacagggaaacacaaaaaggattgccaaaaccgaagtaatgatttatccatactaaaaacacaacaaacatgtaaacaatctaaattgttctcttagtatttttctcataatcatgaaagtgaaccaaataatttatccaacaacatatttatgcagcaaataaagttgaaatggacaggattgtaaatgtcaatctatcgttaaactattggtgttgtgcatcttttacatagattataggtatgtgattttaacacttaattcattgcaagcacaatatttttgtgagcagatactatcagtatgtttaaaggaatatgatgaaactacaaggtacaagctagtcataatttggttacaacctgcaggacaacactcaacatcaactgaagcttcatggtaacaccgcaagttggttgcctattgttgagcacctaaaatgatgatgagcagaaacaaaccaactgtgcttccaccaattcctacagctataaaaaaagtaaattactcatcaaaagatcacaacatttagtatgtgtcgaaatcgaccagcacagtattgcacagccaatagtttaacaactgcagtgttaatatgtcacttacttaaaagcaaagctgccctgctgaaagcttagaatgagaaaagaggctcagcaacagcagcaagagaatattgtaaaaaagtttatatataagcaaaggcctaatcaaagtgcaaaattagcccatttggaaatgggctgaacaaataacttgtactatataaaataaagagtaaagtccatcaccggtccctaaacttgtaccgctatgtcatcctggtccctaaactcgcaaatcgatcgttcaggtcctcaaacttgttcgactgtgtcatcccagtccctaaacttgcagatcacttgtttaggtcctccaacttgctcagttgtgtcaccccggtccctaaacttggatttgaatatcatctgggtcaaataggacggtctaaagactttatatttaaaaataattcataaccttttcacgtgaactctaatgaagataaactttatatcaaacttgtagtcctcgacacgatctacaactttgtagttgaattttttttattttaagtcattttttgtcccaaaatgtaattttaaaattaaaatttcaaaatctataaacatgcaacaatattttgggaccataaacagttttaattcaaaaacttttcaactacaaagttgtaggtcgcatcgagggctacaattttgatataaagtttgtcttcattagagttcacatgaaaaagttatgaattattttttgatataaagtttttagaccgcctatttagggaccggggtgacacaactgaacaagttggaggacctaaacgagtgatctgcaagtttaggtaccgggatgacagtcaaactagtttgaggacctgagcggttgatttgcgagtttagggaccgggatgacacagcggtacaagtttagggaccggtgatggactttactctaaaataaatgtgtagtttgtttcaaaagaggaaaaaatgtctcgcaaggaaccgtgccactgtcctagtcatcatataaactacatcatgctattatttcaacttaacttgtagaaaagcaaggataggtaagcaaagcttttgctttaaggtcacaacgggcagattgattaactgcatacttgttttaccagagagaaccaacagctaataatagaggttatatcttaaaaacttcatatagctagcttgtcttaaaaataattactaacttttcctcaaaattaagagatagtgtacagaaattgtgcaaccatgtaggattcaaacgccaaatacaaagtactttacaaaccttcgaatgatattttcaattttaccttgaattaagggaggccgaggtaaaaaatagtactcaatagtttgggggggggggggggaacataggttccagatgaagggctataaatcttttgcagattgccattgttcccttttcttcaggctgctctttgtcctaagatgcaatacaacaaacatgtggagtgcagggtaagtgatagggaaatgatttactgccaagagaagggagaagagtgcataactgtcaggctagcaacagattttattacaaatagactctacaaccccatcaataaacactccatatattaacgggcatatttaagaaaaaagaacattggaaaatccatttgttgttttaaatttcctgatgtctacaaatatgggttctcatcctttgctgaccaaaagcacattagtccatgacagatttagagccaaaccacttccaagaacattttaggtgggcgtatttgcaattgaatgaacacaaccctatagtgttttgttcttatgcattcacaaataaaattttggtcaaatttatacaatgaagcaagcatgaagaaagcaacaagaggaaagcacatgcaccttgtcaattgtggaggccttcttggatttgaaggtggacgtgcaagtgtggaggcacaacgtgaaaccaaccgctggtccatgatttgctggaagtaccgctgcggtggatagaggcagctctgccctgaactccctctcctttcttactcttccacagctgctgccaaggaagcaattccacaaacacatagctggtaccaatgaaaatattgttcagcaaaggatgaaaatagatagactacctaggaaattattgaacagtttcaaatatcacactacatgatgagctaacaaaatagtaataatcagtcatcaccaggtttagccaaaagaaatttagctgtgaacttctgttccaattacttttctatatttccatgcaaatttagaaggaattgtattaattgcaccaaaaacagtcaatgatctgaaatcatgaaggatctaaacatatacaaagcaaacctgaagagatttttttatcaagagtgcagcatcattttttttttctagatggaagggtccgattaaatttttaaatggaagtgcagtatcacatttggaagagtggcaaacatgattagtgcctctgccaacttcaagaatcagatttaacaccgctaaatactttgcatcaaacatacgcagctggaccactcgtcggctggccctgcatgcacctctgcaattgtactgttagatgaactcaccatccattcccaggaccagagtgggcagctataccaccatgttgatgtggagtgaaaacatttagatcaaactgacagacaacagttaggtgctaatgcatctaagaactattttagccccaacttaattgcttcaaaaaattagtcactcactgtattattcgaacataaaagatttacacaaaacactaaaaccagaacttcagtcctatctttcaactgtattaccagcatagaacaaataaaatgtagtatgtacactgctagtaaatggataagaggagcactttagatcaaactgacaggcaacagttaggtgctaatgcatctaagaactattttagccccaacttaattgcttcaaaaaatgagttactcaccgtattagtcaaacataaaagattgacacaaaacgctaaaaccatatcttcagtcctatatttcaactgtattaccagcatagaatgaataaaatgtagcatgtacactgctagtaaatggataagaggagcactaaaaccagaacttcagtcctatatttgaactgtattacaagcacagaatgaataaaatgtagtatgtacactgctagtaaatgaattagatcttaaacggtgtaatctaagatctaaccaaaaaggacaagatatttattaaacaaaagtgaacaattaaactaagtattcaagtttggaatagagaaattcaagtgaaggagaagttctccatttttgcggcctacaacaaaatgataggacagatggccacaaagtaaaaaaaacactcaatatgttcagattatgaaaaagtacatacagtctgagtatttggaaccaaaaatctattggatgttccgttttgatagcacggacttacccctctaaatttacagcacatcatgcccaagcatctgtaatatatgtcataaatattaaacatcactttgatggagaccgaactttgaattctgcacaagaaaggatgaaatgcatctaagcttgctgttatgggaaaaaagcatataaattttgaagccagctatcctaagggaaaaactaatgcgagttctcataagcatatactgtcaattaaggtatgttcttctatttaactaaagcgtggagatgtatagttctcgtaagtactcagtagaaaaagattgttttactaaaatgaccaaggttatattttctttgttagatcaaagaagataaaaagcaagagattgcgaacatatgacaaattagctaccacatcgatggagttgttaagcaaagcaatcagcataccatgtaatggatgagcagagcatcacactgaggaaaagagcatttgcatggcaaaccaccacaaatcagagcacacatgggaaatataaagcaaaaacattatgatgtacctgattaacattttgatagcaaaataaggagtgttatgcataatactttcaccaccacaacagcattgattgtccagcaggcctccctggatatccatattatgatgatgcacttgtttgatgcagcaagagtcgctactatatgtcaaagccagcacagctttacctacttctcccaatcaggtcatcgctaattgcaacaaagagagaaaagcacactggctagaattccatacactgaaagatccagcataataggtggtctcagatactcagacactgaaagatatgatataatatgtggtttcagatattgggatcctgtaatctgacaacatagtgtaaaaatgaaaaatttttaatgctggataggttcaatcgatgcaacttaaagtcagtacatggtatacataagttacaaacaacaacagagtaagcagtaggcggtagagggatggaggaaaaagtacctgcagagatcaatagtaggtggtgcatagggacgagcgggcctgtattttagagatgtccaagaagtagttgtactcaaccttgtccataatccctagatccatcatgtcccatccacaaagagacaaccaccatatcctggcaagcagacaacaaccggatgaaccaaaataatcaatcaagatagatcaagctgcaaacggaccgtggccaatgccgcgatctcggcatcttcgcttatcttcgcctcgcgcagccgcacatgggatgggatggaccggcagtgaagggggttgcacgagttccccaccagctctagatcatattcaacttccccacccagctatggatctggatcacggtgagagggagagtgagaataaagaagagggtgggagagcagagcctttccctgtggagtgcgctgccatggagagacgaccgtcgtcgatgttgccgatgtgcctcccgtgatagccctcgcctccgagcgaccgaatacgccggcagggaggtcatggctgacggatccggcgggcatgaccttcccaccggcggatctggccccgcggtagcaacatggaggtaaggcgatgcgattgggtgcgagaagaggcatcggcggtgctgtgactgtgaggagaatagggggcagcggcgcgaggagagtaggtgacgcgccggagtggggtaggagggaagaagaaaatgaaggagcaaagtctttccccatggagctcgctgctatggagaaaggaccaccatcgacactaccgatgagcctcttatactagaccagcccacgccttcgggtggctagatccgccggcggggaggtcgtggatgccggatccggtggccacggcctcccctacaccggaaccggccccgcggtggcgagagggaggtgcgagagagtatgcggcggcgtggcgtaagggggtgaggagggcgtgaggaggaggaggcagcggcgtcggtgttggctagggaggagcgaatggtggcggctagggtttcggaggaggggttggtagggataaaagtttttgctaaatagcccattagtttccatgtttccgagcgcagtcctattttccaaattttctcttctttgtattgaatattcaatattttggaggtcttaaatgcaataattttaaacaaaaaaacttttgattagcatctatcacgaaatatcaccaaacgcgagggcttttctgcaaatttttcaaagacgacgcggaggcacgagggctcgcgaaattccaccgttttcccgcgcgcgctgacgtgtcgcgacgcggcagcgtccacgccagcgcaaaacgctgagggaagagcagatcggggctggtttggtttgaagactttagattaaggtttgacttttctcacatatttatgtaatatgtaatatatatgttttctgattgattttatattaagattaagacttacataaatttatctgtgctagcttattcaaattattttaataagacaaataaccgaatgttaaataaaaatcaacatcatcatatatttataaaagggagcactatttttttttgtgttgttgacttgcacaattttatccatggttaggttaggttgcaccattggagcgacgaggactgcataaagatcctagcccaatgcaagaaagcggttccgctccaagaagagagagggaaagtgataatcatcgacatagtagtcggttctgattcagggccaatgctggaatcccaactccttatggatgtggccgtgatgttggtgaccaaaagccgacagcgggacgagaatgattggcgagatctcttcatgaaagtaggcttcagggactacaagattgtgaagaaattgggacctcggtgtgtcattgaggtctatccgtagaagtggcccttggatacatatatgatatatatgcgtctgtggtttcccttctttgttcatggtgtgatcaaagcgatgaataaacaaatttggtccttcattattttctgtgatgaagtttcatgtaagatctgaaatagcgagatgagatgtgtcaagcttggcgtcctagatctgtaaaactttcttttggagatcagatcaatggaaataggtgtatcagtttcaaaaaatggaaataggtggtgtatcatggaacaagtttaaaaaaataaaacatttcgtcataggttaatatcaatttcccctaggcgttcatatatttcacactagtgaaaagtttccaaaatattttcctcatacacaaaagtgtgaactatgcgagcttggggtagaatatatatacacaaaaagaacgattctgaaatgcgtcagtattactctacgcatttagtgactacccctcgctatcaccaaaagtcagagggctgtcataaacaattttggtgacagcataccatcacaaaatactgtcacccatgattttacaaaagtggactttgaacaatgatttttttttattttttttttaaataagacatgtcaaagtaaagtacagttaatgttcgtttctcaactaactccaataaaattgcgtgaagtttttttaagtgtctacggtacacccctaattgcaacacaattagcacaaagtcaataacagaataaacagacatatgcatacccactatacatgcaattatgtgtacttctaggattgacggataccagctcaagtctaaagatttgaggtccggtgggttgggcgaaaaggacactgtcaaatctatgattttaagatttaaacgctaacagattggatacacaaccaaaatagctatctggctacatagtaccttccatcaattattgcatttcaacatgatgcatccatatccatacttgaatagtttgcaatcacttgttccgatcctttaataggtggactttgaaacaggtaaatattcaatggatccaatggttgatagattgttactattattagtcgtccctctttttcaaactgcaattgcctagtgagtttttaaatccatgtatagaactagtcaaaggaaaggcatgccttccaaataataaagggagaataggagctgattttcttaggattactcccttggtcctaaaatataggatttcagagtactatttctcacatctaaacatctcttatttaattttcactcaatattacccaaccatcctcctactccccacatacccacatcatagtcttttccctgtgaacttaatctctaaaaaattcctaggatcacttcatattttgtatggagggagtacgtggccctatttagttcgggaaaagaaaatttttttgttgtcacattaaatgtttgaccggatgtcggaagggcttttcggacacgaatgaaaaaactaatttcataacttacatggaaaccgcgagacgaatcttttgagcctaattaatctgtcattagcatatgtttgttactgtagcacttatggataatcatggactaattagactcaaaagattcgtttcgtgattcccccctaactgtgcaattagtttttttatttatctatatttaatgcttcatacatgtgtccaaagatttgatgtgatgtttttgggaaaaatatcaggggaacaaaacggagaaggaactaggagcatatgtcaaatcctactaacataggagtactacaatagcagaggtaccatgcataaaagcaccgtcactactacgtaacttattttcccgggcgggcatatctatttttccgtgcggtcatttggcccgcctgcacaccgctgtctgtgaaaatcattattttcgcgtgcgggcatactataccacccgcacggaataaaaaaaccaaaaggaaaaaagaaaaagaaaaatcgccgcccgcccgcctgccggcaagcgaaccagccgccgcccctcaccgccgcgggggacggccgccgccgccggatctgggcgggggacggccgccgctgctggatccgagcgcgtgggggccggttgccgttggccatcgccgccgcgcccgctcgctgccgccgcctcgccacgcccgcctggtcgtcgcctcgcgaaagtaggaagaggagagccctccctcctcgtcattgtcgtcgtcctcgagcggggaagcccttcaaataatttgtcgggtaataaatgatttgaaatgagaaaaattgtcaagaacaaagttgtaaaacgcatcaagatctacaactttttttgttttggtcattttttctatatgactttgtctcgacagtttgaatttgaatttcaaattatgacaacttcaaacaacattttcaaatactaaatgatttcagctgaaaaagtcatcaataacaaagttgtataactcattaagatctataacttttattttggtcatttcttcatccgataaagtgatttataagattgttcacaaaatatacatatctcttatattgttttataaactataagagagatatgtaaattttgtacaaatgttaccatcacttcgtcggatgaagaaatgaccaaaatagaagttatagatcttcatgagttatacaactttgttattgatgactttttcagctgaaatcatttagtatttgaaaatgttttttaaagttttgaaattcaaatttttaattgataaaataaagtcacaaaaaaatggccaaaataatagcagtaagaacataataacatgataaagcatgattttagaaacatttaggaaaaagaataatccaatttggagttcatatgagtgagatacactagttttaaatttttcaaatttatttttgcatacggctccttaagactcccgtatggaaaaatcgatttttccatacgggcgcttaagtgagccgcatgcaacctcttaagaggcttgtatgggaaaatcgattttttcatacaggcgtattaagcagccgtctgcgaaaatgccgctcgatttttgcatacgccactagttatggtccgtttgcaaaaatgaagaggtcttgtacagaaaaatcacttttgtagtagtgattgattttgtctaaatcttatagacccttgtccagcactgcccgcactcgtgtggggagaccatacaacctgatgaatccctcagcgtttttgcctggttatatatctttccattctcgaacgaggaaatgtcctccccgtacaggatgtaggggctcttccgggatgcaatgtttactgaacccttgtacaacttgagggtaaccgaaccagttgttgtctcggtaaccttctccatgaaggcatccatggattgctggagcgggtcgaaccagcggccaacataaaccaacttggtgtacttgagggcaagaatgtctttccactgcatgatctccctatcaagggtcagggactcgagctcacgaacggcagctgccattatggtgtcaccgggggtcttgtagacaccgtgcgatttcatgccaacaagacggttttccaccatatcaatgcgtccgatcccatgctgtaggaaatgtcctccccgtacaggctgtaggggctcttccgggatgcaattttagtgaacccttgtacaacttgagggtatccgaaccagttgttgtctcggtaaccttctccatgaaggcatccatggattgctggagtgggtcgaaccagcggccaacataaaccaacttggcgtattttgagggcaagaatgtctttccactgcatgatctccctatcaagggtcagggactcgagctcacgaatggcagctgccattatggtgtcaccaagggtctcatagacactgtgcgatttcatgccaacaagacggttttccaccatatcgatgcgtccaatcccatgcttcccaccaattttgttgagctacacaagaaggaatgctgctgagatatttcttccatttatggagactggaaccccagcaacaataccaatttccacatatcgatctgcatgcacaaagtgcaaaacaaaaaactaatttattacgtcatcacatccaaatgttatattactctatctaaacgtcgtgggagcggtgaaaaattagcttgccacgtcatcgattttttcagaaaacatcctgtgcttctgtttaattgtgcaggggtttcagctactgtgatccgttcgatcttggctaggagcaaatccatccatccacgttcctcagcgtgccatttctttgggctggtcgttcgtttggcccagcccaactgtgccggctcttccatagccctcggatcagtggaaggacgaacgaacggccttgatctctccagtggtgaagcgccaccaaaaccctagtgcgccgtcgatctcgccgctctcgcggccctttctctccccgccagctcatgcctcgcctccgtgcgccgcgctcctcgccctcgctctcgctcgtgcagtgacatgtcacgcgccgccgccttcacctcctccaacggtccattgacgatgaagacggaaagagagagggcgagagctagaggggatggggagaggaaggcacgcagcgagttcccctccttccttcgtagcaattggtgcttccaccagcaagctttctataacgtggagtgtcgccgaccacggccgcagcctccttcctctggattggactccactgggaactcctccgacatatcaagtgtgcctgtccaccttctacctctgaggcaaagattggatcaagcaagctgggttgggcttcctgtttccacggtgctaaatcctcatttcttctccattctctacactcacatcgtttcctgttttttttacagatctgactcagcaccttgatctgctcaacaaccggagcccccacctccttatacatcccaaaggtgatccttcgatcgatccatgatagacaatcttggttgatttctgtgtgttctcttatgtcctgttcatgcctcatacaattgacagttttttaacttgccacagatggatatgcatcttctgtattcagttaggataaggcttccaaggtctgcataaagcaaccgtgagactcacatgctacaaaattttggtattttcttcattcttccaaaatccttggttgattgctgttgggaccgacctaatctcatgatagttatgttaactattatagttccttaggtgccagcaaataactaacctggccaagtaaaagaccataagaatgattgctgcatgaattaccacttgctgtataactgtattactgctctttatctgtgtgtgtgtcagtgtttttgctgcccatagtttgttctctaaatgtgtgttgtgcactgtaaattgtctacagaacaaagagtggatgatgcattgtatggtgatagaaagaaggatgtgacacatatttaagcctaaaaacaattcaatttagaaaggagctatggtggatgctttgcttctcccgcagcatctttctatttcatttttcataaattgtattttgaggcaccattcttgctctaattattgggtggtaaatggtcgtcgctttcctatttcaggtttcacatgatgtttatgactgaaagtaatgcagtatcaggcatgcaaaaatagaagtttagttgatctactggtgcttcatctgcaaacaccatggatcagttcatgacagcatgaccataaggttgggagggacaagaacaaggtgtccattaaagttatggagataatgctgttcaggtaatgttaattgctaacatggacatcataaataatttattttgttcctgttttcatcatgctgccatttacgcagtgttgagttttaatggtggcatgcacattagaattttcttactgatgctgtgatcaggtaggttggataaaagttctgctttgcttctagctatgtccgctagcatattcactgttgcaaaataaacgtaatggagccagttttcaggttacaacttccaatctacataatttaatattaagtgttttataacatttgctctattttctacattatcaacaagaaccagaatgagaagactttaccaagctagaaataatttcaaacttgcagttgcaggctatggctcaaagtcccgcatattcatctttaagatgttaatttggaagtttcctccacagcgaatttttattcttgaatagctttttccatgaatcaataacgctatactagacatgtaggatgaacagccaaatttgggcattttcttcctaaatttttttttctaacatgacaaagggattcggaattgtcgttttcttctgcctgtatttgttaatgtacccttagcataaggatgtattagtgcatgtcatcggtctatattaatttggctctgacatctaatggttgtgtatggattgtgtatatcattttttttccacagcaacatgtacacacaataaaatcaattacttacatatcctgtataagcacactcatttcagtgcagttaaccgcatgaaatattttcacatttaaaggcctcccacatcttccatggttatccgtgttcgtacgtttgaagccaatatattgccatgcttttttttctttttctgctactagtatcatatttatgtgtaatatagttaacaaaatgttaaccttatgtgtaatatagttaactacagaaaaataatatatggtgtggattaattgttatttttgtgtttgcaggccggtccagtgaaaagagattaaagaggattaaattgtttgcaggtcaacgttttattagttcagtgcaatcattccctgattgtcatatttagtcataaattgattgtacatttgtacaaatcgttgaagtagttctatttagatttataggttgcattactatttgaaaatgtgtggcactttatctaagggcctgttcagattgatgtcattttcaaccataccatttttgggcatagttgccaaaaatgtggctatgtttagtttgttgccaaattttagtaaatacataagaaatcctgtcaaaattttggcaatattgccaacttaccaaaattttggtattgcttaccaaaatttgcaaggtttattttggctacaatctgaacaggtcctaaaagttgatatattcagtactaagtttactattatgttgtttttttgttaggactacaagagaatacatttgtgtatttgacgaaaacccgagttttgtggtccatcaagatctcactattttctttccgaattgtcaatgcatgtgtcactgcaagctgtttggtcgtctatatatgatcaaaagatttatgttgtgtttaatattggattgtaagattttcttatgccatgtatatgtacactttacaactataaatgccttcaacatgcatctcagctcatttggattatactatgcatgtccacacgcagcggagcgcgtgtctcttgctagtatagtatgaagacagactgaggacaacacagccatttgtcatgtatttgtaataaaacaaaaaaaagttctaaatataattgaatctgtgatactttttaaagttaaaattaaggcctaaaagagctttcaagtagagttaaaacatgtggtgtccatcctatgatgtgtgaaacagctattatattagttgcatagttaacacagttatagtaagttgttcaaacacatctcctttttgtcttgacatggtgtgataatatgagtacttaattaaagtaactatagagtcctgtgatggaacttcaatggaaatccctcaagaagacttagtttagatgaccttttttcactagtacagaactccttaactctaacggcttttgccgtgtcgggatcttgcgtgccgtcacagcatcgtcatctcaaacgggccaaaataaacaccgtcaaagatatagtcgtacagacgtaatacatacgcatgcatctaaagcccgtcaccgatgattcctatcggtgacgggcttatgtttaggcccgattgagattatctttgtaatctttgtcagcccctaaacgtatgcctgtcaccaataaatctcaccagtgacgggcactaaactaggcctgattgagataaaattaaggtatcgatgacgggcttagtataaatctcactgatgtttgtcatcggtgacgggctcagtattacacccgattgagataaatgagtgctcgtcatcaatgtccgttcagtgaccgttactaatatttattgcacactataaatacttcacccctcctccccaagggaatggttattccactgttcactattttggtgggagattgagggggcgatttttgtctcttttttccaagaaaaaagaaaattcataaaagtaagtgaaaaatactaatcaattccaattaatttagtaatacttatcttacaaaatgtttatctaatattttgttcacttttgcagcgatggatcgaagttggatgtatagaagaactgtgcgacgtcatagcaaatagtatagaaattgagtattaaattttataaacaccgcggaggaggataggaaaagaagaaacaagattacatatgttgtcaatgtgcatattgcaaaaatgagatatgtttgatagcagagtggacgtacatgctcatctgatacaacgaggattcatggagggctacacatgttgggtgaagcatggagagcaagaatcacttgacgatgttgcagctgcagacagaagtggagcacaaaattaggaaaatgaagatgagcataatatgtttgtaccttctccattaggcggtgaaatggttgatgtggatcacgatctgatgcaagacatattacatgacgttgaggacacagcttacaacgagagagattccataaaattcagcaggttggtcggtgactcggagacgcctctatacgccggatgcaaggcaaaacacaccaaattgtcagataccttgaacctaacgaagctgaaggcaagtagtggatggacataaaagagtttcatagatctttggggaatactgaaagcaatgctatttgatatattgtttacatatcttgctagttacatgatcaaactgattggcacacatgcatctcatcaatttttggacctgcactggagctaagcagatctcctaggtcattgctgttgtcgacttagttcgcaccaacaaagttctggcaccataggccaagcgcatatttttcatcaacaccgtgcacttgcggacttatttgtagccatcacaaataacaacagggagagggggcggtgatgataagttacccgagggtgacccggcagggccctggggtgtgagttgtctttctaaaataagagtgtctaattctatatatatctatatatcctatcaatagcattggatcctctcatgctcaataaattcatgtcttatgtacaattgcaattccaaatcaaatactatgaagcttaaaatgttgttttttaagtcatttctatatcctatatagttggagcaatgcttattatttgatcaccatgtcacatgcaattgagattatccattgatacttgaaatttattccaaaatttggttagtcatgcttcatttgatacttaaaattgaatcaattggcatagaaaatttcatttgatactttttgaatcggtgccaagaatttgagttgtctgttgttttacttttggtatctcttatcacacacaatacaccccatggatacaaagagttaggggggctctcacattctcaaaaatatgtgcatataagttcacttcatatatttatatgcacagatttagggggagatcaaattaacatttggattcaaaatcatttattatcaatcttttgtaagttttaattgtgttgtcatcaatcaacaaaaagtagaaattgaaaaggcatctatgcccctagtgggttttggttaattgatgacaaacaattaagagactaatgtgcttattgagtgtacaaccaagggattagtccgatgaagagacgatgaagatcgggatggagaagatgtaatagcttgtggtttcatggaaggttttttctgtgggtgctaatggttcttcccctaagtaagttaatgcagaggttgcggacatgaagctagcaccgatagtgggattataaagatcatgcaccatgacctctctcataagacattgaataattaaggatgggaagctaatctgaattacttcaaaagaaagctcgacctcccttaagcactcatcgctcatgatggtagtcaatcctctcaccgtctttttgagaaaatgttattcgagcggcgcagagggactacacgggacaggtggtctcttctgatgggaataggtcgaggtacttccataatcttaaaaaagatcatcctcgaactagaaaaggatttccagaggcagaatttcttctttcttcggtacccgaggctcgagtgagggcttaacagttgaattttgggatgtggaagtataggcttggattcaacgggtatactcgacttcctagcgggtttcacatcggacgatgggaggtgttctctacgatacaatccctaccttctgcagtgcgactagcctccggtgaaaaaatcaacatacgaggcagacttcttctcactctgctaaaagccgagaatttccatccataggaagacatcacgggttaacaggaagaaagcaagacaaaacatgcttttgagttctccccattcaccatgtgtcttcctaactgtgcgagaaggagtgctcccgaaccatggctacaaagctaggacggagttcaaagccagatgggttttgaaaggtagtggcttagagaactcgccttttgaagcggaaaggttttgaatagataggctgctccgtggtagaagagaagagaaaggaggaaagaaagaaaaagaaatatagaggatgaaccaagttcgtagatgatacagcaaccgttccccggcaacggcgccagaagatgatttgtgcgccctccattccgtgtactcacgtctgattggcaatatgtgtattttgtcgtatggcgggtgtgttttctccataattcacctgcatacaaatattcacccagacttgtagaaatggttagtaataaccactacctctaagtttggtattttattttatattctttcatttgcgtttatataggatttgacggttggatttggtacttaaggaccgtcaataggcagcttgacagcggccagtcccctttgaggccaatggggaacaagctgtggccgacggctagctcagcggcttggccattggcttgtagactgggctagtctagcaaaatgggacatgttggtaggctggactagtgtttggtggtttgtgggctgatctgtttggctaggccagcataggagaagaaaataaaggaaaaagttcacttgaggtcccttaatttgttgtagagtttaaaattcatccacgagctataatattaggtatatatagcccgtccccaaacttataaaaacgggttatattagctcccaaggcagtattgctccggttttggctgacatgacgacagagtcagcatgggactcactttttaggacatttcattctaaaaaaaaattggtggaccccacatgtcatcaacaccacacacacaaacagtcctcctccctctatttctctccatcctctctctgcaacgggaacgctagctcgcgtcattcaggggaagtttctcctcctcctcttcctcctcccgtgggttcgtgtagcacccggtccaaatcggcagccagcaaaggtgcccgcgactcgagttatggtgacgtgaccgcaacgtcatggatgacgtgtacatccccttcattcttgaggaggcggcgacatcgtgggccaagatgtgggagagtaagctccacaccaacagttccagtttctacgaaagcggcggtggcatggacaatcactaaatactcgccatcgatccgacactgcgcgacaccatttgagcggacctgcaccagttcgtgagcaatcacgagcactacgcatgagtcggatgcgtgtggacacggggctacctgctccatgacctgcccagcaccggctagggtttgaaatttcgaaagtaggatttctgccgcaggtgggcgatagaaccaaaatttcagatttttttcgtacgaatttttttaaaattttgactgattttgaatggatttgaataaaatttgaccaaattcacaaaaatttgcaaaaaaaccaaaagtttcgggcgagatatgagcatttcggtgggggacaaatttcgaaccaaaatttcaaaccttggcaccggcaagaccagcctcgtggtggccatccaacctcctcgagttgaacatatacgacctggtgctaactcaccacagtgatgtccaactttgatctccgaaggctgctggcctcgacgcggtccaagtcggtcatggtcatcgaggacgtcgacttctccctcagattgttagaccggacgcgcgcgccggcatcctaggacgacgacgactagggccatgggatactgcgacactcgctcaattttatgccaccagtgcgtttcgtggaggctactgtggacgtgccgctcgccgtggtggtgccattcagaccatccccggaggtgaagcggctatacccgagcatcgacggcgcccctgtgaaggaggagctgcaggtgcaggtgtatggtgcttggcttcgtgtctcaccatcacatcgccaacgagcagggccactgcgagcttcctggtggcatgggggctcaccacatggcagctgcccgtgggtgtggtagcgctgcccccatccgcgaccatgccgcatctcaagtcccggaccttgtcggggctcccgccgtcgcagcactggcggggatacaccaccttccagggtttgcaatttcgaaatcatgttttttgctgcaggggagcgatagaaccgaaatttccgaaaattatttcgtacgaaattttttgaattcaaatttgaaaatttcacccgaaatttatgggaaaaaaatttgggatgcactgagaacaattttgcagtcatacaattcatgatttcaaaagaaataaatcatcttggaagcaattagtctattatagttgcatacaccaataaatccatcgcaagttcatcacatagctttaacagtccattacataagttttaacagatggtaacatagctttagcagtccattacataagttttaacaattcatcacataacagtccattacatagggttaacagtccatatgacaaatagtccataacatagatttcaaacattccaaataggcttaataatacatcacaagcataaattgtctcaacgtagcaaaatagcataatccaacagagtttcaacatcttccaaaagtagtcattcatggacatccatgtcctcattctcagtgaattcttgttggagttactttttctttgtctgatctgaaaaaagtaaagtatatatgtactagtcagtgcacattccatatgatatattacaggcttcactagcagctccttttatatatatattttttcagcataatagctcacatggagttttatggagtaatggcaaatatatgcagctatactttttttttttttgcggggaatatgcagctatactttaaacagatgataatcataggctgagcatgaatatgagacagtgcagcaattcagtttaacatgtatacaggattacaaggcagcaagcatcaattttaacatgtacacatccaattgttcacttcctagttcctacaagtagcgagcagcccagcatcataaattcagcagcaagcagcaaaattcacagcaagcagcaagcagcaagcatgctttagaaattcagagtgggcattcacaaaattcacaagtgatctgaatacttactgttataaaccaatgcattgacattcttcagcctccttgttgtacgccgagcatgctgcatctcaacacctacaaatagagaaatacattagtcaaatagagaaatacacacacctttcagccaatatgacaaacatcaaatatttaaaatgcacctgtagatttcattgcttgtaaatctctttggtcaggattcacatctccatcatggtcatggtcattatcactagaactactgtcccctgactctgcatatacagggctaccatcaatttcgctgtccgtgtcatcaccacttgcaaactcgtcctcttccacagccattgctttccccttcctcttcctgctgttaggcccatctccaggattctttctctttgttgcccatgtattaatgggctcatcaagtaacctctcgccagacatgtcgatgcggacagcgtctgttgggatacgcgtaggctacgatagcataaatcaaaaatttctatcgcgtaaaccaagaaccatgcaagtattagatcatagatcgttaccgctcgacgcgctgcgcagcggaagaagacgctgagaagtcgaaagaactctcgcgaagtagcgcgcgtcgatgtagaggaagtagtcgatcgcaccggctcgaccttctcctcctcctgcgttctcctcgccgtactcctacgacgatcagcaccgcaaaccagtggcgcctctaccggtatccacacgtacagggacggaacgccacgcacagatgtgctagcacccgcgcgcggctagggttttgctcggggagggaagtgacggctagggtttctcacgtgatgcaatacctccgccggtcacacccctcacgaatatataggatccatcactcgggcctccaaagcccgtaggactcctattcggatccttatctgcattaagctcatattggatctctatccaatccccttattccagcccattaagcgtgcgaccctgtaggttcatatatactcggctgtaacccgaaaactcattttcggtccacgcgtcaacagcggcccctagcagaacgtattgacccaccaggcatatataaagatcatatcggctgaacctctagtgtatacttgtataaacccctttgcctcacgatatcgattaagctcaaggctagatatgtgccatcctctaatagctcaatcattcactcgaacctgttgatagattatataacttgtgattgactcctcaatcacctttggcatggccatgcacttccataatctacaacatcgaggggcccagagatatctctccataggaggggcaaatcccatcttgattattcatatcccactacatgtttcatagcatacccgaaaactacttttataactatccaattacggagtagcgtttagcagtccctaagtaagctactacgcatgttgggaaccatgataatctcaggtctaaggattcaacaccaacactaaatgagatcactgatgacacaacacatatggctcttgcattgtctcatgttgggtctatccaacaacatgttcaccaacatgtgtccacattattaatttggtatctctataccatgatccatgagacatgatcatcaattaatacatgtgctgatcatataaacatatttgttccacatatgatatttgatcagggatcctttagaaatagtaacaaacaacataaagagtctcatgaaagaatcacatattcattaaccaataaggagttatctatttcaaggaacaatgtcggataaatatgtaaacatagtatgtgatacaatcatctctatgattgcctctagggcatatcactaacagcgtcaatttcggaaatttcgaaccgaaatttcaaaccctgccaccttctcttttcttgttctcttttgttcttttctcgtcctccaagcttgcgcaccatagctaggttgggaggcagtggatggcgcggaatctcgggcggtgtccgaaaggcgctcattcggcggtggagtggccaagcgtagcgaccgccttgacagtatggggaggcggtagagctgcggtggcatcataaagttggcaaaggcgttgggtcttgggaaggtagaggcgatggggtgctcggaggatgatgcacgtgtcaaggacagccggcggagggtggccatggtggcggagtacgtgtggaggccgttctggccgagcgcaacggcgccactagagagaagggagagggcggaggcaaatggagcggctctagtgctattggtgagctcaagaaaggtagaaatggagaggattgtgtggaggatggccaaaggcatgaaatcgaggccgtaggccacggcggttcgatttgggcgtccctctagccacgggaggggaagagagggaaggggaaagagatggctactgacatatggggcccacgtgggttccacactgactcagcatagctgagcatagtcaaagcgtcacatcaaacaaaacagggagccatcctgtcttagggtgaaagttggtgtggttttaaaagttcgagaacggattatacctagtattacggttcagggacagattttgaactcgacgacacccaaagtgatccaaaaaaaaaagaggggttgcgcttaggctttagtataggtaaggtgggctaggcccaccagaaaattagagttcggaaagaatatttcctcaaaagagtattttgtttcatattcgaatttagttgacactgtcataaaaaaataaaattcgagaagacccagcatgatgcaaacttttgaaaaaaaaaataagattgagatttttagtcgttgaatttaatttccaaaatttaggatccccattaaagtggataaaattaatgagtgcctcacacataatttacaatgtataataactctatactgttccttttttcaatcaatcttgagcatatatctcattcttgtgaaacatatatttttttattgtttgttttgaattattaaatattaccgtagcggtagcacgtgcatttagtataatgtgtcaattaatttctaactgtacaaagtttgttagaattattcacatgttctaaggagattcttgaaaggtctccaattagtataataaaagaatgtcatatatatatatatatatactcttaaataaatatattcctagataattgtcaatatgtaatgtattaatttactgccgatataacgcggagacgttaggaattttttttatttatacatttttttataaaaatatttacaaaaataattttttgtttcgaaaatttacaaatctaattgcctgccgccctctagaagggcgatttttaaaaatcgccctctccaagggcggcaagggacctaaatacaaaatttttatttgtgttcaaacccttcccaccggttttaattgcttaaaaactaataatgcttattcgatactccaaatgattttaaatggaaaagtgatatcatcaagatctacaacttttatataaagtttatctccatccaatgtcgtttgaaatgtagatctgagattttttaaaatgtgttttatattttataacgaatatttggacatcttaaatgaaaaagttattaactacaaaattgtagatctccttgagctctacacttttgatataaagttttatttcatctgactttatataatataattttaaattgtaaaatcatagagctaacaagttatgctggaaaatttacatttaggtcccttgccgccctgtggaagggcgatttttaaaaatcgccctcccaaagagcggcaggcgattagatttgtaaattttcaaaacaacaaattatttttgtaaatattttaataaaaaaaagtataaataaaaaaaattcgttagagaacgaccaaataccggaagcattagcccaccatcacatctagcaaccattttcctttttttggtgcagatagagatagtagattatcattaacatggtaattagaatgtaaatgagctatgcttaattacgtctagtgttagtaacaagcagaaatatttaccaataacttgtaatgtatatagtcttttttttatttttcccttgatcgtggacaggtagtcaaaactcagcagacaacagatacgcaataccattatctaaaaaaacagatacgcaatagcttgaagaaagatctgaaatatcgggcaatcttgtatctacagtttgagtcctgtagtattgggaatggaggttaaactctccatcttgtttgcatatcataaaaaagtttaagaaatgagaagatactatgtgatatatcactccataaacatacaaattaaaattcaatttctgcaagttagaaaaaacaaattaaactatagctaattatcgtatatgcagtcatattttttgttacacatgtagaagttaacttatgcaagaaccttgcatgtttgtggagtgaagtattacatattaatctatcttgttgatttttttcaatattttttataatcgtttaaatgacatgcaaacaacgagaggagatgtcccctcgagagtttgatgacatgagtaacaaccgaatatagtttccctgtagtattagaaaacaaaaactggaaggtgaatatgacatgaataaagacatgagtaacaacagaatatagtttccctgtagtattagaaaacaaaaactggaaggtgaatatgacatgaataaaaacagaaagtgtgtgttgtgagtagtgacacagcctgactgacaggtaatatgaaccggtgtgtcatggagttgtgaacagctcatttgatttggcatctgctgatggttgaagggccatgacgatgatatcttctttcaacatagaaatcaggggcaaatatttttgtttagatggctaaacctaaaagaaaagaaaggaggacaagaactgaatgacagggcagatggcttgcatgggtacacaagcccagctgccaccctgcccattctatggtgtaagctgaagctgaacagagtgccaaacacaacaaaaacacaaatttcatctgggcattctatatgtacatcagtagtcattgtatataagcaaaagatgtcttgcataaagggcaacaacgacccattacatacgttgggtgctctcctcataccaaaagaaaccatcacacaaactaaagagattcagcagcactagcattagtaactcacaacatctagcaatattcacataccatcagtaactaaataatacgcaagcataccaattagtttgcacaaaccttaccatggcgcagcgacgacactactgaagcgctgctcggtagacatagatgattgcttaagttggcttgcttctactttgagtcttgaattctccatggcatggctcatctgctgtgaaatagcacggttctttatgcaacggaagagatgggcgtgttgttcaagctggcggacaaccatacttagcacactaatttctgcacagcgttgttgatcatcgatttcttcttgagcaatcttcttctccgaacgtttcatcatatcctgtattttggaccagctgttttttaaactgagcagagtttccaaacgagatcgtaggtgcctgacatcgaagccgtctgcttccaacacagaaatgcacctcatcttatgttcaaatactgcattatcgtcatggacattcagcatgtttatgctttctgctaaattggtgaaagagtacatcaaacccaatgctatcccttcacgaaactccggaggatgctgctgtaactgatgaaaatttggtcgttgtggcactttactaaatacttccattgcctcaatttgtgcccacatcggggaggtcttcacaaacggaagttcaataatagccaaggattctgatggctgatcaaccataatattctcatgcacatgaagaaatttctgcatcaaggggcaggaagagttatgtgttcttgctacatacttggatattggtgtatcctgagtgttgtttgaaacgatcaagctgttaccaagttcagcatcaatacattggctcatatcaaaagaacataactgagttattgtcgaatcatcgatggactggctactttcagcaacacattctggtgactctaccatggctgagctgtgatactgttgtgaaactccagattgttcattaagtgcagactcccacgttaaactatgtgaaaggactgttttaccctcgagtgcagctaaagatatggttgacagtggaccaccaacactggcatgctgagtttcaggaataatactggctaactccaccacatttgctccatgatccacattgtccatgccatcttgtttgttatcctgacaattctcactgactggtgactggttcggcaccccatcatcaaacatagctggagacaaaaaagacaaattctctgttggagtgttcgtcacacactcaactattgctcccaagttttccttgcaaatgaggtcatcatgcctggtagcttgaccactctttgctgaaggaaattgatccattctagtatcatcaggcataaccaaaatgctccgacaaaattcttcaccagagtcttcatccatacttatttcacacccttcagatttggatattttcttctggttttcagttgaagaaacagaagataacaaattcacatcaccagaattatctaatgttgaagttgcatgcagtacaaggttctcatcttggcgaacatcgtttataccactttggctgattttatcaacaatgctactgtctcgtggacctgaatcagtataaggcatcaaaatataggcattagatgactcgtttttcagtaatgactaatgagcacaagtacctttattgtcttcaagtggagttggctgatttttttctgaaggaattgctggaccagcaataacattggtaggcagttcattatgttcatctctaaaaatcagcttggtctctgcaacattttgttagttagcaacttgctttgagttttctgtatcgtggtttagtataaacttacgttcttcagagattgctgcaatgtcgtgggttccctcaattgtttcgtcaactctgtttttcttcatctgcatttgaagtgtaaaaggtaatcaagaaaaaaagagaattcagtgctcagcagtagaaggtttagaagagttaaacagaacctcctgaatgtgaaaagaactgagagtttcaggattcacccctagttcctcaggtgcttgaaaagaaacacattcttttctttttctggacacatcaattccagcaaatgacacaaagttgaagctatttgcagcacttgaaatcagacaacagccttcatcagttgattgcttttcttgatcagtcgatgcctttgatccttcatttctgctgagatctggatgaggtgattgcattactaaaagtggatcctgtgggataggtcttagtttcccaaacaccccaaacagtgaagcttgcagccctgcagtttgcggcacagagggcatgacatccatctgagaagatggtagttcaataggactacctagaataagtgaagaagtatatttcaaatgaccagatcctgtcattgataactgtaaaggaagttttatctgagatgctaatgccagcactgcattttgttgcttcatagtttctttaggtcgtggtactacatctgcagtctccaacaatttatcagagcttggtttatctctgatttcatcactgtcattacatgatgccaagtcagcaggaattggcttttttcgagaggttaattgagaccctctaatgacaagcttctgaaatggaaaaggtatcacattatatagagatgattttaatccaaaaggagatcaaatatggagaaaaataaacagagcaaataccataaaaactgacagtcttttcttaatatgttatttggtctacaatcttgagttaatattatgtaaaaccattatgtaaatcagagaaagagggtagactaactataattaaagtaaatatacatatttcaaatgcatgtctaggtattttgtgtttcatgtgcatcaatatttgcacaggcatacaaataacaatgcatacagaggataacaggattatactgcaaccagtcctgcaaacagtgcacaaacaactacatcttgatgacataactacctacaattgttatacgatgcacataaaagctagaactttaagcattccatcatcatcgaagtaaaacacacagcagaagtatcttttttttttaaaaaaaaagccagagaatatgtacctttgcctttgtatcctttttctttgtcatgcagcgcatccattttcgaccatcccattcaaactgtggtctcagttttgtattttcaactgtcaacttatccacgccatccacattatccatgcccgttgtgtaactcttcagtttaacaacatacatcttgccaaatacaccacttgaagtctccaaaataattccaggccaccagctaccttcatgaaagacctctacatgagaagatggagaaaatctgtattttgagtccatacgaatgattgagcgtgctggccgaatatattcagtatcaacaatctccgtgaccagctccccatcatctccgacgtgtctatactgtactaagaaatttgtagaaccaatcactttcaaaatagtagctggattccaagactggccaaagctttccgcagatctactcacttcaactaggcttccctctctgaatgctggacctccattgtcctgcacataacaaaagcataggaacataggattaagtattgcagcacactgtaacacaaaaggttacctgacctttttctatgataaaaaagtattttttttgtttgtgataattcaactcattcacacaaccatcaccagagttacattaaaataatgaaaatgaattatccacaggaggcatagacaacctattccgcatattgatggtgccaaagctatgcctttacaatgttgtctgtttacctcaaaaaaaaagcttgtttgtttagaaaggctttatgtaacatgtagatgcgctaaattctgtgaaattatccacaaaagttattttaagatcatggaaaaatggtgctcaaacttatacactgatacatgagcaattgcagatctaaaacatcgttgacttgcatatgaaactctcaatcttatagtcctctccaaacccatctcacttgggtctattgagcctaatggctaacaattgtacccattatgattcaaattcctaataatagctgaattagcaaccattttacaaagcaaccatagcgaccttgttgacattagatgttatgcaagattcctcctatgcttccatgtttgattgtcaagacagactcattgacatgtcaatttggcacacagaaacgcatcgaaatattttattttttttaaaaaaagaaaaacaattataaaatactacaaacaaaagaagacgtacatatttatttattatttttttttaccaagaacaaaaaaattgtttactagaactggtttcttttactatatctcatctgattttatttcctaaattataaaatgttacttgattagttgggtaagctaaccatattgtacaattgtaaaattggaacattgtaagtgcaaaaaatagcgtggtatctccttcttgctcccaagtaccaaccacttctacttgaacagcatgacatgtagattgttaagcttttggcgtaataacacaaaacggacataaacattcaaactcttattaaattctgccaccctatctactatcatcgtaaattttgcaagttaccccgtgaacttcttaacatttaaaaaaatatcaaatccaagataaccacacaaaaattagattaagatgaatattccctacagcaaaaagatggggacacattaatacattttatagatggggacacattaatacattttattttatccgtaacaaagcacgggcatttaggaaaagcgcatggcctctccattttagactaaaaattacactataccaccatcatgttaaaaaaaatgagtactgcccaaatctgtaaaagaaaaaaaaatgactagccctgaaacacaagttcgcacagctcagcttattaccacatcagcggccgggacccagctgccgcggcggaacacgcggtgcggccgcagcgccgcctcctcgaactccatcacctcccgcgacgtcgggaacgccaccgtgtacaccctccggcgtgggtcgacggggagcacgtccagcggcagcggcaggccggtgaccacgcccgaccaccacccctcgttgtggaacgcctccaccatgtcgtgcatcgcgaacccaccggcgcccggcgcgcccggcgcccccgccaccggcggcggctgcgggcgcacgtcgcgggcgcgggcctcctcccgcagcgccgcgccgccctcctccagcgtggtgtaggcgacgacgtatccgtcgccacccgggaggtgggcctcgacggtgccctcgtagaaggagccgacgaagcccgggtcgtcgctgccaacctccacctccgcgccgaccgggaacagcagcgcctcatcctcctcctcctccttcacctccttcccgtcaccctcctcctgatccccacgcgccgcagcccgcggccgctttgccagcttcttcgacgggccgcgccccatggcggggggccgacccaccggcgttcgcgtgcggtgtcctcggcttctccggcgagagaaagagcgagagtgtgtgtgtgaagtggggtggggtggcggaggcaacgatggatgaggggattagcggtgggtggagcggcacgaattccgaggtgggtgggtggatcggacggtggaggatggagagagaggaaacgtggagggacgggatgaggtcgcgggggttgtgggtggaggcgggctcgtggcgcgaggcggcggaggccgcgagggccgtggtcgtggactcgcggtcgtggagtgtgaatgtgtgtgatgggacgtgaggtggcagttggtggtaagagcaagtttaatagtatagctaactactagctccaatttaatctatagtcaatgtaatagctcattatacatactatactattaatatctgaatatccggtttcaactatcatacacacaatgcgtcttagagtctgtgctatagctgactacaaatctgtagcccgttgctcttctctcttcttatttatctctttaaaatatatttgtattgctctgagggtggaggaagcgtccaggcgtgcagctgtaaaaaaatattgatagaacggaggaaccgttcgatatttttctttaacgactcatacaatgtgaagttaatattgatagaatattgatatagtaaaaaaattactataaaattaaaactaatgaagataaaatagccatcaaccacgccccgacaacactaatactagaggatgcccgggagaaggctagcaccggaccagccaccgctagaccagtaaaggaactactgatgaggatgcccgaaacccaaccctaacaaccgacacataactacactctatccacatctttggaattgagggagagagggtgagagagaagaatggaaccactctccccctaggccctccgacgtggccaacttgcgtaaactagggcaccgacacaatagaaccggaatctatagcgagcttgcataagaagattaggaggtttcggtaagggggtttcctggatgacgtctccaaggagagaagcgataaaagcaccgccaccgccgtctgtcgaggtctcaaaggagaaccgagataggttttcacccgacaacccactagaggagatgggacggcatgacaacaccctcaagagggaaagtgacactcgaaaacaccgttgttgcgggccaggtcaagaccgggctaggttttcacccgccacttgcctatgcgcatgtgatgcaccatttctccaccaccatcaaacctccgtcatcacatgggcaccactgaaccaacgcccgctgcccgtccagcctttgcgtgctgtcctgcgggcactcccatcacaccatgctgcccttccctgccagcaactccacctatgcgttgagctggcctcagtaaccatcggtcgtgcaccatgccggccttcgtcgtcagccgcacctttatgctgaccgtcgcccttagcctccttgtcgcgactgccgcttagccatcggcgccggcctcccacaccattggtgctattgcggccgccccccgttcagccgccggcctcccttccgacgtcgttcttcccgcaccacaaccggacagatccattgtgtaggtgccggatccgtggcctccaccatcaccctgccgcctccacgtcctcattgctgtctccactctactgtacccagccgccaccgactcggggtaggagggtggtctcctgcgccgtggaggctagatccggcaccgccgtctcgccgtctctatgtacaagtctctatgtacttgaagaggagagaatattaaagatatgtgcaagtctttgtgtactctagaggctagagttttagaattttctaagcatgttactatattttttctttaggacgaaagatcttattaaaatgactaaaatccattttttctacaatgatttaatttttctattttataatcggtgtgtttgactggtattttttagctatagctgcaactacaataattaagaattgttgcaactaatttttaacccctccgtcccaaaaagagtctaatctatgcagcagccgcatcagctatagcttgtatggctacctaacaaaagccaatattagagaatgggggataatttactactccctctgtcccaaaatataagaacctaagattggatgggacagtccagattcgtagtactagaaaatgtcacattcgatagggctcaaatgtcactgtctcaaattttgtgaggctgatatgtgggcccatataacatttgagagtaacaatttggaagagtggcaaatacttctagattctccctcaatccgacagaccggacccagcggccagccacatcgcataatctcgtcgcgcacacgacacacccccgctgcgcacccacccaaggcgaaatttcgccggcgcgcgggccccacgatcatcggcccaactcaggaagcgcaagaagaagcaaccggagagcctcctccggcggccatggccagggccctcctcctccggcgcggccaccccttcctccgccgcctcctgcggcctcccccgcctcccacctcctctgtactggttcgtcgtctccaaccctctcgagtcgccccctccccctcttccccttcctttttttgcagcccccgatcaaaggcgtcgagccgcggggatagcgctctcacaactgcaggacggacagctgggcgcccccatgtcgggcgtgcatgcgcggccattataggctcgtcgttgggggccatggccgcgtggtccggaagttatctcgcgtgcctcgagccatccgaagccaatcgattccttttctttttctttcttttttttttgttgatttcgttgtatccttcttagattttgtggattttcattgttgctgggttagtgggtttacaaaagggggaaatccctttgagttgaaagctgatgatgcattggtaaatatatgggtataacaagtttctgaacctgatgtgatggatactggtgacgatgagcatgcagtgcccactacttgaggtcttttaaggttttgattgtcgttatcccctagaactgcaagcccttggagttgtgtaccatttaccatgttgattaaggcagcacgattaattacctgtttttttatctgcatggattggctataacagcggacaacttaatctagccctgcttgttttctcctagtagaacggtgaaagaattttttatgactcaacacaaaaatcaacattcaggccataattattgccttctgttttgtttttgaaggaatcctgcaatagaaatgtgtcaccaagagttcagttgtggagattctctgcagaaggtgcgtaaatgcctagttctttcactctaatgcagtgacattgtgctaggttgatgatacctccttgctggaaatttttcctcttgtaatacttatgttttccatggtacttctttcttacgacagatttacttttttgtttctggatttgtcgtatggttatatcctgttaatttcgttggaaaatcttcatgggaatctagctggcatgtgtacagcatgcatgggaaagaaatatttgttttatacttatcagttatcataatggaagtgttatacagttttagctaattatcattataggaaaatatttttccaattcaataagaattcatgtgctaacctttgttttttatgtacaacacgaatcgttgttagtggttcccctattctggaaaattttacatgattgcatcttgagtttgtttccagattccagataacttgaaaattctattccaaaataacaataccgatctcatttgtcaagtttattggtgaatttgttcattgtatatatatccagatttaccactgactctatatatggtttattttttagggaaagaccagacaaattcaagtgaagatggttacagtgaggcaaacattaagaagaaggactttgcgctacaacaagctttggaccaaattaagtctgcatttggtgaggagtcaattatgtggctaaatcactcttacggtcctaaagaagttcctgtcatatctactggatcctttgcattggacatggctttaggaattggtgggctcccgaaggtgagttaagggtattaattcttttgtttaataattgttatattctagtatccaggatcactgatgcatgctctatttaggacgagtaaatgactttctactattgaaagtttaatgaaacttattttctattaaaaagagtaaattgaatcagagctccctgaatttgtagacttgtctcacctagctccctgagctgacttttgttttctaggctctttgaacttaaacccatttgcatcactggtcatctattccccgtttgctaacagaataatccgagcctaacagcaaatggatgcaagtttagggaggctagcaagcaaaataaaactgctaggtcaattaacatttaggaagttccaatgcaatttaatcttttaaacattactgacctgtttatcgccatagccagcatgtcagatagagttgccctttttttttctgatagctctattgctccattataactgcttctgtagggtataggcgaacgtgtgtgtactcagggttttctaccctttctttttcttaatcaatgatacgcagctctcctgcatgtttgagaaataaaactgctgtagggtttgttggtatgatttagtaatttcctggaaatctgaaactcacttatgttaagagatgtttgttaaataatgcataaacagaagattagttaaaagcatatgtacattttggttatatcattctacatcgttggttaactgataaaattctaagtgaatttccatttagcaaattatatgatattattcttcataattatcttctgctatttgttcttttgcacttcattgacttttgcatttatcagtagggaagggttgttgaaatttatggtccagaggcatcaggaaaaaccactttagcacttcatatcatagctgaagcacagaagaatggaggtaaataattgtttggggtatacatctgatctcctctgtgaactagtttccatgactaacaatgcaaaaagtgaattaagatgccaatatagtagttttgagttcttaaagcatgattttgttctttatttagatgaagctagtaaaataagtactttatgccaatgatcaagttttcagtgctaacctctatgcctaacaccatgtacttgaaaactataagcaaaacgatggacagcattaataatctaattttgatgggttcaggttgagctgtgaagggaaaaaaagtctaagactgcattagtaatgcaatatcttaataaattaacttacctgtaaatttgtacagtggctgagaaattctttgatttgatttatctgagtcagtcaaccatttcaagtctgtcctggccagtggccttgacaatgagctgtgaaaagtgaaagaaagtgtggactggctatttcagcatgcaaatataggtactttactttgaacaattaacatacaattggtatttccactttgttgtccacaaataggctttagtttcagaagtaaatggtaagaaagttaggagtacaatctctcgctgctagaacaaaatatcatactactcagtggtgtagaccagttttcccgtgaaagcatgctccttcagatttcaatatctatgcaacctgttagtaaaataaatccttttttaaaaaaattgattttgttgtttcaggatattgtgcttttattgatgccgagcatgccctggatccaacattagcagaatctataggtgttaaggcagaacacctgttattatctcaaccagactgtggtgaacaggcccttggtcttgctgatatcttaatccgaagtggctctattgatgttgtggttgtggacagtgtacgtagaaagttagtaccttatgctatattcacgctttgcttttgcctttctgcctcctggctctgaacttctgaaaagatatcgataatattttatcatatatgtgagaattctattttaaaatgaatgctttatatgaattgctccctgagcctgattttaaagatttagtgctccctttttagcatagtcattgttaatctacactctagaatgtactctttttggtcctgcacactgcataatgtaactaacttacatagcagctactccctccgtttcatattatatgtcgttttgacttttttcctaatcaaacttttttaactttgatcaagtttatagaaaaacatagaagca

SEQ ID NO: 5471 - DNA, 30621 bp, Oryza sativa
aaataagcaaccatttttgcctctgaatttttggaaattacatatgaatcatagtaaagatcctctggccggaacttccttgtattatacccggaaatttcggtcagccccttctgcctatcagaagcccggaacttcctgacaaaatgtttgaaacttcctgtcttacagggcaggaacttccggtcattttgcccggaacttccgggtgtctgaccagtgaagggacaagtcacctcacttgcttgtggagctttaccttctctcacaaacatcaagcattctttcccatttaccatcacacgcttagacacaggacttccaccagaaaacctgagcccgtgtccatccttgttaggatgagcggtgatggtcttgtaaagggcatcttttgaatggtatgtcttcatgcatccatatttcatcaatgtgcccaacctttcattctctttcttaagagcttgcatagcatcaacattagtatcataagagttcaaatcaatattgtaacacctagcacaaccattactagtagatgggttggaaggattagaaaccacatttggttgataagtgctatttgaaagagtgtcaaattgaacttcaagatctttatgacttttgtctaaattagcaaatttgtcttgaagagtttcattgacatccctaaggctagctagagaaccattagccaaattaagctcattagctagttgttcatttttagcacattctttagctaggctctcctctaaggcatggttttttttcttctcaagaataagcaattcttcttgcctttcgagtgattgtctttactatccaaagctctcattaacttagccaaatgtggtatagcgtgtttgctaaagctcttaagcacatcatctaattcattatcactttcctcatcactagaatcaacatcaagagaggtgtgagagggattttaagtcatcatcttgcggccttgtgccatgaaacatgagttgtggcaggagtcgtcgtcgtcatcactcaagttgttgaagagatgctccttgctttaagaggatgacttgaaggtgacggtagcaacaccaccttctccttcaaccttgtcttttggcttgggctagggcttgacttcggaatcttcttcatctccggagtaccacacctccgccatgtgtgcctccgccacatgagcacgctccggcttcttcttgcctcccttaaccttagcttcatttgacttgggacaatcggcaatgaagtggccatatttgccacaattgaagcaagctctctttgattgcctctttcccttgtcatcttccttcctccctttgccatagccactcttgcgaagaaagtgcttgaatctcttgacaataaaagccatctcttcatcttcactttcttcataacttgactcttcttcttgttttgccttcaaaaccacttcttgatttttgatcatggtggcattcttcaccatttgccttacttcacgagcttcctcttcttgcatctcatgacacacaattcttccaagaatgtcacttggggtgagcctcttgaagtctttcctttcccgtatcattaatacaagagtgggatttcttggaccaaaagcacggagaagtctcttgaccacaaagtgatttgtcatgtcctcactcccaaatcatttaatcttgttaacaaggatcatcatcctatcatacatctcttgaggtatctccttgtcatccatcacaaatcttccaagccttccttctaacaatccaatcttggcctcacgaacggcgggtgatccctcatgagccaattgcaaagtatcccatatctccttggcctcctctcccatatctccttggcctcctcaagtccatcaaccttgttgaactcctctggattcaaggcggagagaattgcattggaagcttgagcattgcggtggatgagttgctcactccgaggtgagctccatgtcatcatggggtacatcaatacctgtacaaacaactttccaaatacttggatgcaaagaaattagatgcaacttcatcttgtgcttccaagcggcgtaatgtgtcccatcaaattgaggaacacgcccggaaggcacggagacaaagttatgaggaggaacattaagtttgccgtaatcaaagtgaatagtagctcccttgggtccagtatccttggtgctagaagcgtctcccttgtcatccaaccccccggttccctctagatgcgacatcgtggatcactccaagcggtgaaacttgaatcaagagcaccttgctctgataccaattgaacgtgcagagatgtagcctagagggggggggggatgaataggctttcctgaaattttctcaacaatcgcagcggttaaattgacagggcccgaaacctcctggtgatgaacaccggaacttccgggcaggatgagtagcccggaacttccggagttcttgagccaggaacttccgggcagcagagataatttgaaaactgagaaaaaaaacaggtcctagctaggaagttcaggcacacatatgcacaagatgaagatcacaagatatcagcagattcaaacaacgaacatgcacaagagagacaaagacaattttttcccgaagttcggatcgcacggatcctactctccgttaaggtgctccaaagagccgggtctcgattaaccccttgcctcacttatgcaaagatcccagaagaggtccacagccttcaactcaacacttctagatcattttctagaattgagtgaccaccaagatccaactcaaaattccttctagaaaagaccacaagtgcaagttgctctacctaggacaacctctgaaaactcagcacaagaatctttactcacttacctcgtttccttgcggaggtgaggaaaaccttcacaaactttcccgggacatccataagatctttggaagctcacgggcgacacctaaccatctaggagaagatctccaagagtaataagcccaagtgacagcccacaaggtatccaaagtgctcaatcaaccctaatcttcaagccatctcaaaacactcctacgctctcatctattctctcaatctcacaagataggctctaaatttgagtggaggaaacaaaggaagcttgggagtgactagaaaaccctagaacatgaatgaactaaagtggaatggccaaagggtgacctggggacgaaatccatatatataacggctaggtgacgtcatctagccgttacttacaagtttgaacgggaaacctgccaggaggttccgggcaaaagtgccaggaacttccgggcagcacttaggaaattttttgctttgaaacaacgcccggaagttccggccagaaccttcgggtagccctctctgtcctggggagaaaatcatttttcaaaaatgattccaaaaatcttttgactcatggatatgactaagagcactgtgtataccctagaaccacacttgaaacccctcttaatagtacggtttttctgaaactcaatttcgaaagtgaaaaacctagtctaatcaccttcggtcctttttgcacttaggaacattcaaattggggggtcgccttgcattcttagtcatcacaacatgctttgggactaaactcatgtaaataaacttgataaacacgttagtcccctttaaccaccttgtcattaatcaccaaaacccactagtgggtttaagtgcaccttcagccagtggcgtagccaggaatttttccttgggtagtcctagttcgcaggttcacatcacatgcttaaagtttctaacaccaaaaagccgatacacaagtacaaatttagtaaaaatgcaatagaaataatgccttgcaacattcataagtggcttacttaacaagcaagttctcatccaaaatcttaggcatctaagtgaatatgtcaacctagccttattctcatccgaaacattcactatggtattatcaattggtgcatctttcacaaataaattatatttctcttgagctttattgtgtgcacttgttaccgcacccacatgtttgtcaagtgcattggatttgttccaattcctccaactacccttaaaataattactacttccattgccaaacaaatacaacatactatgcaaaacctagcatccttcgccacattatattcaagccaactatacttatgaaaccaaacaaagcagaagtgacgttgcttaccatatatatttcttgtggtggatcatcttcgagtacaggagcttcgtcattaatatataggaacttgtggtggttcctcttcgggtacaggagcttcatcaccaatcctctttgcttttgcttcatggttccgaaataacgatgcaatatatctgctcatcttcatgttttaccaatcctacaaactatggcatacattcactaatcaacattcaacaaccacaatttacaaagtgcatactcaatcattctcagattcaggaatcacaaatcgatttatgaagcaggagtggacactggacagaggaactgaggaagatttcattacctaaagtagagcagccgatgagccgagcaggaggctggacggtagcggagagccgaagacgggcacgggcagacgggagatggccggcggcggctctgcggcaagccggcaaccggccgacgtccggcagcgaggcgacagctagcgacatgaggagcgaaggaggactggaggagtcgtgctgtcgtcacctcgtcggccagacagccccaaactcggcgcggcgccggcgtggatggcggtcggcggacccacgggcgtcggcggcggtgtggctcggcactgggctgcgccggcgttgacggcggacggcgaacgcggacccacggccatcggcgcggcgcaggcggcggtcagtggcgacgtggagcgggcatcgggcacgaagggagtagcggctggaggtggaagcgctccagcctccaggctcccccaactcaaccctaactcttcgtgggctgttactattggatttgggccaaaacggctggctgggcctaattttttctgaggggtgggggtctctgggccaaattctagggtagtcccgagcccaccgggactaccccttggctacgcccctgccttcagctacatcacatcaaccacaaatcattgcattacctagtgcaatcaacactagatctgcatcaaatcaagttcaaaaataaaataaaaattaactaaccattaatgaaaccaccagatacgcactgtaaacacctaaacaaaagtcccaaatcacaaatatagcaaatacttgcaaaaaaaaaaacgagagtaacaaaaataacagaaatcgacaatgaacaaaagcaataacaaatggcacactcacatggctttgatcagcgatgcatggcttcctcatgccgtcgtttatgcagaggttgctgtcttcacggccgcactaccactcgcggcactgctcctagaacgtgttcaaatctagaatgaaaccatccgcctctgcctccacctcctcgtactctcatcatggatgttgcggtggctactgatgccgacaacaaacgaaggggaaggaagaaggaagcaaaacatgaaagaatcaacaagggaataagtactcaccagagaatctccgttgacaacgagctcctcaccatcgaatcgtctagaagtcgctccggcgaaatcacctccctttcaccatggcgacatcgccgctcccctgcctctcttagagcttcgactatatatatctctctctctcacagtctcggagtaaatgagaaaaatcagcagtgggaccagaaaacaggctcagatttttcaaaaaaaaagtgaatagtggttgtgggacccaccaagcccaagaaaacagaacccttcaagcccagcccaaagaagaaaagaaggatggcccgaacaaaaaagtccatcccacaaccccgtgaatgcacgtctcctccctctggccacgcccggttcaaatgccggcggtgagcagaaagccagagacgtaacaaacttttctccctccgctacggctacttcttcctccccacgccaccccaccccacgcagagaagccctcgcctcggcgcctcgccaccgcgcgcgcgccgcctcgcccaccaagtgctcgaccaaagttccgctccgcctcccgccgagcggcgagccaagccacgccacgccacgccgagaagcgagaagccgaggggtagctactcgccaccgggcgcgcgctcgctcgctcctgctcgcctcgcctcgccaccgcgacgcgacgcgacgctgcgcctcgcctcgccaccgcacggacatcgatcgctcgctcgctcgatgatggaggttttccgtggtgtggagtttgcggcgctgcggctctggccgtgtggctcattcctccacgccgacgaggacgggaggtctgtctaccacggcagcgtccgcgacggtgacgcctggttgcccaacgcggtgtgggctgtcgaggagctcgtcgccggggcgtcccatacgcgctacgtgctccttcgcggcgcctacggccggtacctcggagccggagcccccgacgcccgcgaccgcgaccaggagcgctgcgcctgcccgctcccctcctgcccgctcccctgctgctcgctccaggcggcgcagcgcgaccgagatgatgctgagcccgacgacatcatgtggcggcctatcggatgctccggcacggacattgccggcagcgtcgtccttctgcaggacaggtccgggcgctacctgcgagggaaccagggtttcctgtctcgccaccacggcgtctccgtcgacgtcaacatcggcaacgagatgacgttgcggtgggaggttgtgcgcgttcgagtccccactcgtccggagcgaccgatcgtgcctgtgagttccttctcgtccccccggattattgtgtttgttctgtttctaatacgcaattctacgaattgaagcaaatccttaatgttaattgagctgggaataaatcttgatttgttgcgaattaacagtgtgcaactgaatcgatcaaattcgttctaatacaattcttgattctgtctgtgcagcacttgccgtgctggccccttctgaatagggagatccaattcgtgactgtcgatgacgccgataacttcggtttcggttcggttcgattcactggtcgatcggtggatctcctgagagaggaccttatgcgacgtattggttacgacgacttcaccatgtgtgtccgggccggccgccatgggcggctcacccctctgttcattgacctgcctcacagccgggagacactgtgcattgttcttatcaggcccaacaccccaggtaagcatagcagcttagtttgatatgcgtgttgctgaattttctgaacatttgtttgtgtagttcggtaagcagtgcactagatctgttcagtaatgtgaattgcctttgtgttgaattttgtggaaatcactcaagcagtcctgtactcctgtgtgtgcatgctgagtatggattggtgataggaatgtgtttaattcctgcaatacattactgctcaagcttaactaggtagaaatattcatgatgttctgatgagtgatgacagtaactgaatcttctgaagcattcagggccttcctctaccttttatttgggatttttgatgctaccagtttgcagatgccacatgctatgcgaaatctagttaattactggtgttacttgttctgctcactatcccaaaccaattgttaaataataattaaagaacagttctgtttttcaggtcgttttcattcagggcatgcccctgtctttttgacgcgtagcatctgcaatttaaattggcagcgtagtactgttttttactatcatctgcaaaaatcccaaatactgtttttacttgcaagagtagtactatcacactgacagactaaccaactgcatgatttctttactatggctgcagtgaatgatcggttgctaacatcaattctgaaagctgaggatgatgctacaaaggctgctgctgtggagctgcagcaccggcaagaattgctgtgggagagggaggaagcgctaagagtccggacggagacagcacttcggcgatgggaggggaggcttcaggggagggaaagagcaaccagagtccgggaggacgcgtcgctgcagcgctggatggagggtctggggaggagggagctcgccctgacgcagcgagaggagagggtgagcgggatggaggcaacacatcgagcggctaccagcagagataaaccctctgcacctctactgaagaaggtatgcatttggatcccttagaaatatgtgctaaagtgtttaactgaacagcagcatttgttagtactaatgattttgagactcttcacaggaggataacatctgggagaaaaggcagatgtcattgagtatttcccttctgactccattggcactcctattctctgtacggccactcatacctgctgaatatgatcattacattttgatggccttcattgccatttggggattgggcagcctggcttttcaatttggattgtttggatctaattctggtgagaagtccttcagccgcttcgtctttattagtttcactgccctggtcctatacactcttcacttggagatgatggaagcgaagggatactctgcagcacctttgtcaccattggcagatgtcagtaatgtcaccctgttcccagtggtactggatgatcaaacttggacagtgattttctggatctactttgtgctcgtgctttccggacatctgtatgcttgggctacggtatatatcttcgactcttaatttatgcagtttattttatatttaactccctaataatatttgtctacgcgcaggcttacatcacagggtctgacaaagatttggagtagtccatgccttcacattttcgtgagatgtttgtttttttcacggcccgaggacaagtggcccagtagaggataagaaatcaaacaaccaatggaccagatgcatatattagtgtactgttgcaattgcaccctctcttgaccttttttcctgttaggataaacattcacgtcatgaaacttgttcttcttagcaatattatttcacccttaggtggtgctattttccttatatgatgatcatactgttgttacgactggaattgagtaagatgtatgcattcaaaataccgcgacaagttcatatttgtgatatatgctttcagacttattaagttttgttgcatgatcactgggtgaattatcaaaagcaatgcataataacagagttcatatatgtaggacaaggttatcgtgctgttttgagccctgccacaaattgagagaaatggtccactatatattgtttcatgttattctcatatctcaaatgtcaatgtaaaactctttgcagtagaatacaaaggttgatgcttgagtattctgtattgcatacatatgaaaatttagaaataatgtctcactgaataattcctttttgttgtggctgagcaaatggtgcattaactggatactggtattttgcatcagacggtcactgcatgttcttctggtctggctcactggctgactggtttgccttcttttatgattaatttgatgatgttattttgggtccctgggaataaacaaggaacgttctggttctaatatattttagaagctaatatactactccctcccttcaacgtttgaccattcgttttatttaaaaaaaaattattactatttttttttgttattattagatgataaaatatgaataatacattatgtgtgactaatttttttaaaatttttcaaataagacggacggtcaaacgttgaacacggattttcacggctgcacttattttgggacagaggtagtagcgtacaagaggaatatacagcaaaagaaaaaagagaaaataatcctacacctaaaccaattatcagaaaatatacaatcgtacacctaaaccgatttcaaaccggtcgccaagccgtctccagatcggacgagattgacacgttccaattcgactggattatgcatggaccggaaccgcgcgattccaactccgattcagtatcaaaaaatatatatatatatatatatatatatatatatatatattactccgtgtgaccttgccgtgtatcgccacaaaatagagaccgtacgcgtcgccgccatcaccaacacgacgtggatcggacggacggacgtcgttctgcaacggtgccgtatgggtggttcgtcgtcggagccggagtcgtccgatctactgtgcagcttgctcgaggaaggacgtcctcgtcctctccatctttgcaacacggaggtgatggcccctccccttcctgcctgggtcatcccttacagagtaactactccatctgtttttttttttaattttccaacagagttttttttttcttcacgatgctttttataacacaataacttaaatagagtaataatccattctccttttttgtgtgtgtgtgtgtgtgcagtggacctgcttgcccgtgtgctttgccctactgattgttttcttcacggttgtgtatccaagaacaggcaggtgtaatgccgatggccttggaaatggaatgtttctatgtgcggtttacatggtttgtgcctctattgttccgatcgtggctcttgcgactttcacagctagtccacccgttaattagagatgtgataatcagtcggggcctctaatgtgagaggggcttttgcgttcatttgcacccacttaattaatttttgtaagttcagattatgcatgtatctgtttatgattatgaaggctaatctgatatttgattttggttttgctataattatgtcgccataaatcttgttagattacagtcagatttgtatccccgggatctcctattagattcgtgccggagtacttccgtgtctctgccataatgtatgttcacacgctagttcataagaatatgattaacaccaaattattacatcaaaataaggtaataatcatagaaaaggagacgctatattttttccttgtaaatacatacgtagctttagaactcacattataaatacactaaaattacatatgtaattttaagacttatatatgtaattttaagatttacaatgtaaatacacgttgactattttttgataaaaaatgtggcggcgtaaatatagatagacccgacaaaataatcctatatgctggtggacattgtgttcctgaccggagtttttggaggaaacatggtcacgtaatcatgagatctaaaatatctcaaaatccatccattggaacccaaaaacttatcccaaaattcctattcaaatatcaaaatctaaagctcgaattttccctccaaattaattctcccttatctccaatatcaaattctatcaaaattttccttgaactcctttctttgcacctcacttaaaatcctgatcctgagttcaaatattaaattgaaaccgaattcaaattcatcaacatcccttcacacaaattcctgaaaaaatctaagatcattgttcacatcatccctttcctcatcccagcccacgcagcctccttcctcttcctcccctctcactctctcaagctcggtctcccctcttggaataagttcactttaatttgacacctttaattagtggccggatctaactcgtatccctgaaccacgataccggatatcttgaccacctcaactactaaaaccgatggactttgactcccttggcaattttggaggacggtttcatcgacatgacgcctacgtggcggtgttgatctagtcttcgttccacgtggcattgatgtggttcttatggcattagaattaaaaaataaatacgggacccatttgtcattcgcacaaaagatattgtgggagccactgacatgtgaggcccacatgtcatcctctctccttcttccttcttctcctcccgctctctcccctctctctctttctatccctatttctcttccccattggacgtacacggggagcgggggccggattggtggcggcgatgggtgagggccagagacgggcgtggggatgaaggcagtgacaggatggtggacactgtggcgaagaggaaggaggtcggccgcatgagagggagccacagaggagcactggtcgcgataccaccattgtagagctccagccctcacctgcctccgccatgacgcctgtgcacctcgcgccttatccacctgaccctcttcgttgtctgcacacacaagcaacaacaacaacaatggcatcacggccaatccccacgccacaacacaaacaagaagcatacacgtagagggtgtgcgcgtcaccttgatgtggtagtagagcgtgtggaattcgatggcggaggagacggagatggaggctggagcaacgggagagggggaaggacatgcagacgacgacgacgacgacatggaggtggcgaggcggagtgggagggggtggtggacactccagtgcccgcctcgcgccggccgttgccacttcggtccccgccagacgccaccgccaccgccgccctcgccctcacgcagtcgttgccgctccagcgctcgtcgccgctccaaccctcgctcgcatgccaccgtcgttgctccagcgcctgccactgccactctggcccccgccagctgcaaccgccgctccagcagcatccgctcgttgtcctttttgctcctccgatgaagatgtggagcacctcttcctacgctacaccggagtggcaacaatctggcacgcctttggcttggacgaacaacaaatcgcctccctgccgcagcttgaaggtgtctgggacattcctccgccgggacaacccgccactccaagagtctggcacaccatcctgcttgccgtcatgtggaatatttggaaacgccgcaacaacaaggtcttcaattccgttgacgatcctgcctcgttagttctccaacgttgtgctagtgacattgacctttgttcccaccgatgtaaaaatgctgagagcaagcaacagctccgcaactgggcctcctacctctatgtaattatctcttaatttattttccccttctcaccccctgtaacacctctcctgtaaatgtttcttcatttcaataaaaagtttaggctagtactttaaacacccgcagtagtttccctcaaaaagaaaatcccttgtgtacccataaaaactcacctaatcccttacataccctcgaattttactcaatcctctctgtacccccaaatttttcactttgattccttccatgcccctcccattaggtttccgtttgatccgtgacttaatctgtttgttacattgtcagtattttcaaaaaaaataccaaaatgcccctggcaatcctagcaaataagatcgaatccaatcccttctctttccccatcctctccacgcgctggcacgaggcgcgccgccggcccatcccctcccgtcgagagcgccgccggccaccggcctcccgtcgcgctcgccgccggcccatcccatcctgtcgagagcgccgccggtcactgccatctcatcgtgcgcgccaccggctactgtcctcccgttgcacacgccacttgcgatgcccatcctgtcgcgtgcaggcggcgtgcggtggggcgtcgccggccactgccctcccgtcgcgttggccggcgtccaaggcgcgggggccgccgtccacggccctccgtcgtggactccactggccactgtcctcccgtcgtgctgccgaagtttgctgccctcgcttcgcgggcgccgccggccacggccctcctgtcgctgcgccacccatcatcggacccagcactgccctagtggtaggttagttcttcatttcttcttcttgcccaggaacctaatttggtttgtcgatttgcaacatctatgtatggaatggaaagttggtttggttcctgcaggcatggaaatgaaattctggtgtgtgcatgatatgaattacagtattctgtatggatgatggaaatgaaattgatatgaagtgctctgtgaatgatgatgtatgatgttcctgatgctcttattgacctaattgtattttgtttcacaaatttctgcatggatgctcttctcatttcattcctatcaagtggtgctattaatggtcctaatatttttggatgctcctgatgttttgcaatgtattttctcctttgtccacagcaagttttgcactcctgctaactgtaccaattttttttttacagtggaaactgatgtcactttgattttctaacactattattttttttcaaaataaaaagtttaatgtattgtattttcttcaataccatgataaaattcttaaactcattatttagtctcatagcatacatatattgtgcagtcaacatttttcaattattttccaatctacttggtgctcctccatctacaagagtattatggatatttgcaaccacagttagctggaaaatgaaggaaacataatggggggaggggcatggaaggaatcaaagcgaaaattcaagggtacagagaggatcgagtaaaattcaagggtataaaagggattgagtgagttttcatgggtacataagggattttctctataagctaagttgatagcgacacacctgaggataactttttctttggtttgatgctacaactttcagcaaatacatacataattggcactacaattaagtgcgtgcagctgaaacggttagggaggaactgtaagagcaagtttaatagtatagccaactactagctccaattcatatatagtcaatctaatagctcattcatataatagttacatactacactattaatacatggtcccacctatcatacacacaccgcgtcttggagtccgtgctacagctgactacaaatctgtagcccgctggccttctctctcctcatttatctccttaaaatatgtttacagctggcttatagcctgctattgtatctgctcttaggagtttatgcaagtgaaacacacttttataagataatgattaagatggcattgaagtagtacgagcaagtttaataatatagcccactactagctctaaaatttaaaacatcatctatagtcaatctaatagctcattcatacaatacttagctataaaaatacactgcatcattaatgtataatccacatatctctctcacatactttattggagctcgtgctgcagctggttacaaatctgtagcccgcttttgttctctctcctctcctctctccttcacacaagcacaaatctgatgtggcaacttatatagcccgcttagggcacccgcaatggttatctataggctctctacaagagatccatgtcagcatattttcctacttggaagagattaaatgaagagagagaggaaagctatctactaacctggagatagtctatagagaaaaacgaggcaatggattagagagctatagatacccatgtagacataccattgaagtggtttactattaatctagtctattgctgagatgtacatgttttatagatagcaccttactttaccattgtgggtgctcttacgttaccttattgtatttgctctgaaatctaatacattggatgtgcaaccaaccttttaacctcaacttttaatgcgtgctagtattttactatgattgaaagcgataataaacaatgtatatctcatttcggattcccatgcatgcacttgcgtttacattactcagagcatgcgcaatgtggaatttagagagattctataggagagagacaaataggatcggtcctacacgtatgggtgatttttttcgctgatcctaaagtacaaccgggcactagtcttgatgcccaactcttaactgctcctaaggtagaaccgggcgctagtcttgatgcccaactctatcgagaaagagtctctgtcccacctatcataggcagtcatctacacaaactttattttaggcaaaatttgctatagggcatcgaaaaaacgtgtaattagtttgtggacaccgcaagaacaagaatttgctaacgggcatcacaaaaaacgtgtaattagctcctggacactcggggccttattttattatttctcgtgaatttggagagagaaacactaaataaaaacaagtttgcccttggtctcgacctggatagcgacaaagcattgggttggccggcggcggcgacaaagccgaacacgtgcagcgcttgtgttctgtccctgtgacgggtccgagtggcggcgaccatcgccgggatgctccgtgttgtggccggcgtgcgtgggctcgtcgccgccgatgacccctttggtgtggagctaacggacgtgttgactgacgacaccgacaccgatgacaatgcgcttgtgttatgtccctgtgatgggtctgagcggcggcggccatcgctgggatgctccgtgctgtggccggcgtgcgtgggctcgccgccgacgacccctttggcgtggagctaatgcacgtgttgattgacgacactgacatcgacgacaatgtccggcgactggagaacacggtgcccggcgcgtgggcgacggtggagagttgtgatgtcgcggagctgctcctcgccagcctcgatgccggtgtcccgttctcctgccgtgtcaatggcagttgcttcgcaattgcaagggagaggatcaaacaacaatttacatataaagatggagagatcacaaaaaaaaggaggggaaattttgatcgggagggagagagcacatgcacatactcgtgaattccctttcgcatatggcgctgagctagctctttccagctggctcggcggcgtgacggcgtggcggtgctcgtcgccagcgaccagagtgcttctcggttcccgtcgacaagagcatgcctcctcctcgaccacggccacgggccggagcagctccacctgcatcagcccgcggcggccaccggcggagctcgtcggcttcacggacttccacgcgcggtcgatgcgcagcatcttgagctccacggcctcctccttcctgtcgtccttgtcactgttgtcttcctcgtcttccagctcggcggcgcagatggggggaaggcagcggtgcgcgcgtgcgtcggttgctgccggcggcggcggcggcctgcgcaccattggctggcggcggtggcgcggatgtgcatgcgatgtcatgcgttggcggcctacgtgggcgcggcagcgggcggcgcagagcgggctcgcctttctccccctctgcccaacgcgctcgtcgcgccgccgccgcgcggaggaggtggcagcggtgctctggccggtgtgagggcaggggcaaaatcgtactctcaccagtgtttctctctccaagttcataggaaatattaaaataaggcctcgagtgtccaggagctaattacacgttttttcgatgtcctgtagcaaattttgcctttcttttattaaccttgatgggtcccactcatagcacttctgatgatgcctatacattacaaaaattttcaccagatgctatccgatccgtgctgtggggcccgccatatgagccccttcctgcactatacattacagatgctcttagagcaaggtcaataatataacctgctgtcagctccaacaaatagccatgtcatctatagtaaaaagtgtagctaatgtgtacaatagaaatagtatagcactaatattttattatcttaatggacccaccatcttctctaatctgcctctttctccctcccctccttcccttttagtgggtctgttttcttggagcgcgtgggtagccggcgcttatttagtcgcttgctctcgttctctctcttccgttttctcctcgagcaaatcgttagagctgacgtgtagtttttatcgccggttctggagccctattgtacctgcttttaggcgatcagacagtcatggtatgaagatttaaaagtcatattcgtcagcgcacaacgaaccgacgatgccgcaagggaggaggctgccgcttcctcacggtggctgcggcgcactaggtcgaggtagggctcggtttcctcgcatcttgcaacatgttttgtccatcttatttagtactcctttcgatgatccagtatgaaaatcatccaaagctttcaagacgtccctgaggattacgaccattgggcgcccggatcaagacgtcttcaaaacaggctttaccaaaggcatcgcgccgccgtgccaccggccacgccgccacacggcgttgccgagagccgcgactaccgcgcgtgctgctatgcaccgccgccggccgcgccccgcacggcgccgccacccgccactgtgatcaccgcgagccgccgccagtgtgatcactctaacattggtcattcatatgtgagcccatagactataggattcacatgttagcctctcaaagtctatttatggtatcatcctgtattataggagtagaaaccatgcatgtcttcttaaacttttttttttcacaacttaactggctcttctatttattttcctcacatttattttttttagagcacacgtgtattttacgtatttttgctactgttatgttatcaaaggtaggataggctatgcaattatttaagtgcttataagaaaatttccaataaaaacgagaaaaaaaaccccccctaaataagtcgcataaagctagtgcgcaaccctccatagcgagcggttcatcgccgcggcacaaaatgctccgccgcagccgccacttcctcccacccagaccccgccgccggccgagacctcgccgcgaggcccccgccgccgagccgcccaccccgacctacacccgcgacgtcgtccgccgcgtcgacgccatcctccgcggccacccctggtcggcggcgcggccgctcctcctctccctcccgggcctcgcctgggactcccacaccgtcgcgcgcgtcctcaaggcgcacccgcctctccacaaggccttcctcttcttccgcctcgccgccggcgcaggcggcgggttccgccacgaccgcttcacctacacctccatgctccacctcctcggcgaggccggccgcgtgccggccatgatgcgcctcctcgccgagatgctccgcgcgggggtggaccccgacgccgccaccttcaccacggtcatgcactggctggcgcacgccggggacgtcgacgccgcgatgcgggtgtgggaggagatgcgcgcgcggaaggggaagtgtcggcccaccctcgtgagctacacggcgtgcgtgaagatcctgttcgacgccgggaggcctgcggaggccagggaggtgttccaggagatggtggccgagggactgcggcccagctgcaagacgtacacggtgctcatcgagcatctcgcgaacgtaggtgaggtgttcgaccaaatgcctaccatgttgtttgttacctctacgttctgtactgcactctcgttgtgagctgttgatctgttgttcgatgaaatgcctgaatggtatggaagatccaatggttggtttgctcgatgaacatagcttggtgttggtcggttgcttagtttttgcactctaatttcttcaacggattgctaaatggcatgcaattagaatatgccatccattagagtacagtgggaatctcagcttgtgtagacatgttagtgcttaaattaagcacaattaaagttcaccatctattggctagtaagattaatctattgcattcattggccttcagaatatcccttttataacaaactgtcttgtaagcatacccaatatctatctctttttagatgtactcaatatctatctgaagttcttcattcattgagtcatttgtgctcaacttcctgtgaagaaaagattgaacaattgttagcattctggaatactctgtacataggtaggcaaatccagtctaggctgcaaaagtttcttagcttactgaagtgcagtaaacaatctcaaaatccttgtcaccattgtatgaactccactctacagctgctgcaacttaacacgagtactggccgatgtaagaggtgctagttgggcaagcaaggtggctgcctaggcaggataaattggcttggcagttatgatacatcacatatttgattaatgttttcacttctaatttgcactgcattaagttataatatttgtaccatcatatcctaacacaaatctaatttacttcagggaaatttgaagctactatggaaattatggacaagatgcaagaagctggtgtagaaccagataaagcactctgtaatattctagttcagaaatgctccagggctggtgagacatcagtgatgacccgaattcttcaatacatgaaggaaaatttcatcgtgcttcgccgacctatatttttggaagcacttgaagctctaaaagctaatggtgagagtgacaatcttcttcgggaagtgaatccgcatcttgcatttgaaggcatcgaatgtgacccagcatttactgatctaggctacattactgtcaggagtacgatcctgtaccttttggcttctagaaactggtccgccgtagaacacatgataaatgaaatgacccccaagaatatcaaggttgaatcacatatcctctctgacattattcaagcaagctgtgcaaactgcagaccatcatgtgggcttgcagttctgcgttacagtctaagaataggcaatgaacttgatagatctgcatatggcagccttcttggtcattacatcagaaatggttcattcgatttggtgtttgagatcgttgaaatattgattaaatctggctgcaatcttgggacatatctatcatctatattaataataaaactggcttgtgctgggcattcttcaaccgcagtgcgcatttttggattattgactacagacaagaatgttgttacgtacactgcccttatgagtgcctattttcaagatgggaaagttgataaggctctccaactattcttgcaaatgagtgctaatggagtatctgcatgcccaggtacatatgaagtactgatacatggattacaaatggctgggcggaaacaggaatctgaacattaccgaagagagagaatggagatgcaatggcatcttcagtatcgcaatgagcattcccctgaagatagcttatgtaaccatctgttttgtgattttcatggttagaagatggtccaaaatcttcatctttcattagctgaatccttccagcacctattgctgcctgaacatgatgatattgacacacaggtctgttggtatttttaattttatttaatatatacctaaacatggaactgtaaatgatttggttaatctttactctgtacttggtaggactgctgccccaaggatggtaacatttaaattgaaaaaaagaagtgcaaaagcatctatatgatttgagaaccttgaaagctgaaactgattatcgtgatgttatcaattgctatttgaaacggggaaaatccattggagtagggcagttgaagtgtttaccagaaacattgattgtgatggtaatttatagatgactctgagcagttggaagtctccaaaagactgattgtaaagaaacatcttattcaaacaacttaattcgagagcttggaagtttttaaaaaaaatcaagtgtaaggcaaactctatcttttttgcgtagactttcctagcctcttccttttgttgaagacacttctaattactgcaatataaagatagggcccgcagttttatacagtgaaaaacaaggagctcaatagttttttggagagttctgttttatttcatctgttaatacttattacaatcaatttgctgcgaattctgggacacttactaacgagtttaaaaaaaatagttaaataccctgttcagtttagttgcctttttgcgttcaccaaaattccttaagtatttccgaacttattttaagaaagcggtccattggagatcaactgcttcagtacaacttaaatgatatggatgaagacatgtcataaagaaacttccgttggcaggaaccacaattgaagagttattacacaattttgtaactttgttttgcacaagctggaattctaagttagataaacttctagtttacattttttttaaggttgagaagcaacttgttttgtagtgttgtattgatgcatgcggttgttgtgttaagtagttgtttcttattcatgtcgtgacaaactatttgcatgttcatatctattgtaagttctattttaggaaaaaaagtgcagggtgcagggtggcatcaatgctccaaatatggtagcagtgtaacttgcttagttaattcgagctgttaattagggtttactttttagtcactaaggtgcatatcatttatgaaacagtcttcccttttatgctttacattgttgactatttagaattcttgcagtctagtgttctctttgtatctatcaaccaactcaactattcaaggcaactcatcaagctttagtcctttttaaggattatgcaaagtttgctgtattgttttctcatgttgtccgctttttggtattctcagtaactcataatgaggtctggaccgttcattcggtacacaaaatcaagtactggctacatactatccaccagtttttgtgcttttgagagcatattattgatgaattactgcattgtagatgaatatgtcaaggtatagctccaatctttaaggaccgcaatacaattctgtgaaatttgtgctgagtgattaatttgattcatcttattgtttgcagatgtcattaaattatggagtccatctaggatcaccattatgtaacacaaatgctctttctgaggtgggtttgtttagtaattagtagttgtcttactcaatgcagattgcatacacagagtgatagcagtttattttgtctagtaatcatcagagttgttgaaaaatttatgctgatggttttaccttctaaaagcagcatcttcacgagcatgactgcacaagctgctacacgggctgttcacttttccatttcaatgtattgctgttgtcattcatcagtagacaacttctaaaggtgcacatggtgaagactagtgctgccacttttatcaaacctttactcagcagcccctatacaaactctctattgctcttggctgctattgcaaaaaggtttcacgaaacttgaactggggcagggtaatttactatcctgttcagcattctcctgcaccttttctgaatagttatctacaggtatgttatatgaatggctcaaattcttcataaacagagaaactagttaccaatgtcaacatgtcatggaagctgagttatcctcaaaaagctccaacagcaattttagtttttgctgggtagacatgcccatgaaatggtgataaacgattgggtaaatatgagaagctgatttataatttgtcatgtcaattcacatccagtcagcaggagataactgagctagaggttgcaagatcctttgccagcatactgcatatctacatcacagggagctaacataaagacgatgaaccaagagagttctagttgtgcattaatctagccatccaaatctaagcagcctcatgcacatatattacatagcatggccaacattgaccaaacatgttgcatcctatcttgaatctgttagttgaagacaaccagttctctccatcaggccactttcacgtttgtcttcagcctctttgcagcctgcacgaaaccaacgatgacctgcaactcatccaattgcttaaacatggcaattgggattcacaagagacgaccaagatgtcaatcaagcatggttatgcaaagctgctgtgtagaaattggagagagatgagtcttgtttatcaacctgcgacacaaagtgcctctggacagcatccactaactgctccctggatgggttagggctagcatcctgttcagcacgtagtcagaacaccattttcatggtatatttttattcaactggtggagcttgatctgggaatgattacttacgagattgaagtgacgccaatatctccataatgcagtcatttccagcttgctcaggtcaactttctgcaaatttcacagtcaaagcttcagctacgaccaccacatcatcatggagaacacataatgttacagctaacagtagggatttagtccaaatactacaaaggttgtgacagagcaaagttacagtgacactgacacatattactggaaagtgattggggtgctacaagcaatggttgttacaagcacagaaaccaaggaagcaaaagtcgcaccgtgtgagcccttgaggaggaagaaaatgacgccttggagtgggaatcacaagacatggagcggctgaaggatttggtctggaaccctctatgctgcctgctccttgacctctgtggctttggtgattgtgcgtcatcggatgctgcaagaatgggattaaacaagaccaactatttacaaacgagacgcatgcaaccaaatcgaaggacataattaggtgccacgaaaaccgtgccattattttaagttcggttttcacaagctaaattggtccgtgacacagacggcgttcgggctaattctaggggctaattgctctttacagaaaattatggtgtcgtgcatcaggtaaactgtcttttttggtccttccccacaagatagaacaaagtatacgacattattattcatagatcggcagaattttatcatgcgaacaaaatacgaaagcattgagaagatcagcatttagtatgaagttcatggggaacattgctgatgaagcaagaacatctgtgtgggatgaatatgatcttacccagatctgaactattccactgcatgttctcacagtcaaacttatcatcatcctcattgccagttggaggttcaatcacacttaaagcattcctttgcagctttacctctatgccattggtaagcacctagcacaacaagccaataatatcatttttatttgaagtcaagcaaaaattgtaggcaaacaatcacctgaaagaaaattaaacccttgcactgagcaatgcatatcctgtttaagatcgaaacctaagatctgatatatccattccaaagaataataccctgtcagggcagtgttctacaaaaaagttacaatgcaaaaaggtaatgcataaggctgcctacaggaacaggtgccccatccttgaatcgcttaggtcgcataagcactacatggtgaggtgactgcacggtaaccgcatactggtaaaccttgatgcagggatgatttttagtttgtagcttaatgaattaacactttttctttgttttgtgaaaaaaattcgggaaggtgaggtttcaggtggtgattcccttgggtagttgaaagatttggttgaaaactgaaataaatcctaatggttcaacaaaattctgcacaatacgaaatcgccttaaaagtgtgattccccctatatgtggtcatctcatttcaatgttcaatctatctgctgttgcaaggagtgcacatccaaaagacactgggaccaaccaagagaacagcagccatataatgcagctacatcagcccaacatgaccttattttggtatgattgtttagataagacatttgtgcaagaatagcggaagattataaaaaccagttattagtaacaacaaaccaataagatagtaacagagagaagcacatattgccaaacccaacatgaccccaaaaataatcacattaggtggaacgtccaaatcgtgtaatatctaaatatccaaacacatctgatgggtatcctctgccagtgttgcattcttgttagcctcgctctatgagaatgggactaagaatcagataagcacttcacaggaaaacaggggaacatatgattttggatctacttgcttagtgggaccaaacacaattcataataatatttctaagcacatcacatgaaatcagtaaaaccattattttggatccacataacactcgcaaccatatcattgtgggaccaaagaccaaaatcttgatcatatttgtcacacaaaaaacctatcttgtaatttgaactagacaaattggagcacaatggatgcttgaaacattaccccattagcatcttctttccatcaacaagacacaatgatccatttggaagacatgcagatattcccaagaatatcctcacaagttccatgtaacggtgggaaccatacagcatttctacccatacaactgacaagctggaacactgattgcattttcacccataccaacaatgcagctcacttcaaatttcgtttaaaaactagcactgattgcaatcggatttgaatctagatactccagatccaaccttatcaagcaatcttggtcaacaacttccacgactgatgctgacagcctaattgaaatacagatcaagagcagtgggagaataaaaaactgattcccagtgcaatcaggaccacaaccaaacagtgaacaaacaggatctaaatttcgatctagaatacattacaaaaactggaagataaaattcaactgaataaaaccccaagactgatacatctagccaagaattcttacttggaaccctagatgcacaacaagatctagagccagccaagtctagaccaatcaaaaccactgcattgctcaatcagcaagcaaacaaatcatgaaacatcagtatagcagcaattcgatcctgaattaatgagatcaaaacaggaccaatccaaattgcaagagattaatccggattagcaaaaattaagctaaacccccaaaagcagaaccactcactaaagcatccaattggcgcaccaaaacccaaaaaaaaaaaaacaatcgaaaaagcaaattcacattgtatcaaatcaaatcaagatctgcgaaatcgaaattaaagcaattgcgagtggggcagagcgaaattaccagccaatgccatcccccgagcccgacggccttcttgacgacgccatggaggccaacgagcaccgacttggtgcggttgttgccggtgaccaccaccttggtatgccgcggtagcacggacatctcgtcctccccccatccctccggtccccggccgaccgccgcaatcatctccccggccggatcgatcgcctccacctccaaattactccccaattggcaccagattggcccccaatttcccctgtttcttgcagggacagttggccaaattcttgatccgagaaattccccaaaattcacgccgggatcgcaccaatctggagaatgtacttcccaagaatcagagatcaagcattggggacccaagattcgctccaattccccctcaattcgcccatcctcgccataccgcaagaagccgaatcttgatcacaacaatccccaataaccacacagaaccgcaccgatcctgaaacccctcctgctccagcgacgagatcggcccaaccagcacccacaattcccccaacaattcgacaacaaacccctgcacaaagcaagaacacaacaccaattcccgatcagagaaaagccaaaaaaaaaaaacgcagccaacaaaaaccccccaccaagaacgcaatgccaatccaggacaagaaacccccaccctcacaatccggagatcgcgccaatgcggcgcccgagcccgcgcgaattggagaagagagagatagaatccgcagggaatgggagcggcgagcagagcagagtggagcagtagaagagtagtagtagcagagagagtgtatgtgtgacttttgctgctttcgttttccttgtgccggtagtactactactactctggccctgcctgctatgaatcccggggcagcaggcgcgggccaatgaggggaggacgcgtggctaacggcggccgtctgggtgtgacggagcggggtggtcggggcgaaatgacagggttgcccttggggtgtttttttccttttttttttttccttggcttcgtgggttcgaatggttttgaattttggacccgggtagagggcgggggtggtgctcggggtgtcgaccgggttttggtctgtgctttttgattgtttgctttggctctttgcgcggttgttcgctgttggaccgggtttttggcggctccgctggatttgatgtgatcatgcgaaagtcaaaacagccaaaacatggagtgtatttcacttgaaacctcctttgctgatggtctgattgggagttcgaaggatgtctgtttatgcttatgcatgatactactagcatgaaaccgtctagactctatgaaacataagggctttcgtagtgtgcatggctgtagttcaaccccagcctcccacatcagagatttcacgccacgtacatctctcccgttgccaagtgaagaacgtggagcccaagtgagatgtgttcctcatcagaattcgtctgggtggcacaaggaacggctcgtgctacatgttgggagaggcatagcctcctgagacgcccctacaccctgtgaaaaatggtgacgatgagctgattcgaggtagtggtggtcatcccaagctgatccacacgtggtcctcatcggcgaggccaccaccctgagctgctttgttgtccccaaagcggtggcgctagccagatcatgtgatcctgaagccaaatcaggagagcttcgatggagcggcagcgacgtcctcggtagaggcgcaggtgaggagaagggaagatggcaacgacagaggatctggcatttaggacctcattgtcatccccgctccacgctgccaagccattcgtcgtccccagctctaagccaccgagcccctcgtcatcccccgaaacactcgttatcgcccaccactccaagccacctcacccccatccgtagcagcaccttccttgccacaccaccaaagctgcctcaaccttgttgcttcggtttgtctgtatcgatctgctctacacccgctcggttcgaggcaccgctgtgatgagggtagaggtggccgcgtcagggagcttgtagggagtgaccgcgacgtgatgcgaggggaggaagagtgaccgtgccattggtgtcgctgtcgtctcccgctccatgctgtcgagctcatcataatccattgctcccacgccgccgagctcatcggcgcaccggccaggggaggagggccaccaaaagctaaggagatgaggaccgtttgccgtgggaggaggagaggagagacagtatcgtcgccgtgggaaccaagagtgagggagaggatgagggagagaggtgaaagaggggatttttttttctggattctagtgtgctcagtttaaaattttgcacttccacataaattgaaaaaatatatgagaactagaatagtaccaggtgctaaaaaaatcaatgccagccacttgcattgtgagaaaattaggttttagagttgtggccctaggcactctgagacccctcatatgagtgtcctaagatatagccagctatagacattttaaagagataaaagaagagagagaaaagcagcgggctacagatctatagtcagctacagcacggacttcaagacgtaatgtgtgtatgacaggtgagaccatgcattaatagtatagtaagcaactattgtatgaattggctattacattggctacaaatgatttggagttcgtagtgggctatactattaaacttgctctaatatagtcacacgcaaaactagtaagatttgatcgggttttcgtatagattttgtacaacacaatttattttgcgtagcccattataaattgtgcagtgttcggcttcagttcttggatgaaaaattactagctaggctttgtaaagggcctaattgtaattattaatttgatttcttttcatgtttgctgcatcaatgggatgaaaacggtcggaaacgatatcacttatatggaaatggttcttggtcggttaggatatttcatgtttatcaattttaactatttagcattgacttcaatatgaggcagacaaaaattggaaaaatcaaactttatgtacacctgaaaacgaaaacgtccgaattacacctctaaactatgatgttagtacaaattacctctagacataaaaccatctttcgccctcaactattaataccgggatgaagaactccctaattcaatccgaaatggttttgatcctatgtggtagtccattttttttaaaaaaagtaattctctccctctacatacatacatacatacatacatacatacatacatacataagtacatatatatatatatatatatatgagtacagaattactgttcactactgttcacaggttaatgttcactcgaaaactttctttaaatttttaggatctttgcagggtggctaatccaaaaacagccggcgcttgatttaacgtatagaagtgttcccttcgggtggaactgcctgcggagatg

SEQ ID NO: 5472 - DNA, 27088 bp, Oryza sativa
cacctgccatttttcttcttagcatgtgtttttcccctgtacgtcaacggcaacacattcaactcttcattacgaattctcccatattaactctcacctaatatactttgtcaatctaaatcccttcctgaattaaaatagtgcgtgcgattatctgacgaactactgaggctattaacttaagcgcaaacgcgggaaattcgatagttcccgcgaaattttgtgcgttttgcaaagactactgcactcttggggcagctggtgtgctactgatcacgaagcatcgaaaattcagagggagttgatgacgaattcccagtcgaagctgccattcaagaactcccacaccggcgacgccgacgagtcggctccggcgaggtcgaatcccaccacgtccagctccacctccgacgagaaggagggagaccacccctgcgacgtctcgctgggagcgtcgccgtcgcagctcctccgctcgacggcgagcgacgacgccggctcacgcgaggccatgttccaagcggcggcgaagctcgacgcgcccggagttgatgacggcaggtggcattagttccccgtcccggcacgcggcggcggcggcggcgtcgcctccgcaggtgtgctcgccgtagtaggcgatcacgaacgccgcggccgggtcgtcctgcgactacgactgctgcacccgccgcgtggcgaggcagccctggcccctgaacgcgcagcggtagtagagcctcgggtgcttgcagccattgatctccttctgcccgtacttcctccagatgaacccgtccgtcgtcgtgccgctcctcacctccctcaccgcctccgcgccacgcgccctgcgccaaaccaagaaatcacctgttactaccttgcatgatagagtacaaaaccgtaccgttaccacacgattatcgcggttatcatgcacggtaaccttttcgatttttaataccacgatatatcttacggttaccacacggttttttcgatttttgataccacgatatgtctcgcggtagccgcgccaaaaaacaataaggggaacctcaccttcttttggtcggcgtgacggggagagaaggggaggtcacggcggcggcggcggcggactccgccgccttccgcttcttgccggtagtagcaccagtggctcctccccggttcagcttggcgatgacgcggtcgcagcagcggaggatctccgcggcgagctcctgctgctcatcccctgcctgcgccggggacgccgcccggagcagctcgccgaggtacgccgccgactggtaccccatcgtcatcagctccagcaccaccgccgacgagctccccagcatcgccatgctcctcactctcgcacgacaactctcagcttgggaaaaccgcgacgccgtgcagtgaagtgaccccgcacatcgcgtcgcgtcccgtatttatagaaccccgcccccaccaacgcggggtgggaaggaagcccgcgcgaaccaacgccgggtcgcaacgggcccaaaggcccaaggccaaccaacgcgactgacaagggagcaaatcaggctcagcgaccgagcacccgctttgctgctgcgcgatcgacaccgagatctccgccccgccacttcactcggcttcggcagctcgatcacctggccgcaacgtgattccccttccgctactacagtacacgtaactactctgtcgatgtccccaattatggcgttgtcgcgacccatcgatggagcgaggagccacactgtacactagtgctactcggtcactgtactcggctactcgatcgatcgatcgctgatgatgatgataaaactatggcgagagtcacgacgacggccgcgcgtagaagttgccaaaaacgtgtcgcggccaagtttttaattatgtgtcctcgatcgtcgccacgttacatcatcacatggttcagagtcctgtgttccatgtggatctctcatctgatcaactgagggcctgcttagtccaaaacaaaatttttcacgttgtcaccttaaatatttagacacatacatacagtattaaatgtagataaaaaaatcaattacatagttcgtcagaaaattgcgagacaaatctttcaagcctaattgcgccatgatttgacaatatagtgctacagtaaatatttgctaatgacggattaattaggcttaataaattcgtctcttagttttctagcgaaatctgtaatttgttttgttattagactatgtttaatacttcaaatatgtgtccgtatatccgatgtgatatacaggagcaaaatttttttccaactaaacagcccagaactagcacggtggccacatatatgttttctcaatttattattaaaatatattaaaatgataacataattttaaattttgtactaactttactaaactaccactgtctcatactgtattgtatatacgtgatagttattaattatttttaatatcaaattttagttatttctaaattgtattcttatatatggactgcagacttgtcttccaatattcctcatttttttagttctgaattctcgttatttgtaatttgtatttctatatagtctctaggctcttttttcaatattttttttaaaattttgaattttcattatttctaattgtttttctatgtggactttaaacccatctttcaatattctttttttttatttttgaatttcagttacttctatattgactctagactcttcttccataaattttttaatttcaaattttaattatttataaattgtatttctatatagactctaaattctatctttaattttaatttttattccgaattttagttcattctaaattcttatatggactctatactcttcttctaatatctgttgttttctaattccgaatttctattatttcttaattatatttctatatgcactctatacttttcttctaatattttttattttttaatttcgaatttcagttatttctaaattgtatttctatatggactctaacttaattttaattttattattgtttaatttcgaattttcattagttctaaattgtatatcgtcatgaattctagtctcctcttctaatattgtttattttttaaattctgaattttagctatttctaaattgtattctatatggactctgtttttattttttaaatatgagaatttctaggccgggagagcgagcgtggaggcttctagtctcctcttccaatattccttactttttaaattgtatttttatatggaatttgtttttatttttctccgattaatataataatttttagaccgtaaaagccaacgtggatgcttatttttctattactttaataagttaatagatagattgttcgattggtttcaataagatacgggcgatcgattccccccgggtcgtcgttggcaggaacagatcaacgcctaaatcttttctactaatgatcaacgcctaaatctccttctttagtaaaaccaagattacgatcacacgtgcacacgtaccagatgtacagagcagagagctcatgatcgatcgatcacatgcatacgcgcgcagggaagggcgcatgcaggggattgggattgaccgaaaaacaaccgcaagtgtaccacacagattcgctccggtcaaggtcgctccaaaatgattcagattcgagctcactgtaccagatgctaacttttttttagagtagccaacttctcggtgatgaacttttcgaagtgtcgtgctaaaattttactcatcaaactgatcgaagtatcggagtatctgtagataacttagggcaagtactatggacattcaaacataaatcccaagatgacacaaaagactaaatagtgaggtggaggagagaagaaggatgagagagaaatagtcacctctcatgcaaggggcagcccctacacaaacttcaataaacatgtgagagtgttagagatattgggaattatgtgatagagatagcctattatacatatcacctcttaatttaattatgtatgtcatgtatgaaattggatatggtagtcacctctaccataaaacttgcccttaaggagacaccaagttcatggtaaggaaataaaaattcccacattaatcggataaaaggaaaaaaaaaggttcaaatagaaatacaatttaaaaataactgaaattaaaaataaaatttaaacttagaaaaaaaaagaaaaataagagttcaactagaaatacaatttaaaaataactaaaattcgaaattaaaaataagcaatattgaaacaagagtccaaataagaattaaatacgagaaattaaaattcagaataaaatataaaataaaattcaaaattagaaaagaaaagaagagttcaggtagaaatgcaatttcaaaataactgaaattcggaatggaaaataagcaatattgaaagaagaatccatctgagaatctaatacgagattaattaaaatatataataaaaaataaaataaaatacaaaattaggaaaataaaaaagagagttcaagtagaaatacaattttgaaacaactgaaattaaaatataaaatagaaaataaatactctctccgtcccataatatagcaatatcagatgggatatgaattcatagtataatgaatctggacaagagggtgtctaaatttattgtaatatgaaatgtctcatccgatactaggttgctatattatggaatggacggagtattaaaagaataatccatatagaacacaagggtaaaggttaattaaagttcgaaagaaaaagtaaaataaattctgtaattagaaaaataagaataagagttcaactatagatataatttataaataactaaaattcgtaataaaaaataaaaactattgaaagaataaaccatatagaacacatgaccgagattaattaaaattcagaataacaactaaaataaattatgaagagagaaaataattataagattttaagtaggagtacaatttataaataaaaatatcggaataaaaatatggaatttttttaaaaaagttcatataaagcacaacgataacaacaaagatgggagaagcaactggcctataaaggagtgagtgacggcagttgatgggacatctagaaactattaacgaaatctcaaatataatcccaatgacgattaaaagaagggacgacggatagactgttaagagcataatcacgacagttggcgggacttctaaaaagtaaaaaaaaaagctcaatgttaatcatgttcgattttaaaaaccttaatgataatcatggtttctagcgtacaatatggtgcatccttttaaattgttttaataatatatagttagatataatattaggcggagtaaataattggtttcttcctagaactaactgagatacgtgtgatcgattcccgcgggtcatctcaattctcagccactaatcaacgcctaagatggtgtttggattcagggacttaactttagtctctatatttagacactaatttagagtattaaatatagactacttacaaaactaattacataaataaaagctaatacgcgagataaattttttaagcctaattaatccataattagagaatgtttaatgtagcatcacataggctaatcatggattaattaggctcaatagattcgcctcgcgaattagtctaagattatggataggttttattaatagtctatatttaatatttataattagtgttcaaacatccgatgtgatagggacttaaaatttttaacaccatctaaatagggtctaaagcttttctagattgtgatcaacgcctaaatctccctcgtcagtaaaccaaatattacgatcacacgtgcacacgtacccgaggcccagagcagagtttaattatgatcgatcaatcacaacacaggtatatcacagattctctcaggtcaagatggctccaaaacgtttcagattcgagttcaatgtatcagatgctaactttttttttctagatcaacttttagctaactgcagacgagttttggccttttgggtcttctaccaaataaaagtcaccaaaaaagggaacccttcaatgcaacgaacataacctcctaactctgagcgtaaatcattcgatgtaccactgtgtagattctctccaatttaagaatcattcagcgttcgcaagtcttgcgccaagtacattgcatctcattgtctacaacaaaagtacactgcatttctatatatttgtcttttcagtcgttcatgcgattctgatctgaggtgataaaagtggatgttttccagctttatgtctaactacaccgtaacctcctaactctgcgcgtaaatcattcgatgtaccagtgtgtaaattgtccccaatttaagaatcatccagcgttgaccttccaaaaaagaaaaaaagaatcattcagcattcgcaaatcttgcgccaagtacattgcatctcattgtctacaataaaagtcgtacactgcatttctatttgtcttttcagtcgttcatgccattctgaggtgataaaagtggatattctttccagctttgtgtctaactacaccgtaatactttacgtgtcaacccggagtgattgggtctaatccttttttccattgcacaagttgacacatgccatgttcatatcatatttaacgtacgctgactctcattgggacgtgagaacaatgactaggaaggtctagggaaaaaatatatatataacggggatagtgatgctttctcaccaggactacggtctaacgggacatgtgcagcaactctcgagattaccggttgcagtcaaaatttaaattttaaaagttaatttgaagttgattttagtttcgatcttgtacttattttattttttaacattgggttttaagtcaataaaaacatacacataaaaagttttacctataattttctttttctaatattaatttgctacggcttataagctctaggcgaaacgctcgggccggcttaaacaggtttagcttatactcctagttagtgctaattaaactcgttttgtactagtaattaactaatatctcggatcagtaccgctttcagcatgtagctggtgagtgacatattctataagttggatctccttattgacattggaccaagattgaaccgaacttggacaaataatagtacgggtcgttgggcatatgtgcaacttgatctcagatttattagattcgatttaaccagtctccctaacgcgctctaacatgacgctgatgttctcttatctcatatcattggccctggtatctgttggttgctagtgctctgatctcgacttagaaacctctccaggctgttggatgtgcatccaacggctgagtgcttctttcttaacctctccaagataaaatgaaaacggttggaaacgatatcatctctagaaaatagttcttgattatttgattttttttatttataaatttaagtatttgatgacatctttaatacgacgtcaataatattataaaataagtcaaatttatatatggctaaaatagaaaacggcttaatataatccatccttacagaaatgatactcacttaattggtcaggaatttctagcaccattatgttttccagatctttcttccccccgtgttctcaagattcgtgctcgaagcatctgacggctaggccgactcaggctaatcgtgggagagatgacgcataggcatagacaagctgaataattaaagacccgtgcacggtctggtttttctacggcctggaccggcaagcgcatttgacccgccagttttttctctgtcaactccagcagattgcatggcgagggcccatcacattttagaatgttccatccacgcatgcgtagttagtttcacgcaacaatacaaaacaacgctcaaaatctctgcaatttatattataaaccgctatgaagtcgctgtagcttgaggtctctgacagaaatctgttctgcaacacacgtacgtgtgttttgaccaaaaccggtcggggaaattaaatctcccttgtgatgaatatatactagtttgtttttaaggtcgatgaatatatactagtataaaaaactgcgaacacgcgcactgacgttctactgaccaattagaatttctcttctgtaggagtagttttgacccagatcttcgcatttgtcaatataagcataatatatatgtattccctggaaaatggcttccatggacggtgcgacgagctcggagttacttactgagtgatgcttacgcgatggcacgcggcaactaagcgactactcgcttcgtcgacttcattatatttgtagcaattctcacacatatcagtcatgtaaaatgaccatgatacctagggtttatattttcgatgcacgaaatctcgaggttttgacacgggttgaaagtagattatgaatgtaattttgaataattttttagaatccaaattggaaacatgaaaattcggatgaaatttgatcaaaaattgacaaaaaaaaatgttagactgctaggggtcgagatctggcatcaattggaaaccctaggtacgtacccactaattaatactctttgttaattgtattttctaggtagacttcagttaattagatgcattagcctgatttgcaataatccctagaaatcgtacggtgatcgatcacaaattttgaacgacttagtgggatagagggaaccggaatattactgtcagcttgacactaatattttcctattccattatctaacaaaattagtgtcagtctgacttagctcaatgattttaacacgcgctttggccagtaaaaccatgaagcccttggtaattaccagccaagaaagtgacgctactcaaaagtaagactggtgttgtttcagctgtctgcttgtgccatatgtaccatgtcaaatgtagcgtctttgaattcgtccaattgtccagctgatgccgacttaacgatcgagccacggccatgcatgtacggaagaaacggcgagatgatggtcggcaggtcattgatttggcaattatcgtgtttcttaaaccaacttggtgagtttcttctgtgaccagccagacgcccagagtccccagaccaacgttgccagcgttcagtttctgttgatacgacatgccatgcaaatatggaattgcagtaacaatttataactgacccggtaattaactcgagattctctgaagagaactcggacgccatttcagtgaatggctagctgcacagttcatccgggacgacaccaatatggtcaccaaatatctctatcagaaagacagacagaaacatggaaatgaacctctgtttcgagacccgggaccatgaaatggccggtgctgcagtaactgaaggtcacatcgcgtctcggtaggcagcagcacacactggagcggcacacatttttgcaggaaaccgtgtgcatgaacctgtcgccgatctgtccgttggtccgatgtcataggttacggcgggggggacgcacgtgtagcacgattagctagccgagtttgtttgcacggtttcattcaacgggaccgcggttcaacaaattctctcctaatgaccagcttagctagacatgcaggagtagcaatcatcaggcttaggccgaaatgggccggcgagacctgactaatcgactgattatggtaaaggggaccaacaaatggagctgcatgatgtgtggagtgctatgtattgtttagaacttttgggatagtacaagattacgtacgtttcgtaccttgaagatgtcaaaatattatacttctgaagaaaaaaaaaaggagtcatcgtcaaatttcaacagtaaagcttgtagagtcggccaaggacagtgaaaccgacccctagagagggagtagtaaagtcttcctatatgaaaaaaaaaaggaaggaaagggtgtagtattgactgtactaacttgaatgaagcaaataataccatggctgggaagtctatttgtaacaagtcccggatgacttactggtggggacaatgtgtgattgatcgctgcttttaacacactgttggtcacataagggcattagcagtgcatccggcttgtttcgtgtgaccatgtgctcgacatagacaaaaaagtgaatgaagccacacataacaaattttaatctcccacagtacgccgggctccctctcccctccccaggtcattcccctaacctccccaagccgacatgtctcctcccctttcccaccaccactggcacaactccacttctcccgaccgtcggtgcagctctccctcctctccgtcgctccccctccctgtcggcgcctctcaatcgtggacgccgcttgagcccagctcgacggcttgcggcggatgctgcctccgacctctccctccgtcgtttcctcctcgtttccggcctctccctccaccgagctctctagatccggcccgtgactcaccgaatctggacacgataagcagcaatgggccggcggctcgatgacgatgctggcgacggctccatggtaggcctacggcggcctctcccttcttccctccggcaccggcgcgacgtccctctccgttgctgtaacgtcgcacctctcccaggctgggcccacttacatctggcagcttttccagatccggcccgtggcttctcccttcttccctccggcaccggcgcgacatccctctccgttgctgtaacgtcccacccctcccaagtcaggcccacttacatctggcagcttttcttggatatagattgccctcacagaccaacacaagtcttttctgcacactttatccttacttgtgcacctgaaaagaatttcctggtcggtcacccatcccaaaattccaagcacgcttaaccacagagttctttggagatcggcttccagaaaagaagttgcaaacttgttgttatgagtattctattaatctatcaagccttgggccaggatgtcacagttgcgaatcggagagactggccgacgagctcggcggcgcggagaggagaatgacgagcagggccggcgacgaggttccctctccggtgctgtagcagctctctccggcgtcgcacggggccacgaagcgcgaggccatgacccccacagagcggccgtgccgttcttccctgcgtcgcacgacagcttttctaacgaagaacgagtgcccaatgtgggctacgtgaaccttgttcggtcacgctccaagctgagttggcggagaatctcgggttagccgaacgccacgcacgcgcattgtgaatgccctaatgacaaatacaacatatggtgccctcccctttctcttctgttgggaaggaaaacaaagagagcgtaaatgtcacgccccgaacaagtcccgagcggaactagcccgtgacgctccaaattaacctgttaatcgataccagtcccaggaaacagtgctggtatcacaggaagacagaatatcacagcaacaaaggtctctttattatagagtaggagtacagtcatgttgggctgcggacagatcccgagctcacaactgcattacaaaagggaagcggaagccaagacttatgggaaataagtgtttaatgcaggcttcaaggaaaggctgttgttttttttttgcaattgattttatttgaactcttttctaaaacaactaggtgagtgcttctcaaacgacacggatgagacagtgcgactcatccggtcggagtatgtgcaatgtatcagtcttttgaattgatcaagattggcacccagccaacagctttcaaacggccacccgggcctggctgatcccatcagccgcagattttccaaacatcaatcccgaaccacatcagcaaatttcacaaagcagtagtcaaacaaaactacgctaggaatcacctcacatccgcccatgaccgtgggcacggctgttcgaacagtttaataacctctgcagagggggtacactttacccacacgacattactaacccggatcatccagcccgtgcagaacggccacgactagagaccttaaggctttcatgacaaggcatttcgagagccgacacaggttcaccatatgctgacgagaggggtcccagaccaacaacaggttaggtcccagaccatactgtgccaggaagcccaggggtcctccccgacaccaccccggcgaatccacttgtctctcagcatcaaggctcccctgtttagctaattactcagccagggatgtcccattccacccatgtggtcgtacttgtcttatgttcggatgaaattccaaggaaacggtccttaagtgcaaaagcgggaaaccgtacacccgatacgttccccggtccgcgattttggaaattcatttaggttcgcaagcaccgacccaggtgtcgggttttccaagtcttttgtaaaacccaagttttacccaagatgtttctcaaattttaagtttgaaggcgaccgtcgatactcgtgcagagtgcacgattaccgaggcgcaactaggtggttacaagggaacatggtataacaattacaatggaagggtcaaatgcaacaagttaggtaggtccgccaatctgccttgcagacgggacaagtagattaagtgcgatcctagcaatgcataatatttttcaagcaacataattaagttcaaatataggctcaagatgttcaaaggtggcttgccttgctcgatatcttgagcttgatcctcgaaatcctcgcactgcgggtcttcgggctccgaaactacacgcgaaacgggacaactcagcaaacggcgaaaataaagccctattattgacctctaagcgtgccattagatagatctcgagatttgagaaattttagaagttgaacggagtcaaacggacttacggttgggaagatattgaatttctaagattattggatttttggtctaaaggaaaaggatttatttaaatcctttttgaaaaagaaaagaaaagaaaagaagaagggaggggaattagactttcctcgggcggctagggcgcgacccgagagaaggggtggctcggccgagcttaatgggccggccgggccaagaaggcggcccaaggcgcgcgcgcgggcggggaggggagagagagagccggtgggccaggtccatcccgcgtgggcccaggtgggacccgcttgtcggcgactcggctcaccgtgagcgaggtgcacgcggggcgtgctagggtttggggagggaggcgcggcgcatgcgtgcggttcgcggaggacccggtgcggcggagcgaaccatggcgatacaggcgaaggcgagtacaccgggacgttgcacaggacgaggggagacgagccaacgactcatattcaccgagggtgctcgacggcggcggattgcggtggcggcaatcggcggcgggagaagggaaaaacggcgatgaggtcacgaggggccgattcccggcggtgagagcatccacacggctacgggaatccaccccttacgccggattaggaggaatcgcatcgagggaggccggcaacgagaggcgcttcctagctcgggcggggacgggggcgagcacacagcgagcgacggcagcagtcggggcggcgccggctagctacggggaggctatacatgctactaccgaaaactaaggggaagagatggattgaggagggagaacggggagatgcactaccgtgcggacggggcgcagcgacgatgggccgacggcacgggagcgatctctccggcctcgggccggggaagaggaaggagagggtgcgtccggagtccccttccgcgtcctaacgtgcaccgactccttcggcacacgtgacggtggcggtcggcgatcggcgatcggcgagacagaggggacgacaatggcgcgggcgaaaaacggggaagattgggaggggaaaaggaagggagggcgcctgggtttatagggcggcgatgttggtttggaaaccgacctaggacggtcaagggagggagctagcgctcgacggtcgcggccaaagcggcgacagggaggggaggatgacgccggcgggagggaaaagggaaaaagggggagagaaattgggcttgcctccttgccactttggggaaaaggaggagggagagggagcgatgcagcagaggggggcggggctcagcctccgtcccttggaagccagcgcgcggcggtggcggggccgggtcgatgacgacggcgatgacggcggaccggtttggagtggagcggcaacacgggcgacagacgcggggcaggcgcggcaggcgttgacggcggcggcgactggccggtcggccaccacggcgcgcgcgcacgcgcgggcggcgcggcgatttgggcggcatcggcgggaatggcagcgagagcgggagggagggctctgcgcggctcacggaaaagcggggagagagagggattcggcccatcgaacccgagggaggtaaaatagacttttgcggagggatttgatttgggaaggatttggattcgggattgaactcgacaatagattggggatttgaggtctgagatggcacggacactagacaacaagcaaagaaacagatttcgcaactagggtttttaagagatagttttcccgctaagcgccacgacggaacgggtgctacagtaaaattcctttcttttatgggaaataacaagataggctcctactgtggtaatatgttaaaaagggaaagatatatacaaagaaaaagaaagaaagagtcaggggttgaacatttagaccggcgatgagcgctcattcgcatgtgctaccactgtgcaagtgttgtttttgtattagttacatgaaagttatatatggattatattatagttgcatgcaagcttatgttataaggctgtattcggtgggaagggctagaaacccttcctacgggcacgttaaaccaagcagtagattaatgcgtgcttaattaagtattattttgtcggtgacatgggaccgggagtatcatgactagaggcttgggcagccgcgatcacccacgtggcctgaccccctcgggggggggggggtcgggcccgagggtgatgtggccacacctccctttgtctccccgaggggtcggactgctcccgtttcgaccccgagggccggggcgccccgaccccctgtgggtttgccgccacgtatatgggttaggtgagcacagcggggctcacctaaccgcatttattgcgggttggacgagcgcgtcacgccgcatgtaatgcagcgcagcgcgctcgcttatccggtccgtgaccgggcgcagcgtgtgaccggtcacagaccggtcagatcgcaggttaggtggtggcaggtggcctgttacacgcctcgccccgtcccgtcggattgatgagagcctccaggcacttgtccctagccggagacggcgtgccagctcctgaagatggcacgtcggtcccggtcagatatatgccaggcttcatcccaaccattgcaaggaagtcattgtatgaagaagggcagacatgcagcttgctaaactgacgcgtggtggacgagagtgaccggtctgtgactggtctgacgcctgtcatgtcatcggcaaacaaccgtgcttccacgttgcacctgcttccgacggagtggaggttggtatgacccatcccatcggagggtcattcaaacagcagccattgcaaatctccgcccattaatgagggaggacagggctatcccggtgtcagataaaagtacgagccaaatcttgctcaaagtaggatgggtccccacccaaaagaagggtaggtagaaatggtatatgtggtatccccttgagatataaaaggaggaccatgcctaccaagaaaaagggagaaaaaaaaggagagaggggagctcgtagaaaggacgaggggaaaaatagtagggagagggtctctagagttcaaaggctcttgctcttcagctctttgtaactccttcagagacagatccgccagaacacaggagtagggtattacgcttctcagcggcccgaacctgtctacatcgcccgtgtcttgtgcgtttgctctctcgcgaaccattccacagatcaagggcttagaacctcacttagcgcccccggccgaactggcaaaggggggcccgcgcggtctcccggtgaggagccccacgctccgtcatctggcgcgccaggtagggggcgcgtgtgtttttctaagctctcatcctctttcgtgtgcgccaagcttttcccgttcagcccaatggccgaacgagcaaaagcgcacaacctctctccgagcgctagcggtgacgacagcgagcagaacccgcgtcgtcgagcttgtactccgccgcccccctctcgccgaagtcttaggcgggaggaggcgctcgagggggtcgaaagatccgcgacttcgccgcccatgagtgatggagaaggacggcgagacggggagcgtcgtctcctcgtctacggtgatggcagcacgccccagggcgcgctccaggctgcgggcgcgctcctgcgtcacccgcccgtcgtccctgatcaagagactccaactcgacgttggctagatgacgtggccaacttggtcatgacggcgcagcagcgtttaggcgccggcgggcggtcctccgccaccaaggccactggcgctgctactgccggctccgtgtcgtcgaggcggagggcgcggcgagcggcggccgttgcccgccgttcgtccgccattccctcgtcaatgcctccgacccaagaagatgtgcgtgaggggccggatgcccgcctcaatatcgagcgccggcgcaatgatcgccgtgctgcccacgcatcggagggcgcttcctcgtccggagcgccacttcggtccgggcacggaggccagccccccgtgtccccggttggcggtgccggctgtcgagactttgtggcgagccttcagaacgtccgttggcccccaaggttccggcccaccatcaccgaaaaatacgacggaagcgtcaaccccgccgagtttctccagatctacacgactgggatcgaggccgccgggggtgacgacagggtcatggcgaatttcttccccatggccctgagaggacaggcgcggggttggctaatgaacttgccacccgcgtcggtccactcttgggaggatttgtgccagcagttcaccatgaacttccagggcacatatccgcgcccaggtgaagaagcggacttgcacgcggtacagcgaggggacgatgagtctcttcgctcgtatattcagcggttttgtcaagtccgcaacaccataccatgtatccctgcacacgcggtgatctacgcgttcagggggggcgtgcggcacaaccgcatgctcgagaagatcgcctccaaggagccccagaccactgcggagctttttcagctcgcagaccgtgtggctcgcaaggaggaggcatggacctggaactccaccggttccggtgtggcagcttcagccgcccccggatctgccgctcggtcagggcggcgggacaggaggaggaagaagaggtcggcccattccgacgacgagggtcacgtcctcgccgtcgagggcgcttcgcgggccacccgaaaggggaggcctgcgagcgacaaaaagaaggaggccggcgctcccagcagggagcgcccgaccggcaagtggtgcaccgtgcacaacacctccctccacgacctcgcggactgccgcgcggtcaaaagtttggctgagcggacgaggaagtgggaggaggagaggaggcaggagcgccgtgagggcaaggccccagcggctccctctggcaaccggcgaagtgaggccaagcagaaggtccccgccgaggacattgacgatggcaacgatgacctagggttccaggagcctggggccaccatcgccaccgtcgatggggagcatgcgctcacgtttctcgccggagcctcaaggccatgaagcgagagcttctggccgcggcccctacccatgaggcgatgcggcgtgcgtggtggtcggaggttgccctcaccttcgaccagaccgaccacccgccgtgcgttgcccggggaggacagatcgcgatggtggtttcccccaccgtttgcaacgtgaagttggggcgtgtccttatagacgggagagcagccctcaacatcctttcccccacagcctttgacgccatcaaggccccggggatggtgctccggccgtcccagccgattatcggtgtgacgccggggcacacttggccgctaggtcatatcgacctcccggtcaccttcggtggatccgccaacttccgcacggagcgggtgaacttcgatgtggcggacctcagtctgccctacaacgcggtcctggggaggcccgcgttggtgaagttcatggcggcggtccactacgcctacctccagatgaagatgccgggccccggtggccccatctctgtccatggcgacctcaaagtcgcgcttgcttgtatggagcagcgcgcggaccacctcgccgccgcgtccaagcccgagggtggcgacgagaggctcggcacctccgtccccgccgccccgaggcagcggatgatcacgtgcgacgaggtcccggtcaaggaggttgccctgggcgacggcccgtccaagaccacacgaatcggtggtctgctggacggcaaataggaagacgcgctcgtctccttcctgcgggcaaacgctgacgtcttcgcatggagaccggcggacatgcccggggtccccagggaggtgattgagcaccgtctcgccgtacggccgggcgcaaggccggtccgtcagaaagtgcggtggcaggcctcggaacgtcaagccttcatccgcgaggaggtggcgcgacttctggaggccggattcatccgagaggttatccatccggagtggttggcgaacccggtcgtcgttcccaaggcgaatggcaaggttcgaatgtgcatcgactacaccgaccttaacaaggcatgtcctaaggacccttaccccctaccacgcatagatcagattgtcgactccaccgcggggtgcgaccttttgtgttttctagatgcatactctggttatcatcagatttgcatggctagggaggatgaggaaaaaactgcattcattacccccataggaacttattgttatacgacaatgcctttcgggttaaagaatgcaggtcctacttttcaacgtactactcgaatttctttgggtagccaaataggacgtaatgttgaggcctatgttgatgacttggttgtgaaaacacgcaaccaagagaccttactctcggatctagcggaaactttcgaaagtctccgcaccgcccgcataaagctgaaccccgacaagtgcgtgttcggtgtgcctgcgggcaagcttctcgggttcttggtctctgcccgaggcattgaggccaaccccgagaaggtacgagctatagagcggatgcgcccccccagcaagcttagggatgtgcaatgtgtcactggctgtatggccgccctaagtcgattcatatcgaggctgggagagaaagcgctacccctatttaagctcctcaaacgctccgggccgtttatctggacggaggaggctgaacgggccctcactcagttgaaggcgtacctcagttctcccccagtcctggtcgccccggagccagatgagccgttgctactttacctggcggcaaccccgcaggtggtcagcgcggcgttggtcgtggagcgtgacgaggacgaccctcgctccgcgcatccccaccctgtgtcgactcgacccgggagagagcagggaggagaggcccccgagccgaacggtggcccaaggcccccgacggccggagctggccctccgcccgcttgtccgaaggtgccaggcgcccccgacccccgggatggccacggggccactgcgggaaggccgcgcctgtcgccttctgaccccgaggtcgtcagcacagaagccgagtgcgccccgcgcggcctctcggagcgtgacgaggacgaccctcgctccgcgcatccccaccctgtgtcgactcgacccgggagagagcagggaggagaggcccccgagccgaacggtggcccaaggcccccgacgaccggagctggccctccgcccgcttgtccgacggtgccaggcgcccccgacccccaggatggccccggggccactgcgggaaggccgcgcctgtcgccctccgaccccgaggtcgtcggcacagaagccgagtgcgccccgcgaggcctctcggacgaagagcgccctggagatgcggcccctagtgaagaagatcggccccgccgaaaggtgcagcggcccgtctacttcgttagcgaggccctccgggacgctaagacccgataccctcaggcccagaagatgctttacgctattctgatggcttcgaggaagttgcgccattattttcaggcgcatcgggtcacggtggttacgtcttaccccctcggccaaatcttgtataaccgagagggtactggacgggtggtgaaatgggcaatcgaactctctgagttcgatttgcgctttgaaccacgccacgcagtcaagagccaggccctcgccgactttgtggcagagtggaccccggccgctgagcccatctccgtccccgaggccagctcgggcccctcgcagctgcctcacaccgcctattgggtgatgcagttcgacggctccctgtctcttcagggcgccggtgcgggggtcacgttgacctcgccgagcggagatgtcctcaaatacctggtccgcctcgactttcgggcaaccaacaatatggcagagtacgagggactccttgcgggactcagagtggcggctggactggggatccgccgcctcctggtgttaggcgactctcagttggtcgttaaccaggtctccaaggagtaccagtgctctgacccgcagatggatgcttacgtgcgccgtgtgcggcgtatggagcgccattttgacgggatagagcttcggcacgtgcccagacgggataacacggtcgccgacgaactctcaaggctcgcctcctcgcgagcccagaccccaccgggcgcctttgaagaaaggcttgcccagccgtcggcgcgacccgacctcctaggggagacggacgcgcctgaacggcccccgaggcccgtcggagtccaggcctcgggacccgaggggagcgatcccagctcccttagattgattgcttggatcgctgagatccaggcgtacctcgcagataagactctacccgaggaccgcgaagggagtgaacgcgtccagcgcatctccaagcgctacgtactggtggaagggaccctctatcggcgcgcggctaacggagtcctcctaaagtgcattcctcgggaacaaggcgtcgagcttcttgccgatatccatgaaggcgagtgcggagcccactctgcctcacgcaccttggttggcaaggcctttcgccagggtttctattggccgacggctctcaacgatgcggtcgacctggtccggcggtgcagggcgtgccagttccacgccaagcaaacccatcagccggcccaggccctacagacaatacctctttcatggccgtttgctgtccgggggctcgatatcctgggtccgtttagatgggccccgggcgggttcgagtatctgtatgtcgctatcgacaagttcactaagtggcccgaggcttatccggtcatcaagatcgataagcactccgcacttaaattcatcaagggcatcacagcccggtttggggtgcctaaccgtattattacggataacggcacccaattcactagtgaactcttcggtgactactgcgaagacatgggcatcaagctctgcttcgcctcccctgcccaccccagaagcaatggccaagtggagcgcgccaacgcggaaatcctcaagggcctcaaaaccaagaccttcaacatcctcaagaagcacggcgactcgtggatcgaggagttgccagcggtgctctaggcgaaccgaaccacgccaagccgagcaaccggggaaacgcctttcttcctcgtctacggcgcggaggcggttctcccatccgagctcaccctgaggtcccctcgggccaccatgtactgcgaggctgatcaagatcatcttcgcagagatgacctcgactacttggaagagcgaaggcggcgtgcggccctccgagccgcgcgctaccagcagagcctgcggcgctaccatcagcgccacgtccgggcccgatcactctgcgttgacgacctcgtcctacgccgcgtccaaacgcgtgctggactgagcaagctctcaccaatgtgggagggtccgtatcgagtgatcggcgtcccccggccgggctccgttcggctggccacgggcgacggcacagagctgcctaacccgtggaacatcaaacaccttcgtcgtttctacccctagtaggggtcgggtgtcaggtctcgggctcgggccaaccccgcaccccccctgggcgtgcagggttggccgggggctaccacatgcatatacttatcttttttctcttccgtatttcaataaaagcattttcgatttcctaaggactgtgtctgtgccattgtttcctttcaaagagtcttggcttgaattagcatgctcgtgctcgaccctgccctcggtgtcccgggccggcggaaatcgccaaacagggcccagaatcgagccgtgccccggggcgtggtgaactccgggggggaatcggcaaaggcccacaatcgggtcatccataaccctcggtcaccacgttcccggcctggccagtctcgacacgtggatctccccaggcactagccccgacccgcgccatttgaggctgggacctgggcacgagccctcgttcaaaccaagacatagaaggaccacggcacagaccatcctcgtctcatacacacaacaaacagagctgacacaaaaatttcctctttatttgattgcagattaaattagtttgtacaagaagggggcccgaatgcctcggaagaagaaaggaaaaactatttaagattggcgggggcctgggggctcacttcgaggctcccgggtcgccggcctcgtcgtcgctgtcgtccacaccaccgtcgccgccctccacgtcggagtcgagggcgaacgcgagccgaggggccgtaccctcgaagctgtggacgatgtgatcggcggcgtcccggacctgcgcgcgcgcgtcgtcctcggttccgggagggaactcgtccagcgccgcccacggggagaagtccgggtccctggcctggtagcttgccagtacaagctccactgccccccgggcgaggtctctcgaggatgacttgatcgtctcctcgagctcctcgaggagccgctggagagtcccggccatctctgagaggcgctgggcgaggaccccatggttggcggcatatttcgcgatccgcccgccccagaggcccgcctgccgcccagcgcggtctagacgggagacggcgtcccgaagcatgccgggccctacctcgcctgccaagcggagggcctcgacctccccggcggacgagtccagcgcgccctgcagctcggcgatggtgtgttcggcagctgcgaggcgggcggctagatcgccgtcgcccgtggccgccccgccgctacgcgccctcgcatccagctcccttgcccgtgcctcgagctcagcggcccgctgatccagtgcggccctctcggcgcgggcaccttccagattgcgacacgtttgtttctccagcgctgcctcacgaagggacaggctgtccgccagcctttgcgccgcggcctcggcctcctcgagagctcgctcccgctcggtgagcgcatcctcgcggaggcggagtgcggactcctcttcagcacaggcggcttcgtgcgccgccagtgtagcctcccggatggcaacggcggcctcgcggtccgccaggtccctctccttcacacaggcgcgctcttccagcgccgtggcacgggcctcaagggcttcttcgcgccaccgggacgccgcctcggtctccgccgcccgccgtttccgggcagcagcggcttcaaggaccccccgggcggcgtcgagcttctttcctagctccggcgcccagctcccgtattgaaggcggaggtcgtcctgcgcctcgttcatcactgcggtggcgatgagggaagcctcccgctcctcctccacctccctggcgatctccgccagctccttccgacgggcctcgagctccgaggtgtgccggcggtgtgccttgcggcccgcctccaccatggcctccaccgagcgtcgcccctcttcgacacgtgcccatgcagcgtcgagctccgcccgctctgcctgcaggacctccatctgggcacttaacccgtccaacactgtcgtgttcgcggcggccaaggcctgcagaagggcctctgcgctcagtggggcagcggaaggcatgggggagagccgcctcggtgaggatgccgcacggctcggcccgccgatcgacgtaccggactcagggacgacccccggacctggcttgtcctgagcgtcgcccgaggggtcgggcccgagcggtgcgcccgcggcctcgtcgtgggtggcctcggaagtcgtcgtcgcctcgggcggagtcgggtcgggggcttggcaggccgcctggcgtgcgcgcgccgcctccgcctcccgggcggactcctcggcccggcggagtctggcctcctcccgagcggcttcctcagcccggcgagcccggacggcctcctgggcagcctcctcggcttcccgaaggcgatccgcggcttctcgccggtcagtttcccgtctccgggcctccgcggtcgccgtatcctcggcctcagaccggccggacttggaatggcgggaggggcgcgacgggatctcgctgaagcagaagaaaaaccagaagacaaacaaaacgggtgagtgaaaacttgcattgggagaatgaatacagccacagtgggcgcaggacgaacctgcgaggaggtcggttgaacgaccaccttgggggggagataaggtttccccggtatgattcggtcccccccatcttgcagagccgtttcttcttccgctccccctcgggctgcggcgtcggcgcggccccctccgggcgcctgctgctgacacgcgccgccccgccccctcggggaggagatggggagggggtaccctcttgcttcctcttccctcgggcgtcggcagggcggctgccccccgggcccctgtcacggggcccagaagcacgaccccctcctggggtagattgttctcccctgcggctcccgcccgcgccatcgtggcctcgaggagcccgctcctccgacgccccgaccgccatcatgatggtcaggatgttggcacgatctggatcgctgcagagggggaggactccttgggggatgagggacgcctccacggagctgagattcagcacccgttggaccactatcttgaagtcctcaggggcctagtcccatctgaccccttggtgggtcctcatgtagtcttcggacccggtgtactcccaggcgccccgggcgcgccgctggagcggcgcaatccggcgacgaaggtagtcgccgtacagcatggcccccgtgagcccctgggatcgcagacccgccagacggtcaagaacggcgtcgtagccatctcccagatctagcggcgcccgccaactggaggcctgcgctgggggctggctccgaagttgaaggcgcgcttcgtcggcgaggggggtgtagaaccagtcactcttccagtcgtcccacttcttgcggaggacgcagggaatgtagcggctcagcgccggcccccgcggctggaagtagcagccaccaactaccgacggcggcgacactggctgtacggtgaagaaccaccgaaactgccgaagagatgggcgcaccccgataaacatctcgcacaggtgcgcgaagatggccaacgtcattatcgcgttgggggtaaggtgcgccatctggaggtcataaaactccagaacatccatgaagaaagaagagaatggcgggaccagccctgccattgcgaaagggaggaagaagacggaccgccccgggtagtgtggtaccgggcgtccctcgcctagctcgaccacctcccggccggtggcagatgccggcatgaatcggcgcggcagcccggcctgcctctcgctcacgatgcgggaagacggcagcacgctaccgtcgagtggtgcggagccccgtgccatgacgccggcggaggaggagcttgaaaacgagtgagtgcggcgagggtagggcacaggaaacaaggagttagggcgcaagcggcgaaggcaaggggaataatgacgagaggaaggaagcgaatctcttcctcggcgtctttatacccttgccaacgctatgcccggctcctcgcttcccgcgcccactatctcgccccctcgtttctcgcgcccacgtctccactaattccgctcgcccgtttgcggcgcacgaggcggatgtgcggctgtggcagttgagatgggacatatcgtgcgcgcgttaactacgctcgccgaccgaagcgccatcatcatatctccaggcaaaacgaaccggctcgtcccgattcgcgtgctactcgagtaatgtagcggtcttgaagagaccgctcattatagacagtcggttttccgttgctgatgtgcgcgatttgcgaccgctgggtttctgcccgcctgtagagaccggccccacctgtcaccaggcctaaggagtggcgtcacgcccgagcgcttccttcgaggggggcgatcgccctggcataacgccgggggctactgtcggtgacatgggaccgggagtatcatgactagaggcttgggcagccgcgatcacccacgtggcctgacccctcggggggggggggt

SEQ ID NO: 5473 - DNA, 14894 bp, Oryza sativa
ttcctttctctgatgatcgcgacgattgccacagtgaccctatcggtttgaccaccgcaaggaatttcgctgcgcggcacgcctgcagcaaaagatggtggatggccgaaacggggacgaaaggcgacacggacaggtgagatcaatgtgcgtgtgaacccacgcctcaatcacacgcccggatgcccggaatcccgtggtaattaagctcgattaattaataacaatactaacagtagactactactcgtagtacttggggtaagtactatgggcatccaagcacaaaccccaaaatgccacataggactaaatagtgaggtggaggagagaataaggaagagagagaaatagtcaactctcatgcaagaggcaacctctatacaaacttcaataaacatatgagagtgttagagatattggggattgtgtggtagagataacctattatacgtatcacctcttaatttaattatctatgtcatgcatgaaattggatgtggtagtcatctctactataaaacttgcccttattacgttctccctccgtaaaaaaaagacaaaccctgaattttcgtgtccaacgtttgactgtccgtcttatataaaattttttataattagtattttcattgttgttagatgataaaacataattaatattttatacgtgacttatctttttaatttttttataatttttttaaataagacggacgatcaacgaacgttggatacataaacctaatatttgttttttttttatggagggagtaacggctatcagcctatcagcaaaagaaactactggaaggcaatatatacacggcagatgcacggatctgattagccggccgggtagtacgtgatttgaccgtatttctggcctcttcggccccaccccgctctcgcgctagcagcctgccgcctgccggctgcgtggctggctgggctggctcgacggtgacatcacgacgcgggcgtcacgctgcgccgctgtgggcaacgtcacccgtgtgggcgtcgccccgagttccccacttgccgccgtgcttcgtcaggcagcgctatagctgccgatggcgaagtccgcggatcgtaccgcgcccaagtgagcagaggaggcgaggcttcccgggccacgtgaagttgacggatgagaaggcgatgtacgttcctccgcttccgattccgcgcgcgcgcgcgcgctcgtgcaaagcattgggcatactgggcggcccggtgcttgactgaaatcgacgtactgtacgtcttttttggtactgtacgtgcggtgcttggctggctgcaaggcgatgtgtgcggtgcggccttggccgggcgtcctttctctttacggtaaagacggggagacgttggctgtgtttagtttctaaaaaaaagttgaaagtttaaaaaaaagttaattttttttaaaaagtttaaagtttatgtgtgtagaaaaattttagatgtgatggaaagttgaaagtttagggtagttgggggtgaactaaacacggccgctattgctacaaccacctccatcagctcgaggatgtgaaaacacacctgaataattgcatatgagcgatgatggtaaatgcgtatgctactacatggtggatgcatggatgtcaaaaaacgggggcgttttttgttctatgtgtttttggaaggccgaaagggtagatatgaatgctctgcggaaaaatgtacgggaagcaatatgatccgtcgccgcggcggccagccggccggcaagtcatccatcggctcatcgtcagacagtgatgagtgatggactgcgaggacggatggcacatcgccgtcgaacaactctacatcctgcgccgtggcgtttcttccatttgtgcttgggctttgatcttgaacggcgcgggtcatacttcataccataccatgccgcaatggtcgccacgacaccgagaaaactgggccggcgcggagccgtcatatgtgtgcatgtgtggacgtcattcggactttctgagtttgtcctttggcttatcagtcagccatcaattgctacctccttacttatatatttttatatcaaacgtttgatcgtttgttttatttaaaaaatatttttttaaaaaaaatagtcacacataaatttttatttatgttttatttttatgttttattatcgaataacaataaaaatactaataataatttttttcaaataaaacgaacgatcaaatgctgaatataagtagtacaaaattagtatagttatttagcttacccgagccaagtcaaccaactgacccaaccaagccaattcattgttgtcaatgatagagcgtacacatccttagggtacccacaatggttatctataggctctctataagagatccatgtcagcatattttcctacttggaagagattaaatgaagagagagagagagagagtaaagctatctactaacctggagatagtctatagagaaaaaacgagacaatgtattagagagctatagatacccatatagacatactattgagatggtttactattaatttagtctattgttgagatgtacatgttttatagatagcaccttactttaccattgcgggtgctcttatttctgaaggcaatggaaacaagctagaaaccccaagggaaacaactaaataaattttaggataacttaactagttagatttcttatggtgcaatctaatctacttaaatttaagttttagacttaatacatatgctcatatttagaataattattctttcagcagtagacgacatacctgttgagagtaggacgtatcttgatttcgttagtctcaaaatatgcatgtccagttttcgaaggtactcatcgtgatagggtgaaagtgagagcacgcacatatataaacacctgatgtctgtagtgacttcgctatctcaaaatatatatgctggcctactttattgaggtgcatatagggattaggtgtgagcgtgtatgcattaataacagtggcagagtgcgcgcgtgtaaatgaggacttgtgtttttacggtattgaaaaaaaaacctcttgttagggttgtgtaactaaagaacagaaggtgattttctcaatgccaacctctatatatacagaggtgaactctagaaagggaagagactctctctctttttttttcccacgttggttggttcaaccattttcccttagcttaagggtacacgtacctacttgttatttatgcaacaacaattggcaccgtctgtgggaaagatgtcaagaaatgttaggtatagatcagcgaagctcaaaggttgttatgttggacgaatgccgaaatgttcgacgaagcttaaaatatgacaaaaaccgatcgatatgatcgacaaagccgaaaatttccgacaaagaccggtataagatcgatgaagaccacatatggcctcgaaaacctattctctaaggcttcctccaatggtgccatgtaagctatctcataacatgtccacgtcatcatgtatcctatgtggaggaaagagaaggcaaaaaatcaatccatctatctcctattcccacgcctatctcgctcagttaccgatgccgtatgagcctgcgcaagagacaacagtcgactcttccacgccaaaatcagatcccgtgctcccttcccccaaattgccccgccgcaccttccgaccacccccgtacgctgcaccccgttcaagcccaatcccgcgcgctgcaattcgctcccccaccccctggcgcgccaatttgctctcctccgcgcaaatcctccagccacccgcgcgccaatctttcccttgcaccctccctcttttcttctccagtgtgtgaaatctttctcgtcggcgtcgacgtatccgtttccacgagcccaacgacgaatccactcctcttgccaacgacgacgagctgtagagcaggatgagctgccggtccaaacgacaagtagctccgcggccgccgccgtcgtggtcgccgccgccgccgccgtcgggatctgcgactgcctctaggtgcttcgatgctgcctcgtctgccttctttcaggccagtactgcaatggctcctcctctaggaggccaaccacgtactgtaccgtacactcaaacctgatggggattgtagtggctctgccttgcttgcttcctggatgttggagtagaacaataagctgatgatgctctcaactcctttgaccttgcatcctcagattggtaagaaaccaatttgcttgtgtgttgtttgtgcaacaaacaagcaaattcctttttgttgagactatttaaattgtagaattaataatggttatcacacataggagacaggggtgtctgtctcgctcaaaacatgatttttggctcctgatatttcagtggtatggatatacatccacctggtggtttcctaagcatgttacaaactggccaacagccattagtcccacctcatgttttgttcccagcaacatggccacctatgccacctatggcaccagcaactaattcaggcactacgcatgctagatcaaggtcaaaagccaaacctgtcatcaacttagatgatggtgacaatgttaggactgctaagcgtcttacatgggcatcagatgaggacttgcggttggtgagtaaaattttagacaacttgcagggatttgtaccatcattctaaaactttactaatacataatgctaaatgtaggtgagtgcatggctgtaccactctaatgatccgatcaatggaaatggcaagaagaatgagagctaccggggagatgtagttgaattatacaacaacactacacctattaacccggaaaagggaagtaaagcatctcaaagatcaatggcaaaggattaagagatgggtgggatttttctgcgcctcctggaagaaggctgcattagtttatactagtggatattcagatgatcagttgagagactttgctaatcagttttatgtgaatgactatcctaacgaaggtccattcacagttttgcactattggaaggttcttcatgatgaacccaagtggcatgctgttttggaggagcttgaaaagccacacaagcggagcttggatgatggaagtgacacactatcacaaaaagatatcggagaaaaggagcgtccaatggggaggaatgaagctaagaaacaacgcaatggcaaaggcaaaggtaaaggcaaggatgatgatgacagtttacatgaagatatgaagaagtacatggatgttcaagctgcagctagcaaacgacatgaagagtttttagggactcagcaccgtatttcagatgcaaaagttgaagtagcaaggcttaggagagaggctgtcttgacggaatcatatcaaaaattgatgagcatggacactagtcaaatgactaatgagatgaaagctgagcacgtgatgggtctcaagatgttgagggagaaacttcttggcgatataatataaggtattttctgtcaatcaccatgcactttatttttagtcaatgttcaacaaatgaccatgtattgtaatatgtattcttagtcaatgtaccacaaataaccatgcattgtaatctgtattattagtcaatgtaccacaaataaccatgcattgtaatatgtattcttaatcaatgtaccacaaataaccatacattgtaatctgtattcttagttaatgcaccacaaataaccataaattataatttgtattcttagtcaatataccacaaattaatctgtaccatgtgactatatattgctctgttatattcagcctagcaaaacaatccagcactgtcctcctctgttccttctatccagtactattcttcctattctattctgcctcatttgttccttccatctagtccaacactgcctcatctgttccttccatccagtaaaacatgtcggatgagtttgacaattccatagacccagccgagatttacactacagatatgttcatggcagagcatagtgtccttaactcttttgccgggcggatcgacaaaaggattaaggccagattggaaggaggtacatctaggcgtacaagtggtccaaggaagtacatcaataggaaccatgaaggagcccatgatcaactatttgctgattattttgctgaagatcctctctactctgctgcaacatttcgtagaaggttccggatgagaaggcatgtgttcctacacattgtggatgaactaggcaagtggtcttcctattttacacatagagtagattgtactggacgccttgggcactcaccattgcagaagtgcactgcagcgatccgtatgcttgcatatgggactgctgctgacgctcttgatgagtacttgaaggttccccagagtactgctctagagtgcttagaaaattttgtggaaggtgtcgtcgaggtatttagtagtaggtacctgcgtcgccccacggctgaggatctcgagcgtttgctccaagttggagagtctcgtggattccctgggatgttgggaagcattgactgcatgcactggcgatggaaaaattgcccaaacgcatggaagggacaatatacccgaggtgaccaaaagtatccaactattatccttgaggctatagcttcatatgaccttcatatttggcatgcattctttggtattcctgggtccaacaatgacattaatgtgctcaatcagtcccctctgtttattgaagcaataaaaggtgaagctccccaaatccaatttgctgtcaatgggacataatacaacacgggatattatcttgctgatggaatttatccggaatgggcaacctttgtaaagtctataagatctcctcaactagagaagcacaagctgtttgcaagggaacaagaagggaaacagaaagatattgagtgtgcttttggggtgttgcaagctcgcttcaacatcgtgcatcgtccagcacgatcatggagccaaaaagttcttcgaaaaatcatgcaagcttgtgtaattctccacaacatgatagtggaagacgagggagaaatggcagaagatcctattgacttgaatgctgccccaggaacatcaattgttcttccaccagaagttcatgcagggagtaatgatcacccaagcttcagcgatgtgcggcgaagaaatgcttatatccgagccaaaccaatccatagtcagcttaaaaatgacttaattgagtatatttggcaacggtttcaaactaggcaaaataattagtcactgttatttcagtataatgtaagctctagtgtacaatttcattgtaattttatcttagactgactgtatttatcactttcacttactgtacatgtttttctctctaccggggcgaacagattcgatgtcttttacttgtttttgtggctgcggtccagcttttggtgatcttgttcaaggaatgggataagcacttatggttgctgtccagcttttggtgtttgtcgaactcttctatcacttctgtgacgtgatgcagtcttttttttcccttcagtttgctcttttccgcattgtactaaagtgccatgatatggctatgatgttatctggttgctgtagtggaccgtgagttggaagaattgcacttcattgttatatactctaagtcgatgttgtgctatttatctatattcacactatgctgagatgttcatttttaatcgacagatcttttgaatagcatcacatgaaggaccatagagatattgtgtagtttatcaccatgtcatttactacccatgctgccataaaagcaagaagagataaccttagagacagttgtcacgcccagaaatttagcccaaatttccagactattttgtgtattaaatccctgtccaggaccagccagggtacacaaaacgacaagtaatatacagttccaaacgtaaataaagcgtaaaatacttacagaagaggcacttagtcctcacaccgaaacaaaagcagcagcagcggaaaaaggcgatcctagcgggcttcagctccactccacaggcaaaactcaactgaggtctgagccttggtcttccaacttcgtcttcagctcagaagcactacacttctgaaaagggggaataatagcaaggctgagtacaaccaccgtactcagcaagccacaccaatgatgcagacgtgcaaagggatacaaggacggtttgtggctatttgcataaaggcggttgtaaaacattttattgagcaaaacagtaaaactgttgagtaattaaagtaacattaaatctccactgatcaacgctacaccacgttgaacaggcccaaccaacccacctaaactacagtgtattgggtcgatttattaagtgtgagactaatcacggtgaatctggtcgatcgcccataaccgcgggcacggctattcgaatagttttactctggccagaggtgcacaactgtacccacaagacacaacccaccgacatgtcaccgcgtcatcatgtgcccatgatgcacacgtcaccgtgtcgagtgattgtgacgagacccttcgcataaccctcccctaaccatccacaccacgctaaggtttcacccccacccctcaaaaggcagtgggcggtcccctcttgcgccgcggtgaatccggcagctggacaaccggacaccccggccgacccaactccatcacgcccaccctcgccaccggtgcctaggaaaggggcgagctatacttcagatcaagcagttacccactcccgcttgtggcaagcgctgtaagtcttccagggtttcccgtgaaccggtccttaattgccatgggtgcgactcacaaaaccacgcacccacagcccaccattcagtcgcattttagttggataattacgaccataaaacatggccagatgtctcgagcacgcggctcaacaagatactagaatgtctaatactgcaattatcccatcgactgagctagtggtaattaagcatggctaagcatatagttctagctaggtcacataagtaacacaagctagtcgatttattacccagggttgacaaaggatagataccaagtaaacatggcacaagcgagcagataggtaaaccctgatcccatgtaattagcaaaacatgcatatttatttgtaaacggtaaaacatttataaattgggatcaacatgctcaaggggaatgtgtgacttgccttgcttcttcacttggattttctgaactcttttcctcgcgaccgcggacttccaaaacgacggattctacacgctggcacgcaaaacgaggaaaaactctaataaaaaccaaggaaacagtacataaaaagtaaacaaacatgtagagctcaattttagatgaattttgcaagttgaacggctcaattcggagttcgaatgaattagatatgaattttagaagttttgagccatttaaatgaatttctagaattaaactcgatttattgcgcaattatcatttatttttacaaaggaaatggacctcgctgacgtcatcaagggggaggggcggcgccggcaagcgggccccaccggtcagcggcacatgggcgccggtccaccggggaccgggaccaccgaggctgtccaccgccggtccacgggaaccgacggctcggatcggcacaaagccgatcggacggtcacgaggcggcgcggctggggcacgggcacggcatgagaccggctcggccgacccaaggcgcggcggcggcatgcggccaccggcggcagcagccggcgacgaggaacggcggtgggcggccggaggacagcggcgcgcatggggacggcgacgcaccccaagaggcggaggtcggcaagaaaggggaacgggaaaaaaaggaagggaggagaggtcctcaccgaaagcggcggccggcgcggaggaagatgatggcgacgacgattgcccgatggcggcttgcgaggacggagggcggacggggtcgcccttgaccttcagaaagagatgagggagttagggaggggaggaccgatgcggggtgaccggtaacgacggccgaccgcgacgatgtgagaaggatctaaccgatgaccgaggaaggaggagctccggcggattttcggcgaagaggggcggcggccgaggttctcctcgtccttgcgaagctgagggaggcaatggcgcgggtcggcgtcgaccgaagcggcggcgcgacgcggctggagtcggcagcaagcggcggagagaggttacacggtggggaggtggttccgatggcggttgaaggaaaccgagtggcgaccggcgtgcggcgcgggatggcgaagctggcggtggcggcggctcggcgcggcaacggctgtggcggcgggaaacggcgactggagttcgccggagtgtggcagcgcgtgggtgcggcgtggggagagcgagggagagtatgccgggctcgggaaaaatggggaaacggacgaggggagcacggggatgctttttatgggctcgggaaggcgggatcgaggccggacgtggcggaatcggccggcgaagtggggcgccgacgtggggtggtggaggggttaaccggcgccgattttcgcggggagagtgggggaaatggtggaggacgtggaggggatcgtgcccacgtcgttggatgcgagctcgggtgcgggagggcgccggattttgcggcgacgtgaacggcaatggcggttggggtcggccggcgagaggtaggaggaggagctgacgggtgggaccgccggttccacctgtcggcgaagggagagaaggagggacgcaaaacagacttttgcgagcgggccaagtgagaggggagccggcccgagagagggagaaggcgcgcgggccgcgggagaggaaggaagacttgggccgaaagaggcccaaagagaggagagaggattttaattgttttctttttattttaattgattaaatgaactttgtgactttaaaactatttctcgagctccgaaaattcgcggaaaattccggagagtattttagggcacaaagaatattgcaaaatattcccggccaatgatttttaagggaaaattttaattctcccattatttcacttgattaaattgatttaacttttatttaatttctagaaaatgtattattaattgatttttaaacccgaacgaaaatcggagcgttacaacaattcattagagaaactatctcttgttctatctcttagatgatgtgtacgatttatgagctagcagttgtcttcaaaggacctttgaaggaggcctaacatggggaagactagggagtagtcttgtctagtcagtgacaatccgataatatcaaatgcgtaacaacagcatgccgcatgcgtggctgtctacatccccgggccgccggccgcaccacagcgtttcatctgtgcggtgtttgggcttcgatcttgaatactagcggcataccatgcctcaatggaacgaatcacgctgcctatatgtcccatccaattaaaagttgctatattttaatatggagggagtagaatggaggaagtgtcaagtgtcaaccagcttttcaaactaatcggggtagtcgttttcgttgaggactagcacaaacaactagagtggaaaataacggcgcatgagacaagctattactgggccgttttcgagaaaggctgctgatacttgtgctcaaatcggcccatcaggaatagtgcgtttggccgatgatgattcgacagttcttaaaaataaggaagatgatgtgagactttttttttaaccaataaagatgatgtgagtgagacagttgccagttgccacggatgaagcttgggattgggagtttccgaatttggtatcaataccgagctcacatacgtacgtggcgagggaccacagtgttgatacatacgtgcagtcattgctagtgctaacacaactcgcgatccacgagtcaacacacccatacatgcacgaactcaaccacaatcccatacatgcacgaactcaaccacaatgattaaatttcctagctaattaagccagacagctactgtgacgaccggctgcctgctcgtcctggtacgtacgttcacgtccaaccggtcggcctgatgtcacagtccagtacagatgtcggcctgatggaacgtcctctcgtacaatgcaacacaattgcaaatgtacagtgttgcattgcacgagagttcgttccatgcactggtaattcttaaatttgtaccatatatgcgtacgatcaatcgatcgatcctctcatcgacgacgtcccagcagtctcccatgcactcgtgtcgcgcgtgtaccgcgggcacaccgtgtccgcgatccgcgccgcgacgatgcgctgcacgtcgccgtcgtcaccgatcaacacacggtgatccgctgctgctgccgccccgaacgttgactgatcgtactggccgaaacagtagtccatgtcggcaatctgcgccgccgccgcctcgtccgccacgctctcgtccgcggcgctcgccgagtgtcccgccgcgaacgccacgaacgccgcctctggggccgatgtcggccagatcaacggcggcggagcggctgcggcgcctcctccgctgatgaccgccgcgaggcacgtgacgatggcggcctcctcttcggcggcgctgccgccgccgccgacggcgtggggtaaaagaagacggctaaagaggccggcgccgttcatcgtcaggtccaacatttccgccggcggggaggaggacgactgtcgttgccggctcgtcgtcgtcggcgagctacctgcagtgttgggcgtgccgggaacagcttgcggctgctggcacgtgtgctcgttgaggtaggtgacaaggaacatgggcggctcgccggcgtcccgctgctgcacttgcttcttcgccgcgcaactccgctcgcggctgaacgtgcacttgaagtacaacctgcatgcgttaggtgacacgacgggatgagagtcctctatcataaatgttattatcaggatgtggattttcatctctcgaggaatattacctcgttgtctgcatgtcatctaaatagttatcaaatttttttaaaaaaaatagtaaatatattaatacgaaatatatcactccacaaacatataaaatcaaatttaccctatacatgttgcaacaaaaataacaagttagactaaaatagttattgcacattcgcaactatattttttttatctttggtacaacttataacagttgaatttaaacttgcatgtttgtgaagtgatatattttatcttaatctatgctgctatttttttatattttttatgaccatttaggtgacatgcactaaatgaggggttatcccttcaagggatgaaatcactttttcttattattttacacacatgtgtaatatcattgttacagaggacgtgaaccggcacgacgaagcataggtcaagttaaagaattaattcaagtgatttgttttggcaagtgtatggctaaaacatgccgcctaagtttttgtctagactttgaattatttgatcgaggagtacgtgtgtatgtacgtgtatgacgattgacgacgaaggttaaggttgaccatgttgacggcaaagtcaagtcactggactggacattgatatgctgcatgcatggatgcatttctgtaatattgaacttccagaaagcatgttctgatctgatgctagctatcaactgactcagtctgtagtccaatggactaaaacagctaggttaattactctgaaattgacttggacattgtgtgtgttgcagtgtatattggttaatgcttaccaaatctggaggttgacataacagttcttggtagtactttaggaatcatgtggtttaagttgtggttagttaaaattggtaaagtaccatgcatattctagcgaaacaagtagaaagtagaaactacactctacccaccttagataattgctgtcctgaatgttcttttgcccgtattttctccactggtagccatccttgtacggggaaggtgtaataatctccgtcctcgtaaccacctcttctctgccatttctgacaagaacctcttcactcctacagtagtattccatatatatcaatttgtcatcaacaaaagcaattatcgattcagaacatattgtaaacatcgataagaactcttctgtttacctaacgcgtttaaccctcgccggagtgtgcaagcaaatgctatcgtcagtcctcgtctccggcgccgtcctggtcactccttccggtcgtctgctgctgttgctgcaaggcttcagcatgtagagagacaccatgaacactcgcccgagctctctgctaacatcgacggcctccttctggccgcggctatcgagggggccttcgagcagcgcctggagcttggcgctgaggcggcggccgccggcgagctcccggtacagctgctctatggtatcttgaccaaatgccatcttaatttgagctgaaacttgaggcaccctagctagagcttttgacaaagtgagaaactgagaatcctttcaatttgcaacgcaaaggagttgagcttgagtagctgcagtaggcagctttgaagctagctgctactccagtatttatagacaggccgacagtctgcatgcagtggtcatcagccttgcaattgtcagttttcttcagggatgctccaccagtttcagcatatataatttgggtctgactagctcaaaccctgttcattaattaatgttgatcattgatgtcaacggctgggcgattgatttattctggtcttctgaccgatggatcaatcgatagattatcttagatgggttgactggttaggct

SEQ ID NO: 5474 - DNA, 1592 bp, Oryza sativa
aattattacgaacacaacggtgtaatcggattgtaaatcggatgagtaatttaagagaaaactttatttgaagcatagatgataggaatatttcccctacttgctcaatcgattaatagcaaccaaaactcctaaagtactagcacgtgggtgtctctggttaagactaattggagaggcctctccaattagatttaccgatttggaaaactttgaaaccatatttttttaaaaaaaatattctaataaataaaattaaaaaaaatcccataatctgccgaatcgcaggcgaccttcgctacggaaaaaaattatgtgcagaccggctgcaaaacccgcaccgtgtatacccgacttagatgggcgacgcgtggacgggcgagcaatcccacggcgcccttgcgcggctccatccgctctaggagaaggctcaactcggctcgctcgtgtcgactcccacaaccaaaagcgcatcgagccgagcatgaggaatggacgggctcatcagcgcctcactcctgtccttttcttccacttttctttcccccgccgccgccgccgctgcgatttccttccctatctcgcctccatctatcgggatcgcctcttctcggtgccgtcagctagccgataatcccctccgttcaacaaccgatgacctctctgttaggttctctcgaattcactcaaaatagcacaggattatggcaattatattggttgtattgctccatttcaacaaaattgagcctccaccgccttcgcctccaaattgccaaagccgttgttcttcgtattcgtttcagtatttaacgatacaagccaactcccacacgcaactctctctcacgggtacaactcacgcacgccagttgtcacgccacccactctgcgccatggtactttgggttgggcttcttgggccttgctagacgtgtcttctgtgcgtcatcttccttagtctgagtatcctcctcgcgtgccaccagctcgccctcttcagttatctgctcttcttctccatcatcttcagtaagcttttcctactcttcttcagccagcttctcttcttcttcttcagcgacatcatcgtcaggtggaacaggtggacacctgacaatcccctctccttgagaaatggcttgtccccaagccattgctttagggaaccttgccttcagctcctccagatcttcccaggtggcttgttcagatgcagtacctgatcattgaattagcacttgcataatggttgaattattcttcctggtcaacctgtgatccaggacatgtaaaggatattgaggagtagaggagacataagataagtgagtttgccattggcttgtcaaatcccttggctggctttagcaatgagacatgaaaaactgggtgaacactgcttccaacagggagaagaagcttgtaagcagctgtgccatttttgagatgatctgatatggtccatagtacttgaaagctagtttgtgattagaacgaggggctactgagctttgcacataaggctgtagcttgaggtaaacccagtcacccactgcaaactccctgaaagttctctttttgtcagcaaa

SEQ ID NO: 5475 - DNA, 16571 bp, Oryza sativa
ccaactccacttgatattcgccgtttgcgaaatttagtggtcgtctgatcagccggtcaattcttcgattctcctatgtgcaagggaagagaatactacccgcccgtagcttcaaatgtactaggctgcttgttatatgattatatccttctggatcagtcctgctgtcctggtctattatgcagaatcgcagatcgactcggagcattccaacttcttccaggtgactaatctgaacttttcacaagtctctcctgatccagaaaaccagaaacaaaagataccacaatagcattacattgcctaattgcagtctcagtttcacaccgcacaatcggtgtgaaccatctggtaattgcctcgccacggacagatggaatcgtggaaaacttgctgtaaattactagattattagtactattagttaatgattacacgagtaggccagccatttgaacacctgtaatgcagagtgtccgagtagtgaggcgatcacctaatccgagttccagttcaaagttttcgtctgattttctttttgacagttaggttttgctgcctgctgaacccaaaggaccagggtttgaaccttggacaagtttggtcgatctgtgcgtgtttatcttacatcttatcatcaaagtactaccactattttgtttgtggctgtggtcttctgttctggttcagtatctattactgctaatttacatatgtgaaacctttcatgaaaacgtggtggcagctcactggcctgcaagcacgtcaaactaccacagttgcgtactactgttgaaattctgatctccggtttttgtcgtcgtcgtattctctgacaaaaaaacaagcagcagcgttttgttttgttttctgtcagagaataagtgcagccataaatatacgtgcacagctttttgaccatccgtcttatttaaaaaatttataaaaaatatttaaaaaattagtcacacataaagtactattcaagttttatcatctaataacaataaaaatattaatcataatctttttttaaataagacaaacggttaaacgttggacatgaatagtgctaaaactacacttatttttggaacggagggagtacaggctacaggctaggggacgtctcagcatggggagttgggaatttggggttgttttctgcagatgcaaacagtcgtcaggccttttccttcggagagaatcgtcacagaaaattggtctaatttttgtgtgccattgaaaattgtttttttcctatattccattgttctaaatttgtgcactctctcatgtcactcccgtgtgttgatcgttatataatcagaatgataaatacgtcttttttatttgagagttaacggtcaacacacggtcaacagatgtgagtgtcatgagagggtgcacaaatttgaaacaatggcatataagaaaaaagtcaattttgagtggcatataaggaatcagactaattttcaatagtatataagaaattctctcttttcgattccttggttgatacaaggccacgaccgcgaaacaatcagacacaatagaatgcaaaatggatgtaagaaaaaaaatgaacttgtggtagtggttctcctataccaagtagaaacataaatgagagcaacaagacgtgtactgtatgatagaacgagagaaagtgaccctattggaatgttactggaggtctggagcacggacgaaaacgatcgtggcaatcaaagttaccttacgggaattttccaaggcataagccacagaggtagtagtaaatactactcccccgtagaaggaatgattcaacgggggtggcgagccatgaaatcagttagcgagcactcccccttctctttagttttaactatctatattagttaatatacttaacattaatgatagtaattagacaagattctgacgatttttttgggagatttttttactaatagattaaaaaaaatttaagttagatttgaaaactttcgatttaagttttaaattttaaagtcaaatttaaaaaactttcaactcagatttgaaaactttcaacccagatttaaaaactttcaactcagatttgaaaactttcaacccgagatttgaaaactttcaacttagaatcgaaactttcaactcgagaatcgagattcgaaaactttcaagtccagatttgaaaaatttgaaaactttcaatttgagattcgaaaactttcaaatcaagattcgaaaactttcaaatcgagattcgaaaactttcaaatcaagatttgaaaaaaaataaaaaattttaaatctgaacttaaaagtttttaaatcgtcaagttcaaatttgaaaattttcaactcaaaatttaaaaactttcaaactcaaaatatgataaaagattaaaaaaataaacagaaaaaagtgtgaaaaaaaacgaaaaaattggaaaaaaaaggaaaaaaaaagtcagaggacgcgcgcgccggggctgggccctctgggccgaaacgcgcgcgcattatcttttctgtgattcaacgggcaatactgacaagaaggtagtcatgtgcaggtgctgtcagtctatcagcatcgacatctatgcctgattacgagaacaacgtgctgctaatcccgggccttggtataagattctgaaaagtccatcttgatttagctttgttcgaatagtaatatttctcaaaatactctaaaaacgagctactactatgtacgagcggcacccttcgaatctcaaaaataatactatacagtacgacattacggctcatcctactcgggtttcgacgtattagcgtcatcacgccgtaacatcgatcttttgaaattgggcatagaccatcaaccaccgtcgtctgaccacgaattccacgaaacatgtgaagcacacgctctcgcttgatcatactgcaaaaacgtgaaacgatgtatatggcgtcgcggccagggcactcgcgtaagcccgagagcgatatggatcgatggtggcgagctgatagctccactgagcgcgccggagaagaactctctcgtctcgtcccgaccgccggccgccctgctcaccgaccggtcgtcacgcaacgcagcagccaccggcggcgaatccgtttccgggcttctttggtttagtgccctactaaagtattaaagtattggtagtgcgaaaacttaggtatgttttggcactatcaatattttggtagggtagcattttagatgaatggatttgtattgataccaattggagaccaaattttatattatagttaagaaagttctagaattatgccggcagacagcgacggcgaaagcgatccggagaaaccgctggcaaaagatactgttatcactgtaaccgtcaacgacgatgacgacgcattccccctcctccctcccggctcctgctgcccgcaggctcgcctcgcgacctcagagcaagtttaatagctaactactgtctctaaatcatctataacaaatcaaatagtccacttataaaataggtaactataaaaatatactacaccattaatacccggtctcacttgtcatacacacataacgttttggagtccgtgttgcagctgactataaatttgtagcccgctttcttctctcttcttttagaaaatgaaaatgggttatatctccggcttctctcataagacacacaatcataaatttaatagtaataaaaatgtaagataaaagtaaatcaagatgagaaataaggaggtgggataattctctcccttaatttttttcttgatatgtggttatagctgacttatagtgctattgtactgctctcgcgccgccgcttctgctccatccttccagcgaaatcccatgcgaaaaccgaagacggcaaagcgtctagctagcttgtcgcggggcagcaggtgggggaggggaagtaggagagcgtgtgaaaccaagcaccgcacgggcaggagcgcgacgacgcttgatagccaggtagctcgtgaaccaagcccaagtagggatggcaatgggtcaggtcgggtacgggtagagcaaaaccatgcccgatccaatgcctaacattgcccacccgaaccctacccactagagttagcgggcaaaattccgtgcttgtacccatgcccgacgggtacccaatagatctcgcatgaataataacttgaaagatatgtaatttaacaaagagaaataaaatcaataatttaccaaattatcggttattgacaataatttgaattacatcacaacttagtatcagttagcatcacaaatgaaccaaaagaaatggtataagaattaagaaatgagtcaaaattagctaatacatatgtatcgggtcgggcatgtgttacctacgggtaaaaaatgaaacccgccagttgcccatgacgtcttcgggtctcgggcggacgtgcccatgggtaaaaagtcacacccacgtccatgtccatcgggtcgggtatccacagatacccgaactcatggataaaattgccatccctaagcccaagattccagcgttaaggccaaaattaaacggtgggggcgcctccatccacactccagagagagtgctaactaattgcatatgcgcactgcaaacaaaagatatggtcttgagccacgcctaaaacgacagatccgtgtgtagtgatgagtgtgtgaactgtgtgtaacatgcaatgaagaaaagaggaggggaaggaattgtttttttgaccttaaactaatctggcatgaaattgacgtagtaccgttttgcttgagcatgaaagaggacatgcagtgtgtactagccctactggcttttgtcttaaaaaatgcgaaacaaatttcttgttacatagattttgtagtaggggctcatacgacgaacttagcatgtatttagtttagaaacaaagtgagatgggttggactcatccctatttttaggatggaatgatcctatctatctatttggcataagggatgggatgatctacttttgaaggaatgtccacaagttagtgagagaaaaaagtaggttcgattggtccgctagttttttaagggccactaacccgtatcctaggggatatattccttgtcggggaccatcatatcccacatgtgcctaaacaaaacactgaaaaatgggttcaacccaatctaatccatcccaaccctttaaccaaacaaattcttaggctgcatttgtttgagcatttcaggtgaaacagttcgtgacttataaatttagaaaataaatttgtttttggttttttctaaacaacttctatatgatttatttccacaaaatataatattaaaagttcagggagcattgctaatgaaaaacaagaaaataccatttcaagttggcgaaaagaacttagccttggtgatattttgtagaatcactaacagaaacagaggacattaccattcaaaaagttttgtgcttttttgcgaggattaagtaattttttttagatgaaaaatccatttagagaccttgaaatgccgttccatatctttcatcccttggcataaaatttttattctacctagccatataagttaaaaccaacaacaaaacaatgttaggatccctttgatttgtaggggaaacattggagtttgggaggatttcaatcctatagggaaaaaatcctatgaaaacatttgaaacaaaagattaaatcttattttattctttaaagttcctatggaatagataatcatataaaaattttggagaaaacttagcaagaatatatctctcatccgtttcctatgttttttttccgtggtcgaattaaatgagcttttttgtgtttgtagtccattgttttatatctgcattttcctggcataatcatgtgtttttttattccttcggattttttcatacaattaaaaagggcctttactagtatagcaagtttactgtgacgaaattggagacaatatgaattctttccatgtgaaagaataaacttttacgaagtattttaatttcaaagaagaaactcaatttcttctttttgccaagatgagctccctccaaaatcgatctaccggcatgaaccatccaaaccctccagtaggattacgcaccaaacagggagcctaccccaaccacatcctagagcagccactgtacagccgtcctggctcactgttcaaccgcctcgagattcgtgcactcttcccgtgaggcgacggacgatgattgcccaatcatggcccctccctccctcgggcagctccatcaatgctcgcgtgcgtggtcctcccccggagcttattactcccgaccgaccggcgggcccggcccggcgatgtgaggcgctggaccgatccgggccgtccgatgcaccaacggacggccgagatgctgaccagtccgatcccccgcttcgtccctttcccgtttgactccacccaccttacggcccggcccaccttggaaaactggacacacacacacgcaccccctctctctcgcggatttttttttctcgtctttgaccgggctgtcagcgtcggcggtgggccccactgccaccacaatgccatatctatgaccacgcttgcttgcttgcgcttggaatttgtggatattctcccttgcttggccattctctttgactaattttaagatcaagagagccttctagttctaacaaatcttgcacatttttgcatcccacaccctctaaaaatacttttattttctctggtcgtgtttgtacttgttcctcagggactttgttctgaaatttcttctccatgagctcagggagaagaagtgaagaactcgtgctggcgtgctgcataagtttctacgggaaatcttccactattcaacatgacttgtactaaccaaatttaactctggatttgcttctgctaactctttaatatagttcagttgcaatgtatttaggttaacttctctatggctgtgtttagttcagcgcaaagtttggattttgattaaaatttaagatgatgtgactgaaaagttgtgtgtgtatgacatgttgatgtgatagaaaaggactgaagtttggatccaaactttgaatctaaacacagcctatgtttggactcccaggaagccaatccataagggcaagctgcagaattgtcatctgctagtcgtctgaatctctttcagtctcagttgttcttttcatctaagcagtctacctctacggttagttgtcataatttagcaatgcagtatgtactactagtgcagaactaaccactagacagcttgtcaagctcaataattgtccctgaagctcactcttaatcaaactgcagcgtcaaatgtcggactggcgatctcgcatcgatgattcaaagactcagaacattgaacataggaatcaccgatctttgaataaactctttcatgttcttgccatgtagcaccagtattttccctatattttagtatggcaatggccaggtcattctggagctatttctagatgaaagagctgtgtgctccaaggaaaatttcttgttcaattcaacaatgagcaaaaagccaacacagtgacttcaaaacaagagatgccacatccttttcgcagatggcgaattaatctcttgcgttccatcgtcaatacttcaaactttcttactctcttcttcgattagaacaagaattaaaaacactgaaccgcagacggcaaggcaaataaactatgatccttcattgatgttttcgtttcgtccgggatcttcagacggcaggatagcgaataagcaagcagtggcaacttgtcaaacattcgaagccatcgcggtcgcattttattcgatctttctccctctgaaaagcaaaacaagaatggtagcgagagagaaaaacaactggagaacgatatgcccttttatcatgttagaattttgcacacgcagttcgtcatccttcttttcctgtcaagttgtattggtgaacaacctcgaccacgcatgcatcaaatcaatatgagcatcagaccataatcactcgaattgccttccagtttcccaattacacttttgcttatagtgatgatcaaagctgtagaacccaggctacatggttaaagttgatttcttcccaatggacgcttccacaaaactcttcgtgcttaactttgaacagaataattttgtgggcgagaaagggttacacaataaacatttttaaaagaaaaaccataaccagtggctataattaaccgtacaagcaatgtgttacccctatcaacacacagttgcgtcatcttgacacacgcactattcagaagaaaaaggaaaacctgaaacctgtttctgaaaatactggagcactgcagctgaatgttcatgagcaaaccacctttgtcggcttgtgaaggcaaaaaaaaaaaaaacaccatttgattttcaccgctttagaaaatcaccctgtgatgggtggtaccattaccaacacactctcatgtgcatcctgccccaccctcccattaccctacctttgcaaacgcatcgttagagcaagtttattagtatagccaactgtcgacttcaaattaactatagttaattttagagccaattcatataataagttacctataaacatatactatataattaatatattggctcgaaagctagcttatactagcctgctattgtacctgctcctaaaagtagttaattactgctaattacatggattagttgggtaaaagcggggttagcggggggcggaatataaaaatgccgcctgcctcggagcccctccaccggctttgaccagtgccgcgccctctcctctctgtcgcctcgccaccaccatagctaatcctcctcctccgtttattttacttttctcccctcttcgcctctcctcgctgctgttatatccgctttcctctcctcctcctcctatcccccctctcctcctgctcctcggcctcctcccctagatgccagccgcggcctgaccctcaccgctggggagcccccctcccattcttcgcttcccccgcggttgcgctcccggagcggcgttccagcggccacaggtgcggtctctttgcttcccctctgctgctgttgttgtgtgcggtttgcttggttataggtggattttttggggttatttcatgggtggttactgatgtttttttttccgttgctgcctggatctttctcatttggattatcatctgctgctttcccaaagcgcgctgctgtttttttttgtttttttaaatatttttgtttgtgtttgcgctcttgcatttataaattttcgccgaatggcaggctaggactttggatataaggtcgggggtttgaaaaccctcgaatttcataatttcccccaccaccgtttcagaagttcgtttggattctgtgaatgctcacaatgctgtatattagtaagaggtgagataatgccgtgaaggttttgggaattctgctttcacggccatggaagctgcaaccgcgggttcatttatgatcgcggagcggtgaaaatttccagtaaatgttttgggggtggtgcagtgcttggttgttggggtcaatgacttagctgcaatagattgcttatttaagttggacttttgacccggaattgttaatttggtttggtttggtgagaattcgactactagattccgtctctggatatggaagtagttgcagacgcgcgcaatttctgtgaagttgcattggaaaccaaactaaatggagtggtgtgtttgaacgtccattgttgcgtctgcggaccaatgcatcacaccacctggctcctataagccttcgtctcagcttgtctcttgatagatcagtgaactgattgtgggaatgaggcagttttagtagtttagctgtctcttcttctccagtaatggtttggaagttcagaatacattgagaggtgttgtacttaaggagagatatcatagttatttttttttttttttttttttttgctgatgcaaggttcgacgccttttgcaccttctgttgtactgcatttagctttagcagatgcaatacatgacaactttttattgttgccgacgactaactgctatattgtgatggggcagctacttttgtgctatgtgctaactcaggatcctatttgaaattctgtagcagctttccctcattgtacacatgatgggttgcttcactgtcctgagatccaagaagaagaagcctcttgctctcaccaagaaatcggttgatgcaagggaaagcacgtcctcaagactcccagagccagaagcgcatgtgccatcgttacaatctgctcctcctagttttaggaacaaggctaaaatccaccaatcggaaaagaaagcttcttacagcagagcgcgcgtgctgtctgctccttccagcctaattgtggttgatcaggatggtcttccatatgccgaattcgatgatcaagatgactccaggggcaagggaggttctataaagggcccccgtttctctaatccactgccccttcctctcccatccccagaaggaaaatcattgaggaactttggcagcttcaaagccatcaatgcaagtggaccactcgatgcttcaagccctctgccacttcctccaaagaagtgtgatgggcttaagaatttctcctatgagaactttcatcagctggcaatggttttctggtgaccagtgtgttccgaaagtttgacatcaacatcatacaaggcgtcctttaggatgattttaccgacccaaagaccattgaagcaatagtatctcggttgctctcctccactcaggtactgttctccgtaatattgaattatgtgtttcatcttctttgttttcccctggaaggaagttgtattggatgtaaagcggtagctttgccattttgctttgttggtcagcttgtcaaacagatggttggcatgttatggcttacttttatttctctcttgctagtgagtagtgacttggcaaaatgcttgtacactgtaaggattatactcttttagggctttaaccattttgcagcatttcttctattaagaagctgaccttaggctagaggcacggactggttttgtaggcatgtgatctatgctcttaatgttacagctatgctgtctccagcagaaataactctttctatttttgtgaatgcaaaccaggaccacaccattggtggggttaggtaacatgctctggactttgaaggcagaccatgtgtttgatcttctttcttcactttactcctagatgctttctccactccttcctaatcatatccagtgactagcgagattttcttttgacgtttgtttgatactttgatatatgatatctcatgctttccactttatgtggtttattggcatggttctgatcttccctcacttgtattcagtattgaaggaatctaaaaaatcactgtagtgttattgtgtagttctgggaattcagtggttcactagactttgtattgtgtgtgtgtgtctaaatctgataccccctttggtgttacctaatgttgcagcaccgtttattggaccatcctgatctattatttacaatttaactggttatggtactgatgcaacacacattttattaatatgcagagtttgaaagagtttaaaacacaagtgaataccttggcatcacttcagcatcccaacttatgtaaactaatcggctttcacgcaagagaagaatctaatgaaaggatgttggtctatgagcgactccatcatggcagcttagataaactactctttggaagatcggatggtcgtttcatggactggtcagcacgtttgaaggttgctcttggtgctgctagaggcctggctttcctacatgatgaagggccttttcaggttactgcttctaaactttttctttttgacattaccaataagtgaatatttattttacctagttatatagtacattggttgatggtttttgaccttgtggtttaaactcttattcatatgttattttttttacaggccatgtacaatgacttctcaacctcaaacatccaaattgacaaagatttcactgcaaagctatcaggatatggatgtgttggattcaataccgaggaggaaatatcaaatgcatctgtggtaagttatgttttgaaaatattttagaagatatagttatcagagcccaactcatttgcctgatctctttctgtaaattcaagtagtgtgttttggcatggttaatactctgttcgtttgtatggattctgtgttgcacgccattgatattatttagtcccaaacatcctaatattttgatgtgtttttactttacttgtttgcattatatccatagtggtcaatgccattgtttaccgtggatgctattctttgttaggctgctgcaaacctctcagtggaaaccttggagaaaggtgtactgactcccaagagcaacgtatggtgctttggagttgtcctgctggagctaataacaggaaggaagaaccttgatgtccgttcctcaaaagaagaacgcaatattgtcaagtggagtaggcctttcctcaccgatgatagtcgcctatcgttaatcatggactcccgtataaaaggacgcttccctaccaaggctgctcggattgtagcagatatcatattgagatgccttaataaagatccatcagagaggcctaccatgagggccgttgtggagtccctagcaagcgtccaggacataaaggttccatgtcgatatcctttgcaagagccatctgctgccccaagaaaggtgatgttaaaatctacaagtctcaatggcatcattcatcaccatcctgtcgtaaccttctcaccgtcacctccttcgcgaaaccaacatttgctctcgccaaggtcatccacgtctgcactgcttcctccaaggaccagctgtgctctggatgaccctagagtaagctctatcaagaaatcgccttcccctattttacggagatctggtgttgagggtttttgattgtccatatttttttttctcttctcttcacttcgatttgtttgttgtttttgctagcctagtggttttagtgtaatctcatatattgcaagacaaatggccttatgaactcccttcagtagtactaagaagggaagggtgaactgtagatagaaccaggttgtagatacttttcgttttctaattggatggaagcagcgtgttgagtgcgccttgtaaactccattatgcaataataaacgtgtgtcactcagttcttttttggggagtcaaacatttcagctatttcggttgggtgccaactgccaaagtgccaagtggtgttgttgcttgtcggcacatagattgtccaatgttctaatccacgtgatgagatcatgtcgctgaagttgcaaggatccattgatgtaatatttgctgctgcctgtggcagttagagatgttgaatgactttgaatccctgcctgtggaaagttcatcccatcgttgcagttgttgactgcgacccagcctgcttttgcttctttgaccaaagtttgtcgatcgccggtcaaacttatctcaagcttaattagagtacgtaacaaacgttttataaacatgtgttttcaattggaacgtcagtgacgtctagttatgatgatgtaatggttggtggcatgaaactctactgcaacagtgcaacagcaaaagaaaattttgttgcatcatcattttgtactcagttcacatctgcaatctgctttttttgtgtatgagtttatagtactgaaatttctttcggcgactggaataggacaatgatcttcagacaagggtagtactactctgaagcattgatgacagctccaggtatcgttatgtttcttgaatcgtcagaagaattggtgcaccggacacggtttacttcagtttcttggtcgtcagtcctcgccatggtgcccggtggcggtgggtaagctgctctctttgaccggatcgcgagctaatcagctaactgtaactatctgaatctgatgttaccgtgagcgcgcggtggcctaatccaatgtaccggcagtgaatcatatgactcgattattcaaccgaaatctcgcacagtttgttttgtccttggacactgtcactttttccctctctttttgctcgccatggctgtaaaggtatctatctgggcatgccaaggtccccgtccttagattgccatgattggatcggatggatccagcctaacctgatcggatattatcgatcaggaagatcagatcaggtaatacggatgattaagattttctaacttctctatgataaagttacaaatgttaagttagagaatttgcttccgatcatgaagaaagctacagaaactaaacactggtcacaagcaactatgcgacgcggattgtcacgttgcgtcgttgatcgatcaaaaattaaaatttcggtcgtcacggcaatttaacatgtctgctgttgactcacaaatcacacggctagttacatggcgtcaggtagtggaggtagtagtcaggtagtcgagaagctgcatcctcggcggcggcgccggcgggcacggcgcggccggctcctcgccccggcggcgccctccgccccacgcgccgccgatgccgagccagcagagcagccgcttcaacgcctccagcagccaggacctccgcgccggcgcacgtcccgctcccggtttctcctcctccttggcacgtcggacggcagcgccccgcggggctttctgcttgtcctgcggcgcgacgacggcgagacggacgggctcggctcggagtagctccggcgcaggacggcccggtcgagctgggcctcgatggccagccgctcgtactcgtcgagcagcgtgctggggcggaacgcgccgccgccgccaccgttcaggtcgaggctgaggctgagccgccccagcctggtggcgccggcgtcttcttcctcgactatctccatggcaatgccgccgccgtctagctgtcgcgccggctccattgacattgatcagtagtgttaggcagtggtgctataacgccattgttgccgttcgaaaagttgcgagttgtgggagtttgacgtggatagtgaggcaagcatcgccgcgtcgacgagctttatgagtttcgtttattgcactcaaaacattgttcaggtctggacctgtctcttttgttgaactttcatagtatatgttgtataaatcaatctctgcagtataaattgaagttcacacgctatttcgcacactgcttgtttggcaacgcagggaaaagaattgggagtttagaattgatggtgagattaaaataggattgggagtttacacgagggaattgatggtgagattaaaatgagaatttgatttttaatcccagtatcttgtttggtagaggtagtggaaattgatagagagtttagttggagattagttcattaatgaaaatgaatggctgagatttgtttaggcaaagtaaaggaggaattccgtcccaattaccaccactacccaggtattgaaaaggagggagttcctccctcaattctctatccctatcccacaaaaattctcatgtatcccaactaaacaaaacaattaatagatgggactctaccaagaccatgacgatgacattgggctacattactagtccatgagaaagcccatgtaaagtaatgcatcctttcggaccaaattatgaagtccgggcctaacaagtgttacccaaagaaatttccccaaacacaaagaaatacggccccatcgtttcacatatgtgtgaataagccaaacggtatatttacaaataaaaaataatttgtgaataaaactttttatacatgttcatgttcttaatgatctaaaagcaaagtctgaaaaataaacctcaatgaaaaaaccccaaaaccaactccaaattaagagttgaaaattcaaaatttgtttgataagtaaaagcataaacgaaaagatgaggccaaataatcccaatccaaataacgccgccatcatctaaactttggggcctcatcttttcccttatgcttatgcttatacttatcagctaaaatttaaattttcaactttaaatttagaactgatttaatggttttttcatcgaagtttatttttcagccttacttttagatcactaagaacacatatacaaaattttattcataaattatttttcgtttgcaaatacgtcctttcatttattccggggcttttctctcccaatttccccgccgcccgaatcggccgatcggcaaggagttgagcgattctctacgcccccaacgattttctctcccccaaatcgatggcttctcgcaagtcgctacgacgatcggcgctgctccaactcccttgcggctgcttcgcggagacgagggttgtgctcgatgagaagacggagcacctccagctccctcccacgaggttggtccggatcacgtttttcgcagtctcgattggattcggcttgtctctgtcactagggtttaaggg

SEQ ID NO: 5476 - DNA, 11355 bp, Oryza sativa
ggagctggagctgtgccaaacaggcccttcgtgcgaaaactttatatatataagttattgtaaaaattagataaaccatttttaagtttaaaataattagaactcaattgattatatgccaatgactttttgttttatgtgtcgtacttgatctacgccaacttcaaattcaaacgcttttagaggtacagatctagccaaattcaaagaaaaataactagttggaggcttggagttccagtcatcgtcatgataaaatagtagtattgtgtttgttcttttttaatgatgtttagggcactgaaacaatctccactgtatatatttaatcattatttttccaaaaaatatagtcatcaaaatgatttagagtactaatatatgatactatattttcatgaaaaatttgcttatgccattttcacattgaatcctaatgtttccttttatttgttagtatgttatgttttagaggtttgaaactttgaatggtataaaatgtcatcaatttgcaaacggggggaggattaaaaccataatattcatgaagtattcttcacaaatatgcgaggtggtggctagcctagggaagaatagcccatccggatcatcgtaggaatggacaatatcagaaattcagaagtgaagagagcaaagtactgcttatagcatgtgcatctgcacaagagagatctaaataaagtagcttgtgtgcatcaggagcttaggatttcctgagctattgaactactaggagagtaatcccttgttagggtgcgttcgtttctggcggttgggaactcattccttccgcacggaaaacagagcgatccattatcgtgtgcttaattaagttttagctatttttttaaaaaatagatcaatatgattttttaagcaacttttgtatagaaacttttttaaaaaaaacacaccgtttaggggtttgaaaagcgtgcacgcggaaatcgagagggaaaagttggtaacactatcttgcgaacacacgcgacattgatataaatctctctctgcccttaaaaattactgtctgtggcattttttttaaaaaaagcccatgaaacatcttagagaaatatgaaatgcatggaaaaaagtaccggttgaaacattttgctattgtgcataaaacattgaatttcaacatgtgaaacatataaatttcttttatcaaaatataatcatttgtaaaattttagttgcaacgaatacaatggtgtagtatgattgtagatgagataaataatataggaggaaaaattgtttaaaactttaaagcagagacttgagagatagagtcatgtacatacaaagcggacgtacggttcttttttattggagttttataggatgaatatcattgtcagcccatttattttttctcgcatatttttttagacaatgacatgtgaggtcatagatacatgttactgggtgaaatcccgcgcgttgttgccaaagtttcgtaagatagctagacgacatagcttaaataaattgaaatggtttatgataatttaaaaagtatatggaatgatgattcaaatgtaaaagcaaggtgatatagctttataagagaagaaaaggaaggagataatttggtccatagattaatcatctaagaacttaaaaaacaattgatgtgatatgtttaatgagagaataaagaaataatattaactaaatgaggatgaaatacgtcaagagaagagccctatgcgcgggggcgttgtcctaggcacttgagagctgggttgggttgggctgggccatgcctttgcactctattattactccgtctttcccaaatcgatcatcatgtaatagaatccaaaatttctcaaattatcgtcatataattgcatggacacagatttcatcagaatacaattaatacattatgggagaatgtgtgcatgatagggtgtaattggcatgggttttaatcgatgcatgcattgtgggagaatgtgtgcatgatgtcttgattgatgtgatttaaattgtatttggttttagtttctaaacttatatgatgatcaatgtgggaaggagcgagtacatgcctaaaatacgagagcgaaattgatataatggtggacttgcagagacaaataatgatctaacaggcaaggtaatcttgatggtgtggcctcatagaatttgagctttataacaatgaatgactattagtgagtcacaattttatagtaaggagggattaataacatcatgaaaatatgaattagctgattttttttaatcgcaaacaaggaattgtggtttgcaactcctatataatttttccaccctaccgatcctaaatggatcacaatcacatactcctataccgcaacccgttttgagccaccggcccaccccaccccccctacgcacaaaacaccgggacgcgaagcggaaaacgagcgagcgagcggggctctccagtctccaccccgactcttcgtgtccgctgcgaaaaaaaggttagaacaccaccccccctcctctccctgatccccctcgcctcccccctttccccccctctctttgctcctctccacgcagcaatccgcccctcgattcgaccagatcggcgcgagtaagtccccgctacatcccgatctggatccgcccccgacctccgcgtgatttccctctccgtggcggtgttttggtcgggtacgtagatcgacgcgtggtggggcgggggggttgtattgtttgggtaaattctggtgcgcgacggcgggggggaattcgggttggtttctgaccgaattttgacgcctgtttgttcgatccatttgttgtgcagtgtcgatctatcgtgtgatgtgatttttttccccctggtcggtgtgtgtcttagttcgagttattcggatgtcgatgggagatgctcatgttttacttgttttgtctgtgctgaccgatagattcgttaatcgttgtgattgatgtcggatatgtttgccaccattgttgatgtggtttaggcgcagtagttgtcgtttgattcctaacagatcattttacgtatttgggagcaatgcgaatttatcaagaatttgataaccgcgttagtatgtaatcaacggcttgtatgctggtatgcagtagtattttatgaacttgtgaaattatagttgcatgtgttggtatagtggagtagatacgtgagaatttactactttgtcttacattagcttacggcatttattttgactatggaggttaggaccatggacccatataacctttgtttatctttctggtttacaagagaaaggtcaagtttgtatggatattagtgggtccataggtttgtaattttaggataatttactctgaatgtgttgatagcgaagttgcttatgtggtgagcttaatgcttttgacttttgttaaaaacaagtcccactgcgttgctttatatctacttatatccgattccatgttatgtaaggatggatcgaaacatgtttaaaactgtagaactaataatatatatttcattctcttaagtatgctaatgcaatttaagcaggagcttatcatggcgtcgaagcggatcctcaaggaactaaaggacctgcagaaagatcctccaacatcatgcagtgcaggtatgacccagatttatcagccgaactatagctgttagacacagtgtaaacttgagcgttgatatgataattgtactctgtgggtggtagtcctcatgttcttgtcggatggaattgtacgaactgtttgtatcctttagtagtgaaatcatccaatggtgtggttatccgtaaattaattttgatgaatatattttgggtggtgagttgtttgtcagattgtattccatgttgttcaattggtccacattgaaagtggactatcggtgtcctacatgtaaacaatttcacccagtattcttgctacaagaaaatgcataattctgtcagttgttgtcatgatgatgcccttgtgttttcatctagacagctgtgatgtttataattttgaagaaacgcttctaagacagagcatcctaatgtatttacattttatattgaaaatcttgatgaaatatggacaattattaaccagtgcaattgatcatctattctcatgtaaacaatgaattgttttggtcagtttggtcttgcgtacctttttgccctttgcttgtacaagctctggtgttgatgaactatagatttttataaatttaggtcctgctggtgaggatatgttccattggcaggcaaccattatgggccctccagatagtccctatgctggtggtgttttcttggtgaatattcatttccccccggactaccccttcaaacctccaaaggttagcagcgagccttattctggggcaaaattttccaatatttgccacttctattgaagatgaatcatgtggctattgttccctctccctatctcatggatggattgctactacttttaatggatctttatttcacaatcatttactgtcttcactcagtatcataattcataaatgatctacaatattagtgaatctttagctcaatagattggttcactaagtctactgtctacctagtggtggattccttctgctatgcattaagttagctcctttttttcaggtgtcttttaagacaaaggtcttccatccaaacatcaatagcaatggaagcatatgcctcgacattcttaaggaacagtggagccctgctttgacaatatctaaggtgctttgatgaaacttcactaaacttcactacctataggaaagcacattgaattccgcatgcacgcttcccaaaatactaaatggtgtattttttgcaaaaattttctataggaaagttgctttaaaaaatcatattaatccatttttgaaatttaaaatagttaatactcaattaatcatacgctaatgacttatctcgttttgcgtatcttcccaatctcctcaatccccttctcctcaaactcgccctaaatgaatgcatattttccttctttatgaactttggcgaattgcattgattcatctcatacacaatctagataacaagagagtgcgctgtctgttcaaagtgactgcatatgtggcgctaacatttgggtttgtttgttttaggtcttgctttcgatctgctcgctgctcactgaccccaacccggacgaccctcttgtccctgagattgcccacatgtacaagacggaccgtccaaagtatgagacgacagcccgcagctggacccagaagtatgccatgggatgaaaccccaagtcctgaattcgaatccactgcttaaatgcagacaaatttgtcccaagaaactgtttatgggccattattttctccgattccttgccagtcgtgttgtgtcagatccatctaggatcgtgtctcgtagccccgacatcaacatatgatcatcgtccgtcgataatgagataacatatgcttgcccgtgataattatgatatggtggtggtgatgttatttctgtcatgcgcacacaatatggcgcctagtgcctttttcttacctggggttcctcgtattccaatggtggagtggaggttgagtagctcatgcgaggaagctgcctgcacggaggagcttgttgatgtaacgttagggcatttacaatgctcctaggtggcgttcagcctcaaaggaagcaatgccattttcagtgccatgtcatctatgtgtgtagccaagcgaggaccgagtgaccaaagttggtcacccgttcttggctgaaaagcctgtcaaatgcagaggagaggagaggagagagagagagcgtgttgggaataaaaatcacaggagagagagagccgccgccgcccgacgccggcgccgctccaagtcgtccgctcgtcggcgccgagatccgcccggccgcctctccgccgggtgccacgccgtggtggaaggctgcctctccgtcccgccgctcgaccgccccctgcctctccgcccggcgtcgtggcccctcgtgccgccggcgaagtcgccgcgggatctgcctcaccgcccgggctgccccgccggccgccgccactgctcgaccaccccgcccgccgccaccgctcacgacgcggaggccggatccgagcgtcggcgcgccggccgcctctccgcctggccggctgtgctccgccgccagccaccgccgctcgaccccgccatcgccgctcagagagctcactagtaccacttgttgagagacagagtagttgtcacaccctgaaaattcaaaatatataaattgttgtttaattggaatttctagaatttattttaaaagtcttgaagagaagatctaagtttaattaataaattccaatataaaatggggccagataaaatttcattaaatactttgcttaattctataattcctagatttttctgggatttatttgagctaagaaagtatttttaataaatggaattgcatttaagaaataatttaaattgaaaaaggttttaaaaagtcttcttttggctttgggccgaaagtcggcccaaaacctttctctctctcctcggcccagccggcccagtccgcagccgcgcgcgcgcgcgttcggtcgctgacaggtgggtcccacctgtcgggatcgtcgtcctcctccggccgaaaccctagtttcgtcgccgccgccgccgctttccaatccggccgctcctttccttctccggccgaatcaaaagaggggaaatgatcctcgggatctcctctaccttttctcctttggaaacttcggctaaatcggtttggaatgagtttgattcgagttcgaatcggatcggctttcctctctccaagcctgagctttcctttgccgttgccacagccgtgggcctttgccgccgcctccgagcccctttaaaaggctccccggtgtctcctctacccgtcgccaccttcgcgttcgcctctcgtcgtcggaagagccctagcgctgtgtgccctagcttcgccgtcgccgccgtcgctccagccgtgcgccgccgtcgctccagccgtcgccgtcgctcgggaagaccgccgtcgtggtcgccaagtcgccgccgtcctcgtccgcctcttcgctgccgtcggagatcgccggagcttcatcgccgtcgacaacccgaaggtttccgccgtttcctcctcgtcgccgtcgtcgttcgttgttcctccgccgtcgctttggtcgccggtgagttcgccgtgccgtccgctacccgttggtgccttccattcgcgccgccgtgccgtcgttcgccggcgagcatgcaagcccgagccgccgagccgccgccgccagtggtgacgtcatcgctgacgtcatcggggccgttcgctgtgagccggtcgtggaccgatcgatcttggccgtccgatttggatgggttgatctcggccgtccgttcgcgtgaaccgtcgcccgtgcacccggtccaccgaaaccctagcccgctgacgcaataatcctccttttccttttcaaaaataattcattattgcgtcataattcaatttaaaccgatttaagtgttttaatccgatttaatcttcaaaaattcataactaattcatcttagctccgatttagttggttcaagtctctaaatttttctaaaattgagatctacacattaaaaatatccacatgtactgttcatgcttgtttatgtgctgttttggtgattttgcttctttttgtttagattccgtcgtttccggagagtccgttttcgccggagaagagtttgaagagttccaaggccagcaaggcaagtcacacagatcccaaacaaccctttgagcatgttgatcctatttaaagctattgtttcttttcaactattgcatttattttcgaatgtcattgggtggaattaacctattgtttgttatagcccttttgttcttgtttaccttattccttgataccttgggttattataatttgactagttgagctttatttatattggttcaactagatattagaaataattgcttagccctgcttagaaacattagcacacttatgggataactaatgactcactattatttcatgatggcttattgatagttcacgatggtcaatcgtgattagttaattaattaatgtgccaactaaaacctgataatggtgggttatgagcacatgattttgatggtcgtgctcatgacaattaaggaccggttcacgagtttcggttgtgaaacattaatcgtgccaaccacaagccagcatgggcaacggctttatcttttgtatagcatagttcattgcggggcaccagactgagaagtggcggagataagcccacgggggtcgctggggagtccatgccttgtttataagggggtgattatgatccaggaaggtgtgctgcagtggattatgttgtatgagggatactgtcacaactcctttccgaggtaccgtggtggtattgaggcacatggtgacatgatgtggggttgtgtcttgtgggtacagtggtacacctctgatcagagtaaaactattcgaatagccgtgcccgcggttatgggcgggtctaacaatgtctttcgtgattagtctcacccttctcaccataataaatgatgctataactggtaataatgtgattagctcctggtttggaatggtatattcctggtttggagatagaactgtgcagccggggtggttgttcagaatggttgggcctatacaacagggtatgttgtatagcgttggattaatattgtttaatacttaactgttttactaaattctcaaatgtttgctaaatgctgcttttgcaaatgaaaccctattatgccatcctttgttatcctgtgcacttgcatatttgctgcgtggcttgctgagtatgtcatatactcaccttgcaatcattcatcagaggaagagttctacaatgaggctgatggtgtggaggattaggtgtagccttggtcaagctgcctgtggagtggagccgtctgcgccgtttatcttattttccgctgcttagatttttattgtttgagaggaactatctacctctgtaatgacattttatacgcttattaattagagtaataattgtactctattatcaatttgttattgtgtgcctcggctgattcctggacgagggttcacacacatgtaagcgtttggaattttggatagaaattccgggcgtgacaagttggtatcagagctcccttgaccctaggttatgccaaatggttacccatagaagccttctaaaaatattggaaaagtagaactgttctcctccctttctcttttaattaaaccaaactaatggcacatgcacttcataaatctcttttaatggttctcattcaaaatttattccagtgttattagtactgtacatctattactgtactaatggcttatttatcagcaaaagttttacaatgttgttttatttaatcttgttgcaataaaataaatttagcatgacgattttataacttgattttatttcttttggaacctgttattcaaaagtacaaaacttgtgaccttgttttcaactatttcaactcatcttgcaagcttggtttactttatttacttactttttatcttgattttctaactttattcaaattaatccaaaaacttgtgctgttaattggatagatgtcttaactccctcctttcacttgtctttagatgccgcgctacaagcctgagtacttgtttggtgttgagggttttgtccaggagttgcgtacgatgtcctttgtcattggatttgggaatgcccctttttatacccagattcctcattatcgtcatgaagagaagtgccgagtcaaagtcaccttgaacagcaatagtgaagaggtcccctcagtgatgttcgaagctggaggaagaaattacatccatgcatgtcaggaggtggcaaggatcgccataggagagctccgtgatcgctacagtgatcagttggccgacactgagtatcgctaccatcctcgtcaacctcagggaagtgaccgtggcagctaccttgagactgaaggaattgagaatgatgctaccacaaggcatttggttgagatgctgtgggctatggatgaaagtcgtgcggagactgtgttagcggctcaagatcgtgaagaccggaatcgtggtaagatttgcaagttagaagacaaggtggatcgtttggagaaggaattagctgcgttgaagggagaagcaccgccgcagaaggccagggttcgtctcaccgcaaggaagagagctctatttgtccctcgctatcaattggcgccaaaggttcgtgtggtggaaaaagaagttgccccaaccctagcagatcctccggtcatcatcataagtgatgatgaagaagaaggatccaagcgcacccgttccaagattgagtgggtagcaactcaagatgatgaagacgagccgaatgagccttcaatcgacctccgatgctcggaagaactagagtgacttgttaagtcgtagtcttagatcgttgtgttagtttgcttgttttaagtttgcttgtgtgtgtctcgcgtgtgatttacatcagtggtgggatgtaagtgcatgcgtttgtttgcttttgagtgttaggaagttggagagtttagtggtgtgagagtcttcagtttgtaataataaaactcagttaagatcaataaaagttaaagtaattctctgtcctaagtagtttcccctggtttctcttcttgtgccctgtccatgccagatggtgaatactcgcagcaacgggaatggtcccaacaatcccaataataacaatggagagaaccccactcttgctcaagttcttgctcaacagactcagcttatgaacatgatgatgcaacaacttcagaatcagcagaaccaaggaaataaccatgtacctcctcagaataagttagcagaatttcttcgtgtgaggccgcctgttttctctagtaccactaatcctgttgaagctggtgattggctgcatgccatagagaagaagttggatttacttcagtgcactgatcaggagaaggtttcatttgcatcgcatcagttgcatggccctgcctttgaatggtgggatcacttccgcctgaataggattactgctgaacctatcacttggcttgaattcgccgctgctttccgaaagacgcatataccatcaggagtagtgtctctcaagaagaaggagttcaggtcgcttactcagggatctcgctctgttacggagtatctgcacgagttcaatcgtcttgctcg

SEQ ID NO: 5477 - DNA, 4115 bp, Oryza sativa
gtggcgcggtggctgccccctaccaagctagagggaggaggccaccctcgcttggggtcgagctgccccgaccccctccacatatcagcccacgtgtacagggttaggtgggcgcgcctaatgcccacctaactgcatttaaagcagtctatgcaaccgcgccaggccgcatttaatgcggcgtgctgcgcatctgaccggttgaatgaccgatgggatggcgactgtgtacccctgccctgtcagtgtgtcaggcggcgagcggcgtgctccatcccgtcccatcataatgatgaggggcttcacagcctcttaccccggtcagagctggtccaaccactctgaactgacccgggttcccgttttctggtgtgaacgagaacccgaaagtcctcatccattaaatggcgaatgacaagggcgctctgcattgatttgatgggccccgcgcagcaaccgcggatagcttctgggctaaggcacaagacatgtaattaatatagagaatattttcccttctccctaggtagcactcgcagcacatgtggtatccccttagagtataaaaggaggaccatgcctagcgaggaagggggatcggactgaggatccctgagccaaagcttgtctaaccctagcttgcataccagggattcagggactttctaagcacagaagaatcatacacacaggagtagggtattacgcttcatagcggcccgaacctatataaacctcttttgtctcatcgtcttggaggggcctccgagatcaagatcacacacagtttcgctcaccaaatcctcgaatctcacccgctgcccctggccgaactctcaaaggagggcctcacagcctcccgctagagagggtcacccctcaacaaagacgagtggtcaaacaatgcaaacaaaaactcaaaatcccttatattataggatggagggagtacgacagaaaggagtgattttgtttagtgccgtagaacaaaaatatttgaaaaaaatacataatcacaaatatcttgaattgcaaaagggcgtagctagaaattgtgatatgaatgatactttttaaaagaacttttcacatttattttatgaaagtttggtttgcgaggatcttatctatttatagctatattaattgagcacttcgagtgagctcttacatgaacttaaaaatatataccatttgataagtgaatatgtaaattacacattcagatttcgtgttaaatgaaacatattccatggattctttatatttagttgatttatctccgatgtttttctttggttcgacgccatttgccaacagtaatgtgagcggaattcgatcgacaaaagatctaccgttgattttagatttttttttctattttgaggaaggcaaggactacgtacaacttaatatcagttgataaaaacaatagttatggacagggcactatgaccaaccctagagggagatttgtcttttaagatggtttttcttattagtttctttgtaagaattggctttaacttctctgaaataaaatccagaatgaattccatcatcttaaaatagaaaaaaaatagttatgggcactatgaccaaccatagagggagatttgtctttaagatggtttttcttattagtttctttgtaagaattggctttaacttctctgaaataaaatccataatgaattccatcgtcttaaataaaaaaataccgtcttaatttgagagataccaagaggtgccaaattttacagtagaaaatgcagtacctccttgtacctccccaaggaccgtaaaatccctctcttaaaaatatctagttgttacaaaaattggaattaatagatatggagttgtttcatcgctttattaatttaatatgaatttgaaattgtcgacgtttgatgtcgcgattccggtatttgcatagtatggggatcgttagtactaggatatatgcgagattgtagtaaaagagatgagggcgaggatttttatacaggttcgggctcctgaattgtcaggtaatagccctacatcctgttggccgaagccggtcgttgctcttattcaccataatcacaccagtacaatatttagggtagcctatctaacggttgtcgacatggcggtctgaaggtctgactcgtagtcgacgacagggtagtcttcctcctcgaatccgtgcccgatgagatcagagacaacgctatgtctctcctgacagtatccggagacaccgtaggggattagccatgcctatctctgaagtcgatatccggcttcttgtcttggcgcatgttggcttgtatgtggatcttgtgtcttgatctattgtttcgtgtcccctctcctcctagggggccttgtatttatacccatatgtccccttgtccaagtaggactagggaaaccaatatggatacaatccgagtagtccttgtcgtttccatgtaaaactctattcatccttccttatgcagaactccttctatatctgaaagttgtttccgtataggacatggtatgtggtgggtcctgccgagatttagtcaactattattaggtatgtggtatccataaccttgacagaaaccaataattatcaagttgtaactgaaacaaactcttctttttaaactaatatgctaaaattaacaaacaaatttagaaataaaatgtagatggactcacaatttagctattttaaatataattataaaattcaaagttaacaattagccagttgtaactgacacggtttcttttaatttaatatgctataattctaaaaacattcaacaacaattttagtgtatgatcaaaatttaaaatatatataaaaaatagcaatagccaatgtaacacatgggtgtgacatcccgacctaggggttaataggattaatagaatactcatatcaacaggttacaacttcttttccggaagccgatctccaaagaacaagttgcaacttcttttccggaagctgatctccaaagaactccagggttaagcatgcttggcctggagcaatttgggatgggtgaccgaccgagaaattcttatcaacaagttgcaacttcttttccggaagccgatctgcaaagaattcttcccgggtacgcacgagttcacagagggacagtctatgacctatgaaaactatcagatgtaagcgggcccggcctgggaagaggcgagacgttacaatgggttaatgactaagtggtatattaattcacgccatgggacagtctatgacctatgaaagctattagatgtaagcgggcccggcctggggagagacgggacgttacaatgggctatcagatgtaagcgggcccggcctggggagagacgggacgttacaatgggttaatgactaagtggtatatcaattcatgccatgttttattagcatggctgtgaacaaatgatattttgctcaagtaaaaaggagtgtgagtagtactaattagttttaagccatgggacaggctatgacctatgaaagctatcaaatgtaagcgggcccggcctggggagaggcgggatgttacaatgggttaatgactaagtggtatattaattcacgccatgttttattagcatggctgtgaacaaatgatattttgctcaagtaaaaaggagtgtgagtagtactaattagttttaaaatttcttgatacagtgttacttcctcatattcataatatagtgatttttaggattcaaattttgtatcacaatataagtattcatataatgattcctatagttcccattattccaactataggggattgcccctattcagttttgcgctgaggtaggtgacggagctcgtggctcctcaccgggagaccgcgcaggcccccctttgccagttcggccgggggcttagggtgaaatctcaagctctcgctctctctgtatgtggaaatatcgtctgccagccagaaaacacgagacaccggcgatctatacaggttcgggccgctcagaagcgtaataccctactcctgtgttttggtggatctgtgtatgaatgagctacaagtgtgagctgtcttctcccccgttctaagctcctaatctgggaa

SEQ ID NO: 5478 - DNA, 6428 bp, Oryza sativa
tctaaccccttatgttataattcccttgtactcccttgcatttattttgcatttgtgggtgtgtcttgttgagtacggtggttgtactcagtcttgcttaattttcccaagcccagatgaggagttccctgaagatgaaggcttcggtgtctagctcgtgcctgccgtcaagtgcctgtggtcgtcgccctagtcttccgctgtttttcgttgtctttgagtgtgctgggccttcgttgcccatgtaataattatatttacgcttccgcttgttaaactctgaattgtatcaacttttggtgtaccttgcctcctgggacaaggaataatacacgcacgtcaggaacgcctgttgggtgatttccggtcgtgacaagttggtatcagagcctcccttgaccctaggacgagccgtagatcccaagccttagcaatattttcaaaaataaaaatcctttattatttgtgaaaacccgctattctctctttgtcttgctgcttcatttatcgtcaaaatctgatcttttaaaatgttgcttttcttttgtttttgtttgtagatggccggcagcgttacccgtcgtggtttggacatgactggcttcgtcttggagctgcggggcatgtgcgtggtcttggggtatccacatggagtggattaccaggccaggccgctcccggagcaggagggtgaggatgcagagcctcacgctggttgggaggtcactgcagtgatcctctccggctctcctgagtggacttcgctggcagtcactgcgggtggagattccttccccgccgcttgccagaacgccgctctcctcgccatcggcactcttcaccagcgctacccggacgagttgcagcactcgccctaccgctaccacccccgtcgcggaggagccagcgaccacgccaccttccgagacgccagctcggaggatgacgctaccgtcgtgcatctggcacgcatggtggaggcgtacgacgcggctcgtatcgacttccatcagatggtgcgtcgtggcatggtggagaacaacctgaagatcctggagctgcgccaagagaatctgcagctcaagaaggacctcgacgcgttggaggcgcagctgcatcagctcaaggtcgcccagggagagatctgccgccccaagcgtcgccgcgtctgccgcagccagaagatcaccgcccgcaagagcacctccaggcccgagcttgttcgtcagtccctggcgtggacttgcttcgtcgagacccctcgtgccgagcctgcgcccgtggttccccaggagggggaagcctccggcgttggtagctcggagggtgcgctgttgctcaccttccgccctggcccgtcgcagcggtagacgagcagttagtaggcctgcgcgtgtgtttttcttcgttttttttcttgagttgtgtggggcatggttacaccggtgtgtggtgtaactatgtcggagcctgtcttattttgtttgcctaagcaacttgaaccttaatgaaccaatttaatagcagtgataaatttaagaataatggtagtcgtgggtggttagttttaatcgtcagctctccttctctgtttgctggttctgtgtggggttttcagatggtgtcgaccaggagaaatgttaacaccggagaaggcaaccaacccgaaggcagcaaccccaacccccaaggcaacccacctccaccaccaccaccaccagacaccaacgccattctcacccaaatcctcgcccagcaagccaacatgatgaatgctttcctccaccacctccaaaatctgccacagcagaatgctcccccaccacctccccaacactccaaactcgccgaattcctccgcatccgtccacccaccttctctagctccaacaaccctgtggatgcgttggattggttgcatgccgtggggaagaagctagacacggtgcagtgcagcgacgaagagaaagtcatcttcgccgcccaccagctgcaggggcccgcatctctatggtgggaccacttccaggctacgcagccagaggggcaaccgattacttgggctcgcttcaccgccgctttccgaagaacccatgtgcccgctggagtcgtggctcttaagaaaagggaattccgggagttgaagcaaggcaaccgctccgtgatggagtatttgcatgagttcaacaatctagcccgttatgccccggaggatgtgcgggaagatgaggagaagcaagagaagttcttggcaggaatggaccctgagctgtctgttcgtctagtctctggggactacccggattttcaacggctggtggacaagagcatccgcttggaagccaagcacaaggaactggagtcgcacaagcgccgcttggcgaatttccgcaatcagcagggtgctaaccagagggtccgctacaccaatccctacccagggggatcctcctcgcaacagcagcagcagcagcaacctcgctccgcgccccgacctcaattcgtggtgcgcgtcccacagcagcaacagcagcagaatcagcaagggactcgtgcgccacgtcctcctacgccaactgtgcagcctgttcaaggtcgcagggacgctcaaggtcagcagcgtctgtgcttcaactgtttcgagcctgggcactttgcggataaatgcccaaagccaaggcgtcagcaaggccaagcgcctccccgctccaacaacggtggcaaggacgtcatccgtggtcgcgtgaatcacgtgacggccgaggacgtgctgacaactccagacgtcatcgttggtacgttcctcgttcattccatccctgctacaattttgttcgactctggagcctcccactcgtttatatctgtgccattcgtggggaaaaatcagttgggggtagaaaggcttagaaaccctctgctcatcaccacccctggaggggttatgacagcaaagtattatagccctgccgttcctatagaaattcagggaattccttttccctcggatctgattctgttagacacaaagaacttggatgtgattcttgggatgaattggttggcacaattccaaggagtagtggattgcgcgaggcgcactgtcactctgtaccgaggaccggaacagccggttgttttctttgcacctccaacctctgtcagaagttcagaactgcatcaggtaggtctgtcagaaatccccatagtcagagagttcggagacgtgtttccggaagaactacctggtatgccgcccaagcgagagattgagttccggatagatcttgctccaggaaccactcctctgtacaagcgaccctaccgtatggcagcaaatgagctagccgaagttaagaaacagttggaagaattgaaagaaaaggggtatatacgtccgagtacttccccatggggtgctcctgtgatttttgtagagaagaaagacaaaacgaaaaggatgtgcgttgactacagagctctcaatgaagtcaccatcaaaaacaagtaccctcttccccggatcgatgatctgttcgatcagcttaaaggtgccaccgtattctccaagattgatcttcgttccggatatcaccaactacgtattcgtgaagaagatattccgaagaccgcattcactacgcgatatggactgtatgaattcacggtgatgtcgttcggtttgaccaatgctcctgccttcttcatgaacttaatgaataaagtgttcatggaatacttggacaagtttgttgtggtttttatcgatgacattctgatatactcacaatcagaagaagaccatcagcaccatctccgtctggtgttgggaaagttgcgggaacatcaattgtatgccaagcttagcaagtgtgagttctggttgtccgaagtcaaattcttggggcacgtgatatctgctaaaggagttgctgtggatcccgaaacagtgaccgccgtcaccgattggaagcaacccaagacagtcactcagattcgcagtttcttgggtttggcaggatactatcggagattcatcgagaacttctccaaaatcgctcgacccatgacacagttgttgaagaaagaagagaagttcgtgtggagcccgcaatgcgagaaggcgttccaaactctcaaagaaaagctggtttcctcgccagtgttaatcttgccggatactcgcaaggatttcatggtgtactgtgatgcttcgcgccaaggattggggtgcgtgctcatgcaggacggtcatgtggtagcctatgcttcacgccagctacgacctcatgaaggcaactaccctacacatgacttggagttagcagcggtggttcatgctctaaaaatctggcggcactatctcattgggaaccgctgtgaaatatatactgatcacaagagcttgaaatacatcttcactcagtcagatctgaaccttcggcaaaggagatggttagaactcatcaaggattatgatgtgggaatacactatcatcctggtaaggccaacgtggttgccgacgctctaagtcgaaagagccattgcaacactctcaacgtccgaggcattccgcccgagcttaatcaacagatggaagccctgaacctaagcatagttggtcgcggattcttggccgcgttagaagcaaagcccaccttgctcgatcaaatccgcgaggctcagaagaatgatccggacatgcatggactcctcaagaatatgaaacaaggtaaagccgctggtttcacagaggatgaacacggaactctatggaacggaaagcgggtatgcgttccagatagcagagaacttaaacagctgatacttcgggaagctcacgaaagtccttattccattcacccgggcagtaccaagatgtacttagacttgaaggagaaatactggtgggtcagcatgaagcgggaaatcgcagagtttgtggctctatgtgatgtgtgccagcgtgtcaaggcagaacaccagcgaccggccggactcctccaacctctccaagtgccagaatggaaatgggatgaaattgggatggatttcatcaccggacttccaaaaacccaaggtggatatgattctatatgggtaatagtggatcgattaaccaaggtggctcgattcattcctgtgaagaccacctatggagggaataaactagcggagctctacttcgctaggatcgtgagtctccacggtgttcccaagaaaatcgtgtctgataggggaagccaattcacctctcacttttggaagaagctccaagaagagctgggtactcgattgaatttcagcaccgcatatcacccgcagacagatggacagaccgagcgtctgaatcagattctagaagatatgctccgcgcatgtgtcctagatttcgggaagacttgggataagagtctcccctatgccgagttctcctacaataacagctatcaagccagcatacaaatggcaccttatgaagcgttgtacgggcgcaaatgccggacaccgctattgtgggaccaagttggagaaagccaagtgttcgggactgacatcctaagagaagccgaagctaaagtcagaatcattcgggaaaatctaaaggtggcacagtcccggcagaaaagttatgcagataaccgtcgccgtgatctggaattcgcagtggatgattttgtgtatcttcgggtcacgccattgcgaggtgtgcacaggtttcagacaaaagggaagctcgcacctcggtatgtgggtcccttccgtatcactgctcgacgcggagaagttgcttaccagctggagttgcccgcctccttgggcaacgtgcatgatgtgttccatgtgtcgcaactcaagaaatgtcttcgagtgccatccgagcaggccgactcagagcaaattgaagttcgcgaagacttgacctatgtggagaggccagtgaaaatcctggacaccatggagcgcaggaccaggaaccgggtaatccgtttttgcaaggttcagtggagcaaccacgccgaagaagaagctacttgggagcgcgaagacgagctgaaggcagcccatcccggtctcttcgccagttcttccgaatctcggggtcgagattccgtttaaggggggtaggtttgtcgcgtcccaaatcgactctaaaatctatcctcaaaattgtgcaaaagaataagtaaaattcaatgtgaaagcctccaacaattaaaatgtgcaaagataaaagtcaaatgaggcttggaggatttttgtatatttcctaaaagcctaaaatgcttaaataaattttagtggaattttcagagcacaaataatagttgaaaagaaataaacaaagttaaaaaggtttataaaaagaaaaaccctaaaagaaatctgtgtccccccccccttttcctcttgggccgggtcggcc

SEQ ID NO: 5479 - DNA, 5560 bp, Oryza sativa
cccgcaataaatgcggttaggtgagccccgctgtgctcacctaacccatatacgtggcggcaaacccacagggggtcggggcgccccggccctcggggtcgaaacgggagcagtccgacccctcggggagacaaagggaggtgtggccacatcaccctcgggcccgacccccccccccccgagggggtcaggccacgtgggtgatcgcggctgcccaagcctctagtcatgatactcccggtcccatgtcaccgacaaaataatacttaattaagcacgcattaatctactgcttggtttaacgtgcccgtaggaagggtttctagcccttcccaccgaatacagccttataacataagcttgcatgcaactataatataatccatatataactttcatgtaactaatacaaaaacaacacttgcacagtggtagcacatgcgaatgagcgctcatcgccggtctaaatgttcaacccctgactctttctttctttttctttgtatatatctttccctttttaacatattaccacagtaggagcctatcttgttatttcccataaaagaaaggaattttactgtagcacccgttccgtcgtggcgcttagcgggaaaactatctcttaaaaaccctagttgcgaaatctgtttctttgcttgttgtctagtgtccgtgccatctcagacctcaaatccccaatctattgtcgagttcaatcccgaatccaaatccttcccaaatcaaatccctccgcaaaagtctattttacctccctcgggttcgatgggccgaatccctctcggcccatctccccctccctccccggctctctctctctctctctctccccgctcttccgtgagccgcgccgagccctccctcccgctctcgctgccattcccgccgatgccgcccaaatcgccgcgccgcccgcgcgtgcgcgcgcgccgtggtggccgaccggccagtcgccgccgccgtcaacgcctgccgcgcctgccccgcgtctgtcgcccgtgttgccgctccactccaaaccggtccgccgtcatcgccgtcgtcatcgacccggccccgccaccgccgcgcgctggcttccaagggacggaggctgagccccgcccccctctgctgcatcgctccctctccctcctccttttccccaaagtggcaaggaggcaagcccaatttctctccccctttttcccttttccctcccgccggcgtcatcctcccctccctgtcgccgctttggccgcgaccgtcgagcgctagctccctcccttgaccgtcctaggtcggtttccaaaccaacatcgccgccctataaacccaggcgccctcccttccttttcccctcccaatcttccccgtttttcgcccgcgccattgtcgtcccctctgtctcgccgatcgccgatcgccgaccgccaccgtcacgtgtgccgaaggagtcggtgcacgttaggacgcggaaggggactccggacgcaccctctccttcctcttccccggcccgaggccggagagatcgctcccgtgccgtcggcccatcgtcgctgcgccccgtccgcacggtagtgcatctccccgttctccctcctcaatccatctcttccccttagttttcggtagtagcatgtatagcctccccgtagctagccggcgccgccccgactgctgccgtcgctcgccgtgtgctcgccgccgtcgccgcccgagctcggaagcgcctctcgttgccggcctccctcgatgcgattcctcctaatccggcgtaaggggtggattcccgtagccgtgtggatgctctcgccgccgggaatcggcccctcgtgacctcatcgccgttttccccttctcccgccgccgattgccgccaccgcaatccgccgccgtcgagcaccctcggtgaatctgagtcgttggctcgtctcccctcgtcctgtgcaacgtcccggtgtactcgccttcgcctgtatcgccatggttcgctccgccgcaccgcgtcctccgcgaaccgcacgcatgcgccgcgcctccctccccaaaccctagcacgccccgcgtgcacctcgctcacggtgagccgagtcgccgacaagcgggtcccacctgggaccacgcgggatggacctggcccaccggctctctctctcccctccccgcccgcgcgcgcgccttgggccgccttcttggcccggccggcccattaagctcggccgagccaccccttctctcgggtcgcgccctagccgcccgaggaaagtctaattcccctcccttcttcttttcttttcttttctttttcaaaaaggatttaaataaatccttttcctttagaccaaaaatccaataatcttagaaattcaatatcttcccaaccgtaagtccgtttgactccgttcaacttctaaaatttctcaaatctcgagatctatctaatggcacgcttagaggtcaataatagggctttattttcgccgtttgctgagttgtcccgtttcgcgtgtagtttcggagcccgaagacccgcagtgcgaggatttcgaggatcaagctcaagatatcgagcaaggcaagccacctttgaacatcttgagcctatatttgaacttaattatgttgcttgaaaaatattatgcattgctaggatcgcacttaatctacttgtcccgtctgcaaggcagattggcggacctacctaacttgttgcatttgacccttccattgtaattgttataccatgttcccttgtaaccacctagttgcgcctcggtaatcgtgcactctgcacgagtatcgacggtcgccttcaaacttaaaatttgagaaacatcttgggtaaaacttgggttttacaaaagacttggaaaacccgacacctgggtcggtgcttgcgaacctaaatgaatttccaaaatcgcggaccggggaacgtatcgggtgtacggtttcccgcttttgcacttaaggaccgtttccttggaatttcatccgaacataagacaagtacgaccacatgggtggaatgggacatccctggctgagtaattagctaaacaggggagccttgatgctgagagacaagtggattcgccggggtggtgtcggggaggacccctgggcttcctggcacagtatggtctgggacctaacctgttgttggtctgggacccctctcgtcagcatatggtgaacctgtgtcggctctcgaaatgccttgtcatgaaagccttaaggtctctagtcgtggccgttctgcacgggctggatgatccgggttagtaatgtcgtgtgggtaaagtgtaccccctctgcagaggttattaaactgttcgaacagccgtgcccacggtcatgggcggatgtgaggtgattcctagcgtagttttgtttgactactgctttgtgaaatttgctgatgtggttcgggattgatgtttggaaaatctgcggctgatgggatcagccaggcccgggtggccgtttgaaagctgttggctgggtgccaatcttgatcaattcaaaagactgatacattgcacatactccgaccggatgagtcgcactgtctcatccgtgtcgtttgagaagcactcacctagttgttttagaaaagagttcaaataaaatcaattgcaaaaaaaaaacaacagcctttccttgaagcctgcattaaacacttatttcccataagtcttggcttccgcttcccttttgtaatgcagttgtgagctcgggatctgtccgcagcccaacatgactgtactcctactctataataaagagacctttgttgctgtgatattctgtcttcctgtgataccagcactgtttcctgggactggtatcgattaacaggttaatttggagcgtcacgggctagttccgctcgggacttgttcggggcgtgacatttacgctctctttgttttccttcccaacagaagagaaaggggagggcaccatatgttgtatttgtcattagggcattcacaatgcgcgtgcgtggcgttcggctaacccgagattctccgccaactcagcttggagcgtgaccgaacaaggttcacgtagcccacattgggcactcgttcttcgttagaaaagctgtcgtgcgacgcagggaagaacggcacggccgctctgtgggggtcatggcctcgcgcttcgtggccccgtgcgacgccggagagagctgctacagcaccggagagggaacctcgtcgccgcccctgctcgtcattctcctctccgcgccgccgagctcgtcggccagtctctccgattcgcaactgtgacatcctggcccaaggcttgatagattaatagaatactcataacaacaagtttgcaacttcttttctggaagccgatctccaaagaactctgtggttaagcgtgcttggaattttgggatgggtgaccgaccaggaaattcttttcaggtgcacaagtaaggataaagtgtgcagaaaagacttgtgttggtctgtgagggcaatctatatccaagaaaagctgccagatgtaagtgggcctgacttgggaggggtgggacgttacagcaacggagagggatgtcgcgccggtgccggagggaagaagggagaagccacgggccggatctggaaaagctgccagatgtaagtgggcccagcctgggagaggtgcgacgttacagcaacggagagggacgtcgcgccggtgccggagggaagaagggagaggccgccgtaggcctaccatggagccgtcgccagcatcgtcatcgagccgccggcccattgctgcttatcgtgtccagattcggtgagtcacgggccggatctagagagctcggtggagggagaggccggaaacgaggaggaaacgacggagggagaggtcggaggcagcagccgccgcaagccgtcgagctgggctcaagcggcgtccacgattgagaggcgccgacagggagggggagcgacggagaggagggagagctgcaccgacggtcgggagaagtggagttgtgccagtggtggtggggaaggggaggagacatgtcggcttggggaggttaggggaatgacctggggaggggagagggaggccggcgtactgtgggagattaaaatttgttatgtgtggcttcattcacttttttgtctatgtcgagcacatggtcacacgaaacaagccggatgcactgctaatgcccttatgtgaccaacagtgtgctaaaagcagcgatcaatcacacattgtccccaccagtaagtcatccgggacttgttacaaatagacttcccagccatcgtattatttgcttcattcaagttagtacagtcaatactacaccctttccttccttttttttttcatataggaagactttactactccctctctaggggtcggtttcactgtccttggccgactctacaagctttactgttgaaatttgacgatgactccttttttttttcttcagaagtataatattttgacatcttcaaggtacgaaacgtacgtaatcttgtactatccccaaagttctaaacaatac

SEQ ID NO: 5480 - DNA, 15167 bp, Oryza sativa
cagacatgcagcttgctaaactgacgcgtggtggacgagagtgaccggtctgtgactggtctgacgcctgtcatgtcatcggcaaacaaccgtgcttccacgttgcacctgcttccgacggagtggaggttggtatgacccatcccatcggagggtcattcaaacagcagccattgcaaatctccgcccattaatgagggaggacagggctatcccggtgtcagataaaagtacgagccaaatcttgctcaaagtaggatgggtccccacccaaaagaagggtaggtagaaatggtatatgtggtatccccttgagatataaaaggaggaccatgcctaccaagaaaaagggagaaaaaaaaggagagaggggagctcgtagaaaggacgaggggaaaaatagtagggagagggtctctagagttcaaaggctcttgctcttcagctctttgtaactccttcagagacagatccgccagaacacaggagtagggtattacgcttctcagcggcccgaacctgtctacatcgcccgtgtcttgtgcgtttgctctctcgcgaaccattccacagatcaagggcttagaacctcacttagcgcccccggccgaactggcaaaggggggcccgcgcggtctcccggtgaggagccccacgctccgtcatctggcgcgccaggtagggggcgcgtgtgtttttctaagctctcatcctctttcgtgtgcgccaagcttttcccgttcagcccaatggccgaacgagcaaaagcgcacaacctctctccgagcgctagcggtgacgacagcgagcagaacccgcgtcgtcgagcttgtactccgccgcccccctctcgccgaagtcttaggcgggaggaggcgctcgagggggtcgaaagatccgcgacttcgccgcccatgagtgatggagaaggacggcgagacggggagcgtcgtctcctcgtctacggtgatggcagcacgccccagggcgcgctccaggctgcgggcgcgctcctgcgtcacccgcccgtcgtccctgatcaagagactccaactcgacgttggctagatgacgtggccaacttggtcatgacggcgcagcagcgtttaggcgccggcgggcggtcctccgccaccaaggccactggcgctgctactgccggctccgtgtcgtcgaggcggagggcgcggcgagcggcggccgttgcccgccgttcgtccgccattccctcgtcaatgcctccgacccaagaagatgtgcgtgaggggccggatgcccgcctcaatatcgagcgccggcgcaatgatcgccgtgctgcccacgcatcggagggcgcttcctcgtccggagcgccacttcggtccgggcacggaggccagccccccgtgtccccggttggcggtgccggctgtcgagactttgtggcgagccttcagaacgtccgttggcccccaaggttccggcccaccatcaccgaaaaatacgacggaagcgtcaaccccgccgagtttctccagatctacacgactgggatcgaggccgccgggggtgacgacagggtcatggcgaatttcttccccatggccctgagaggacaggcgcggggttggctaatgaacttgccacccgcgtcggtccactcttgggaggatttgtgccagcagttcaccatgaacttccagggcacatatccgcgcccaggtgaagaagcggacttgcacgcggtacagcgaggggacgatgagtctcttcgctcgtatattcagcggttttgtcaagtccgcaacaccataccatgtatccctgcacacgcggtgatctacgcgttcagggggggcgtgcggcacaaccgcatgctcgagaagatcgcctccaaggagccccagaccactgcggagctttttcagctcgcagaccgtgtggctcgcaaggaggaggcatggacctggaactccaccggttccggtgtggcagcttcagccgcccccggatctgccgctcggtcagggcggcgggacaggaggaggaagaagaggtcggcccattccgacgacgagggtcacgtcctcgccgtcgagggcgcttcgcgggccacccgaaaggggaggcctgcgagcgacaaaaagaaggaggccggcgctcccagcagggagcgcccgaccggcaagtggtgcaccgtgcacaacacctccctccacgacctcgcggactgccgcgcggtcaaaagtttggctgagcggacgaggaagtgggaggaggagaggaggcaggagcgccgtgagggcaaggccccagcggctccctctggcaaccggcgaagtgaggccaagcagaaggtccccgccgaggacattgacgatggcaacgatgacctagggttccaggagcctggggccaccatcgccaccgtcgatggggagcatgcgctcacgtttctcgccggagcctcaaggccatgaagcgagagcttctggccgcggccctacccatgaggcgatgcggcgtgcgtggtggtcggaggttgccctcaccttcgaccagaccgaccacccgccgtgcgttgcccggggaggacagatcgcgatggtggtttcccccaccgtttgcaacgtgaagttggggcgtgtccttatagacgggagagcagccctcaacatcctttcccccacagcctttgacgccatcaaggccccggggatggtgctccggccgtcccagccgattatcggtgtgacgccggggcacacttggccgctaggtcatatcgacctcccggtcaccttcggtggatccgccaacttccgcacggagcgggtgaacttcgatgtggcggacctcagtctgccctacaacgcggtcctggggaggcccgcgttggtgaagttcatggcggcggtccactacgcctacctccagatgaagatgccgggccccggtggccccatctctgtccatggcgacctcaaagtcgcgcttgcttgtatggagcagcgcgcggaccacctcgccgccgcgtccaagcccgagggtggcgacgagaggctcggcacctccgtccccgccgccccgaggcagcggatgatcacgtgcgacgaggtcccggtcaaggaggttgccctgggcgacggcccgtccaagaccacacgaatcggtggtctgctggacggcaaataggaagacgcgctcgtctccttcctgcgggcaaacgctgacgtcttcgcatggagaccggcggacatgcccggggtccccagggaggtgattgagcaccgtctcgccgtacggccgggcgcaaggccggtccgtcagaaagtgcggtggcaggcctcggaacgtcaagccttcatccgcgaggaggtggcgcgacttctggaggccggattcatccgagaggttatccatccggagtggttggcgaacccggtcgtcgttcccaaggcgaatggcaaggttcgaatgtgcatcgactacaccgaccttaacaaggcatgtcctaaggacccttaccccctaccacgcatagatcagattgtcgactccaccgcggggtgcgaccttttgtgttttctagatgcatactctggttatcatcagatttgcatggctagggaggatgaggaaaaaactgcattcattacccccataggaacttattgttatacgacaatgcctttcgggttaaagaatgcaggtcctacttttcaacgtactactcgaatttctttgggtagccaaataggacgtaatgttgaggcctatgttgatgacttggttgtgaaaacacgcaaccaagagaccttactctcggatctagcggaaactttcgaaagtctccgcaccgcccgcataaagctgaaccccgacaagtgcgtgttcggtgtgcctgcgggcaagcttctcgggttcttggtctctgcccgaggcattgaggccaaccccgagaaggtacgagctatagagcggatgcgcccccccagcaagcttagggatgtgcaatgtgtcactggctgtatggccgccctaagtcgattcatatcgaggctgggagagaaagcgctacccctatttaagctcctcaaacgctccgggccgtttatctggacggaggaggctgaacgggccctcactcagttgaaggcgtacctcagttctcccccagtcctggtcgccccggagccagatgagccgttgctactttacctggcggcaaccccgcaggtggtcagcgcggcgttggtcgtggagcgtgacgaggacgaccctcgctccgcgcatccccaccctgtgtcgactcgacccgggagagagcagggaggagaggcccccgagccgaacggtggcccaaggcccccgacggccggagctggccctccgcccgcttgtccgaaggtgccaggcgcccccgacccccgggatggccacggggccactgcgggaaggccgcgcctgtcgccttctgaccccgaggtcgtcagcacagaagccgagtgcgccccgcgcggcctctcggagcgtgacgaggacgaccctcgctccgcgcatccccaccctgtgtcgactcgacccgggagagagcagggaggagaggcccccgagccgaacggtggcccaaggcccccgacgaccggagctggccctccgcccgcttgtccgacggtgccaggcgcccccgacccccaggatggccccggggccactgcgggaaggccgcgcctgtcgccctccgaccccgaggtcgtcggcacagaagccgagtgcgccccgcgaggcctctcggacgaagagcgccctggagatgcggcccctagtgaagaagatcggccccgccgaaaggtgcagcggcccgtctacttcgttagcgaggccctccgggacgctaagacccgataccctcaggcccagaagatgctttacgctattctgatggcttcgaggaagttgcgccattattttcaggcgcatcgggtcacggtggttacgtcttaccccctcggccaaatcttgtataaccgagagggtactggacgggtggtgaaatgggcaatcgaactctctgagttcgatttgcgctttgaaccacgccacgcagtcaagagccaggccctcgccgactttgtggcagagtggaccccggccgctgagcccatctccgtccccgaggccagctcgggcccctcgcagctgcctcacaccgcctattgggtgatgcagttcgacggctccctgtctcttcagggcgccggtgcgggggtcacgttgacctcgccgagcggagatgtcctcaaatacctggtccgcctcgactttcgggcaaccaacaatatggcagagtacgagggactccttgcgggactcagagtggcggctggactggggatccgccgcctcctggtgttaggcgactctcagttggtcgttaaccaggtctccaaggagtaccagtgctctgacccgcagatggatgcttacgtgcgccgtgtgcggcgtatggagcgccattttgacgggatagagcttcggcacgtgcccagacgggataacacggtcgccgacgaactctcaaggctcgcctcctcgcgagcccagaccccaccgggcgcctttgaagaaaggcttgcccagccgtcggcgcgacccgacctcctaggggagacggacgcgcctgaacggcccccgaggcccgtcggagtccaggcctcgggacccgaggggagcgatcccagctcccttagattgattgcttggatcgctgagatccaggcgtacctcgcagataagactctacccgaggaccgcgaagggagtgaacgcgtccagcgcatctccaagcgctacgtactggtggaagggaccctctatcggcgcgcggctaacggagtcctcctaaagtgcattcctcgggaacaaggcgtcgagcttcttgccgatatccatgaaggcgagtgcggagcccactctgcctcacgcaccttggttggcaaggcctttcgccagggtttctattggccgacggctctcaacgatgcggtcgacctggtccggcggtgcagggcgtgccagttccacgccaagcaaacccatcagccggcccaggccctacagacaatacctctttcatggccgtttgctgtccgggggctcgatatcctgggtccgtttagatgggccccgggcgggttcgagtatctgtatgtcgctatcgacaagttcactaagtggcccgaggcttatccggtcatcaagatcgataagcactccgcacttaaattcatcaagggcatcacagcccggtttggggtgcctaaccgtattattacggataacggcacccaattcactagtgaactcttcggtgactactgcgaagacatgggcatcaagctctgcttcgcctcccctgcccaccccagaagcaatggccaagtggagcgcgccaacgcggaaatcctcaagggcctcaaaaccaagaccttcaacatcctcaagaagcacggcgactcgtggatcgaggagttgccagcggtgctctaggcgaaccgaaccacgccaagccgagcaaccggggaaacgcctttcttcctcgtctacggcgcgaaggcggttctcccatccgagctcaccctgaggtcccctcgggccaccatgtactgcgaggctgatcaagatcatcttcgcagagatgacctcgactacttggaagagcgaaggcggcgtgcggccctccgagccgcgcgctaccagcagagcctgcggcgctaccatcagcgccacgtccgggcccgatcactctgcgttgacgacctcgtcctacgccgcgtccaaacgcgtgctggactgagcaagctctcaccaatgtgggagggtccgtatcgagtgatcggcgtcccccggccgggctccgttcggctggccacgggcgacggcacagagctgcctaacccgtggaacatcaaacaccttcgtcgtttctacccctagtaggggtcgggtgtcaggtctcgggctcgggccaaccccgcaccccccctgggcgtgcagggttggccgggggctaccacatgcatatacttatcttttttctcttccgtatttcaataaaagcattttcgatttcctaaggactgtgtctgtgccattgtttcctttcaaagagtcttggcttgaattagcatgctcgtgctcgaccctgccctcggtgtcccgggccggcggaaatcgccaaacagggcccagaatcgagccgtgccccggggcgtggtgaactccgggggggaatcggcaaaggcccacaatcgggtcatccataaccctcggtcaccacgttcccggcctggccagtctcgacacgtggatctccccaggcactagccccgacccgcgccatttgaggctgggacctgggcacgagccctcgttcaaaccaagacatagaaggaccacggcacagaccatcctcgtctcatacacacaacaaacagagctgacacaaaaatttcctctttatttgattgcagattaaattagtttgtacaagaagggggcccgaatgcctcggaagaagaaaggaaaaactatttaagattggcgggggcctgggggctcacttcgaggctcccgggtcgccggcctcgtcgtcgctgtcgtccacaccaccgtcgccgccctccacgtcggagtcgagggcgaacgcgagccgaggggccgtaccctcgaagctgtggacgatgtgatcggcggcgtcccggacctgcgcgcgcgcgtcgtcctcggttccgggagggaactcgtccagcgccgcccacggggagaagtccgggtccctggcctggtagcttgccagtacaagctccactgccccccgggcgaggtctctcgaggatgacttgatcgtctcctcgagctcctcgaggagccgctggagagtcccggccatctctgagaggcgctgggcgaggaccccatggttggcggcatatttcgcgatccgcccgccccagaggcccgcctgccgcccagcgcggtctagacgggagacggcgtcccgaagcatgccgggccctacctcgcctgccaagcggagggcctcgacctccccggcggacgagtccagcgcgccctgcagctcggcgatggtgtgttcggcagctgcgaggcgggcggctagatcgccgtcgcccgtggccgccccgccgctacgcgccctcgcatccagctcccttgcccgtgcctcgagctcagcggcccgctgatccagtgcggccctctcggcgcgggcaccttccagattgcgacacgtttgtttctccagcgctgcctcacgaagggcaggctgtccgccagcctttgcgccgcggcctcggcctcctcgagagctcgctcccgctcggtgagcgcatcctcgcggaggcggagtgcggactcctcttcagcacaggcggcttcgtgcgccgccagtgtagcctcccggatggcaacggcggcctcgcggtccgccaggtccctctccttcacacaggcgcgctcttccagcgccgtggcacgggcctcaagggcttcttcgcgccaccgggacgccgcctcggtctccgccgcccgccgtttccgggcagcagcggcttcaaggaccccccgggcggcgtcgagcttctttcctagctccgccgcccagctcccgtattgaaggcggaggtcgtcctgcgcctcgttcatcactgcggtggcgatgagggcagcctcccgctcctcctccacctccctggcgatctccgccagctccttccgacgggcctcgagctccgaggtgtgccggcggtgtgccttgcggcccgcctccaccatggcctccaccgagcgtcgcccctcttcgacacgtgcccatgcagcgtcgagctccgcccgctctgcctgcaggacctccatctgggcacttaacccgtccaacactgtcgtgttcgcggcggccaaggcctgcagaagggcctctgcgctcagtggggcagcggaaggcatgggggagagccgcctcggtgaggatgccgcacggctcggcccgccgatcgacgtaccggactcagggacgacccccggacctggcttgtcctgagcgtcgcccgaggggtcgggcccgagcggtgcgcccgcggcctcgtcgtgggtggcctcggaagtcgtcgtcgcctcgggcggagtcgggtcgggggcttggcaggccgcctggcgtgcgcgcgccgcctccgcctcccgggcggactcctcggcccggcggagtctggcctcctcccgagcggcttcctcagcccggcgagcccggacggcctcctgggcagcctcctcggcttcccgaaggcgatccgcggcttctcgccggtcagtttcccgtctccgggcctccgcggtcgccgtatcctcggcctcagaccggccggacttggaatggcgggaggggcgcgacgggatctcgctgaagcagaagaaaaaccagaagacaaacaaaacgggtgagtgaaaacttgcattgggagaatgaatacagccacagtgggcgcaggacgaacctgcgaggaggtcggttgaacgaccaccttgggggggagataaggtttccccggtatgattcggtcccccccatcttgcagagccgtttcttcttccgctccccctcgggctgcggcgtcggcgcggccccctccgggcgcctgctgctgacacgcgccgccccgccccctcggggaggagatggggagggggtaccctcttgcttcctcttccctcgggcgtcggcagggcggctgccccccgggcccctgtcacggggcccagaagcacgaccccctcctggggtagattgttctcccctgcggctcccgcccgcgccatcgtggcctcgaggagcccgctcctccgacgccccgaccgccatcatgatggtcaggatgttggcacgatctggatcgctgcagagggggaggactccttgggggatgagggacgcctccacggagctgagattcagcacccgttggaccactatcttgaagtcctcaggggcctagtcccatctgaccccttggtgggtcctcatgtagtcttcggacccggtgtactcccaggcgccccgggcgcgccgctggagcggcgcaatccggcgacgaaggtagtcgccgtacagcatggcccccgtgagcccctgggatcgcagacccgccagacggtcaagaacggcgtcgtagccatctcccagatctagcggcgcccgccaactggaggcctgcgctgggggctggctccgaagttggaggcgcgcttcgtcggcgaggggggtgtagaaccagtcactcttccagtcgtcccacttcttgcggaggacgcagggaatgtagcggctcagcgccggcccccgcggctggaagtagcagccaccaactaccgacggcggcgacactggctgtacggtgaagaaccaccgaaactgccgaagagatgggcgcaccccgataaacatctcgcacaggtgcgcgaagatggccaacgtcattatcgcgttgggggtaaggtgcgccatctggaggtcataaaactccagaacatccatgaagaaagaagagaatggcgggaccagccctgccattgcgaaagggaggaagaagacggaccgccccgggtagtgtggtaccgggcgtccctcgcctagctcgaccacctcccggccggtggcagatgccggcatgaatcggcgcggcagcccggcctgcctctcgctcacgatgcgggaagacggcagcacgctaccgtcgagtggtgcggagccccgtgccatgacgccggcggaggaggagcttgaaaacgagtgagtgcggcgagggtagggcacaggaaacaaggagttagggcgcaagcggcgaaggcaaggggaataatgacgagaggaaggaagcgaatctcttcctcggcgtctttatacccttgccaacgctatgcccggctcctcgcttcccgcgcccactatctcgccccctcgtttctcgcgcccacgtctccactaattccgctcgcccgtttgcggcgcacgaggcggatgtgcggctgtggcagttgagatgggacatatcgtgcgcgcgttaactacgctcgccgaccgaagcgccatcatcatatctccaggcaaaacgaaccggctcgtcccgattcgcgtgctactcgagtaatgtagcggtcttgaagagaccgctcattatagacagtcggttttccgttgctgatgtgcgcgatttgcgaccgctgggtttctgcccgcctgtagagaccggccccacctgtcaccaggcctaaggagtggcgtcacgcccgagcgcttccttcgaggggggcgatcgccctggcataacgccgggggctactgtcggtgacatgggaccgggagtatcatgactagaggcttgggcagccgcgatcacccacgtggcctgacccctcggggggggggggtcgggcccgagggtgatgtggccgcccctccctttgtctccccgaggggtcggactgctcccgtttcgaccccgagggccggggcgccccgaccccctgtgggtttggcgccacgtatatgggttaggtgagcacagcggggctcacctaaccgcatttattgcgggttggacgagcgcgtcacgccgcatgtaatgcagcgcagcgcgctcgcttatccggtccgtgaccgggcgcagcgtgtgaccggtcacagaccggtcagatcgcgggttaggtggtggcaggtggcctgttacacgcctcgccccgtcccgtcggattgatgagagcctccaggcacttgtccctagccggagacggcgtgccagctcctgaagatggcacgtcggtcccggtcagatatatgccaggcttcatcccaaccattgcaaggaagtcattgtatgaagaagggcagacatgcagcttgctaaactgacgcgtggtggacgagagtgaccggtctgtgactggtctgacgcctgtcatgtcatcggcaaacaaccgtgcttccacgttgcacctgcttccgacggagtggaggttggtatgacccatcccatcggagggtcattcaaacagcagccattgcaaatctccgcccattaatgagggaggacagggctatcccggtgtcagataaaagtacgagccaaatcttgctcaaagtaggatgggtccccacccaaaagaagggtaggtagaaatggtatatgtggtatccccttgagatataaaaggaggaccatgcctaccaagaaaaagagagaaaaaaaagaaggagagaggggagctcgtagaaaggacgaggggaaaaagagtagggagagggtctctagagttcaaaggctcttgctcttcagctctttgtaattccttcagagacagatccgccagaacacaggagtagggtattacgcttctcagcggcccgaacctgtctacatcgcccgtgtcttgtgcgtttgctctctcgcgaaccattccacagatcaagggcttagaacctcacttagcgcccccggccgaaccggcaaaggggggcccgcgcggtctcccggtgaggagccccacgctccgtcatatttaataaaacttttaaattctattaatataatcttttaaagtaacttcgtttagaatacttttacaaaaattaccattcagcagtttaaaaagcgtgcgcgtggaaaatcagaaaatagaagtttggaagagaacaaatcctaagttacatttgtaaatttttggatgagttttctatggaagttgtatatctagtccttattttctaagcccagtaattattgcagcagacatgaaataatgcaattgcccctgaaaaacaaacattctctggaaactcaagctgaaggcacatacttgcgattatgttggagtccaaagtgcttggatgcaaaattccctttgtctctactcgctcacgtagcgcttgctagcattaagaaaggactcgctgtacggtcgtagataagtccaccattccgcgttaaagcgttttcccgcacgggctgagctggtgcacctcccacgagccttctcatcccctccggcccatccacctcgcttcgctagctagctgctctccccacctatataacagcgagcccgcccaacacccgctcgccctcctctacttctgccgcgccaccaaccatccatcgctgacgcttccaacccaactgaattcaaacgaagcgaacaacacgaaccatgcaggcgcaatcccgcctcgctgctgccgcgagcggcggcagcggcagtggaattagcgggagcggtggcattagcaggttgggtggtggagcgggggaggagcacgaggcggtggtgagggagctgacgcgcgggcacgagctgacggcgcggctgcgggcggaggcgctgcgggcgctgcgcgggcaggggcaggccgaggccaccgctacattcatcctcggggaggtctcccgcgccttcaccgtctgcctctccatcatggccagcgcctccccgtccgcctcgccgccacaaccggacgagacgccgccggccgactcagccgtctcgccaccaccaccgcgcgcggcgagagaggacaacgtcccgcgaaagtgagttattctgcacgtgctatacagttatactggaagcataaataaatgcctagctagctagcttccagccgcagaactagtagctagctaatcaattagtacaagatcagctgggttaaatatgctataggaattgagtacgagtttatctgattcatcccgtgcattgatccacaggagattattgacagcctctccttacgacgatgggtaccagtggaggaagtacggtcaaaagaagatcaacaacaccaacttcccaaggtttaaattaatttctcaaccccgtgcctgcaggctagatatatcatataccttaacccatggattaattaatcgacaaccctgctcatgtcaaaatgctcagataattaaccatcgcgactactcgttttgtttttaaatgtaacgagattatggttacgaatttagatacgcatgcatcttctcttgtccagattcatagccataatttttatatttagaaacggaaaaagtatatatttagcaaaaatgggtaatttaccatgtcgttgtaaataaaaaaccaaggtgagtacttttggaccatgacggttctagctagctagagacagcgtataggagaaaaggtattattcgtgatgtattgattggactttgttggatagcgaaggcgtggcaccggggacggaagagacaaacggaaaatgtcgcttgacacgcaccctacaactttatagattcttttgagcagccaggcgaattaattgatcgccacatgtttgaaaccatccataaagttaagccttatcagttggagaaaccaaagttaagctgattttttttctgtcatgtggaaattaagctgttctgttttcttcacatgatcattttgtccctggtgtcacgttgtgtagcgcgagcaaataactgtggtttatctgcgtgtatcactgtgagctctctgctagtttaaagctggagtttgggttatattatatcggaagcatcttgtgacgtcatcacctaataattatttcttgtgatgtgacctcatcaggccagcttgctagctagccgccatgttcttggattaggttacctaattatgtatacagtacacgaatcttaattaaatcttaatcgtttgttatactgatgattcttcctaaacacgcaggagctactacaggtgcagttaccaccgggagcgcagatgccccgcgcagaagcacgtgcagcagcgcgacggcgacgacgtcccggcgctgcacgtcgtcgtctacacccacgagcacacgtgcctgcagggggcgcccgccgagcttcccgacgcggcgacgaacggtggcgccgccgccgccgcgtcgccggactacttccccgccggcggcgagacgccgtcgtcgctgcggcggctccggggcgtcggcggcggcggcctgcagcctcagttcgtggaccaccgcgccgccatggaggagcgcgagcgccaggtgctcgtctcgtccctcgcccgcgtgctgcaggggcggcagtgct

SEQ ID NO: 5481 - DNA, 8263 bp, Oryza sativa
ccttaccatgaacttggtgtctccttaagggcaagttttatggtagaggtgactaccatatccaatttcatacatgacatacataattaaattaagaggtgatatgtataataggctatctctatcacataattcccaatatctctaacactctcacatgtttattgaagtttgtgtaggggctgccccttgcatgagaggtgactatttctctctcatccttcttctctcctccacctcactatttagtcttttgtgtcatcttgggatttatgtttgaatgtccatagtacttgccctaagttatctacagatactccgatacttcgatcagtttgatgagtaaaattttagcacgacacttcgaaaagttcatcaccgagaagttggctactctaaaaaaaagttagcatctggtacagtgagctcgaatctgaatcattttggagcgaccttgaccggagcgaatctgtgtggtacacttgcggttgtttttcggtcaatcccaatcccctgcatgcgcccttccctgcgcgcgtatgcatgtgatcgatcgatcatgagctctctgctctgtacatctggtacgtgtgcacgtgtgatcgtaatcttggttttactaaagaaggagatttaggcgttgatcattagtagaaaagatttagcgttgatctgttcctgccaacgacgacccggggggaatcgacgcccgtatcttattgaaaccaatcgaacaatctatctattaacttattaaagtaatagaaaaataagcatccacgttggcttttacggtctaaaaattattatattaatcggagaaaaataaaaacaaattccatataaaaatacaatttaaaaagtaaggaatattggaagaggagactagaagcctccacgctcgctctcccggcctagaaattctcatatttaaaaaataaaaacagagtccatatagaatacaatttagaaatagctaaaattcagaatttaaaaaataaacaatattagaagaggagactagaattcatgacgatatacaatttagaactaatgaaaattcgaaattaaacaataataaaattaaaattaagttagagtccatatagaaatataattaagaaataatagaaattcggaattagaaaacaacagatattagaagaagagtatagagtccatataagaatttagaatgaactaaaattcggaataaaaattaaaattaaagatagaatttagagtctatatagaaatacaatttataaataataaaatttgaaattaaaaaatttatggaagaagagtctagagtcaatatagaagtaactgaaattcaaaaataaaaaaaaagaatattgaaagatgggtttaaagtccacatagaaaaacaattagaaataatgaaaattcaaaattttaaaaaaaatattgaaaaaagagcctagagactatatagaaatacaaattacaaataacgagaattcagaactaaaaaaatgaggaatattggaagacaagtctgcagtccatatataagaatacaatttagaaataactaaaatttgatattaaaaataattaataactatcacgtatatacaatacagtatgagacagtggtagtttagtaaagttagtacaaaatttaaaattatgttatcattttaatatattttaataataaattgagaaaacatatatgtggccaccgtgctagttctgggctgtttagttggaaaaaaattttgctcctgtatatcacatcggatatacggacacatatttgaagtattaaacatagtctaataacaaaacaaattacagatttcgctagaaaactaagagacgaatttattaagcctaattaatccgtcattagcaaatatttactgtagcactatattgtcaaatcatggcgcaattaggcttgaaagatttgtctcgcaattttctgacgaactatgtaattgatttttttatctacatttaatactgtatgtatgtgtctaaatatttaaggtgacaacgtgaaaaattttgttttggactaagcaggccctcagttgatcagatgagagatccacatggaacacaggactctgaaccatgtgatgatgtaacgtggcgacgatcgaggacacataattaaaaacttggccgcgacacgtttttggcaacttctacgcgcggccgtcgtcgtgactctcgccatagttttatcatcatcatcagcgatcgatcgatcgagtagccgagtacagtgaccgagtagcactagtgtacagtgtggctcctcgctccatcgatgggtcgcgacaacgccataattggggacatcgacagagtagttacgtgtactgtagtagcggaaggggaatcacgttgcggccaggtgatcgagctgccgaagccgagtgaagtggcggggcggagatctcgttgtcgatcgcgcagcagcaaagcgggtgctcggtcgctgagcctgatttgctcccttgtcagtcgcgttggttggccttgggcccttgggcccgttgcgaccgcggcgttggttcgcgcgggcttccttcccaccccgcgttggtgggggcggggttctataaatacgggacgcgacgcgatgtgcggggtcacttcactgcacggcgtcgcggttttcccaagctgagagttgtcgtgcgagagtgaggagcatggcgatgctggggagctcgtcggcggtggtgctggagctgatgacgatggggtaccagtcggcggcgtacctcggcgagctgctccgggcggcgtccccggcgcaggcaggggatgagcagcaggagctcgccgcggagatcctccgctgctgcgaccgcgtcatcgccaagctgaaccggggaggagccactggtgctactaccggcaagaagcggaaggcggcggagtccgccgccgccgccgccgtgacctccccttctctccccgtcacgccgaccaaaagaaggtgaggttccccttattgttttttggcgcggctaccgcgagacatatcgtggtatcaaaaatcgaaaaaaccgtgtggtaaccgtaagatatatcgtggtattaaaaatcgaaaaggttaccgtgcatgataaccgcgataatcgtgtggtaacggtacggttttgtactctatcatgcaaggtagtaacaggtgatttcttggtttggcgcagggcgcgtggcgcggaggcggtgagggaggtgaggagcggcacgacgacggacgggttcatctggaggaagtacgggcagaaggagatcaatggctgcaagcacccgaggctctactaccgctgcgcgttcaggggccagggctgcctcgccacgcggcgggtgcagcagtcgcagtcgcaggacgacccggccgcggcgttcgtgatcgcctactacggcgagcacacctgcggaggcgacgccgccgccgccgccgcgtgccgggacggggaactaatgccacctgccgtcatcaactccggcgcgtcgagcttcgccgccgcttggaacatggcctcgcgtgagccggcgtcgtcgctcgccgtcgagcggaggagctgcgacggcgacgctcccagcgagacgtcgcaggggtggtctccctccttctcgtcggaggtggagctggacgtggtgggattcgacctcgccggagccgactcgtcggcgtcgccggtgtgggagttcttgaatggcagcttcgactgggaattcgtcatcaactccctctgaattttcgatgcttcgtgatcagtagcacaccagctgccccaagagtgcagtagtctttgcaaaacgcacaaaatttcgcgggaactatcgaatttcccgcgtttgcgcttaagttaatagcctcagtagttcgtcagataatcgcacgcactattttaattcaggaagggatttagattgacaaagtatattaggtgagagttaatatgggagaattcgtaatgaagagttgaatgtgttgacgttgacgtacaggggaaaaacacatgctaagaagaaaaatggcaggtgaaaggggcaagaaatggcaaagctgagcaacagagcaggtaataatagagaattgctactcctactacttgcaagcatatatgtccagaagagcagccaaagagaacacaagaccgtcagcttgacgcataactgacgcacttctgatggtaacaaaaaaccggccaccatgtcccatgtgaacgaatggattcattagttgtaataatggtaatagtagtgacactcaattgcaatatcatgcttggtacagggttaaggatcagatggttagtttaaccaccaatagcaacaagctgaaacgaatactggttttgctggatttcactggatgttgttgaatatcacaagcttagagcacaacaacgttgcatcaaataaacagaagaaacagaaaacagctaggtacatctatgacctttggaggtcaatttcttattgttgttcgaggcgaatgtgtatattacatggggagaacaaaggagcgcaactgcgaggacgagtatgcatgcaagtcgtcttctgaacccaaccgtcaaagtccacagccacttggggactaaagacaaactagggttgcttgagtttgatggggatggaaacggaaagcaaatgggccagtcaatcttcaaacccaagttcctgtgatcatctgattcatccagggtgatgtgtaacctagagaaatgccatgttgtgagttcaacgacaattggttttatcatttatgcgtaacatcatgtaactagttcagttatcatttatcaaagcacataggcagtgtttatagacctatttgtatactgtacatgcatgggaaaatagcatgaaagtaaaactgtcaagtgttaccattagttctctgcagtactctcggagcttggacctttgtgaccaccagtcataatacgatgagtgtaaaaggctgtcaccgccccactgcagaacaattcaaaactagtttaaaaaaataaaggttttcatacatacaacaaatgtatttcttctgtataagcttaaaatggccatagtggctaggaccccaataaaaaaaaactgtgatatgtgacacgcccctaaagaaataaaacacagcacgataaccactgaatgaacaacttcaaaatgaaacctagtaagtcattggagatttggaataatcatggccaaatatattgtttgccatcaactacttacaggtcactgcatttaaaggaacattgctcatgtttggtttgacaagtttagttttgaagcagcacacaacgtgccaacagttttattactccctccttccaaaagtctaagacctatttctttttgcaccaagaccaagaagcaattaattcattcactatgtatacaaccaataagtaatagaatgacttcttgggaatttaatttagcacatggtgactacaaataggacttggacttttggaaaaaccaaagaatgaaataggtcttagacttttggaaggagggagtataaaaaatggaactattaactgtggaaaaaagaaggcactcaggtgatattcagcgaaaagtagtatttgtgacagatgtaaaaaaaaaactgtcagactgtcacattggattgcagtctaggtgatagatacagtttggggaaatgtacagtaaataagaagaaatctataagaaaaaacacaggataacaggaacatcaaaggcatatgggtaagaaaattcttgtataatcaaggcaaattctgtacaaggaattgacgcttactagtcatagaaagaaactgtttttaagaaatctcatcgtaggaaccaaaaatatgcaaggatcaccacattacatgttaacacattgctagatgtctgttagtcaatatcagagcaagtacaaaaattaagcatgcactcacctgagaaggaccacgaaaatatttggaaaccacccatactacaccatataacaaataaaaaaaggttaaaactaaattatggtggtgagaacaagtatgaatattagaatttagcaatgcaattgaaggcaaagaaagaaatcatacgtggaagaaaattaataattccctgaagaagatgacacttgcaattgctgcatgaaagtcaaatatgtcaataaatttgcaatgtaaaaggacaacaatccaatgacttggttcagcaagctaaatcatgggttcatttttcaatgtaaaatgatgatgaattcttaatttccaattagataatagctagaagtctgaaatattcatacttgtcatccctgtttgatttaacttgaactaatatggatatatccagtaactagacatgtcacataaaaacagagaacatgagtatcaaggatcaacacaagagaccagctatgctactcttatgccacttaaattatgaaaagggcatacaaactgaagagaagaaaagacagaagaaatgaactaaccagcttgtcctttcagcagaagacgaggacgacggccacctgctctttgagatctcaaacttgagatgcccatagctaacagcgcaaagccaagaataataccaaaacgaattgcagatgtcctcccagtaagcatgaagttcaggaaacctcctacggtaagaaaggtacctacaaaaaacagggcaggtccatgaactaaagttgagaacctacataacaaggcagcattaaagtgcctacacaacgaatgacacactttctcggtttattacgtgtttgtcaattccccagtatcaaattaattatcaacggaaattctacaaagaaaaatatgtaatgcattttagttaccaaagggaatgcccacgtgataatcctcatactctgatatcttcaacttgccaagagaattgaatgtctcgataatatccttaattgagtctggcgagttttgagccgcgagttttagatactcctgtccctcctcaccaacctctgtggcaatcacgctgagatccttctgtgctttgtctgcgtggatcttcagcttctctgaggcctctaatagcacctcccttgccctctgggagtagacaccatacgcctgcaatgtcaggccgtgcattcgctgcgcctcatccttgaactgcttaagcatctccttccacacttcttgagcttcctcaggcttcatctcacccttccctttttccttgtcatcacccgattctgagcccacctgaattcaggcaaactcaaccacataagttgtgaactctagacaaatgttttaagcaccacaatttagcaacagaataaacaaggaatttgccacaagaactcagttcaaaaccctgacgaaacgcaccgacattagtcaaacatgggatttatttagcgcaatgaactgatcaagacatttggcatctcaaaaagcgcattaacattaggcaaaactgtttggtatgcattacgtatttacgcttcgaaatagtcagacaaaaatcacttgacgcagcaaaaaattgtaaaagcacaccgagattatgtcatccgcgcatcacgcacagaaaatgggaggggaaaaaaaactagtcaaccaaataaaaccacacagatcggattgacagtaacaagaggaatacgatagaagcagccaccagcgggtaggatctcgaaagggcgagactactcacagattcctctccggcgaaggtggcgatgacgcggcgagtccgcggggcgccccatccggcggcgaggcgtgaccccgccgagagcgccctgagcggggcgtcgaggcaacggcggcggcgggtggagggggaggaagcggtggcgcacgccaggcgcaggaatggggaggaggaggcgagcgggtggaaggcccccacgcgggcggccggcgcgggggaggcggaggctgccgcggcgtggacgagcgaggcggccatgggggggggggtggggcgctccgcggctgcgcccctcggggaaggcgggcggcggcggcggggacgcgacggcggaggcgggcggcacgaggggaacgcgaggaaaatgggggaagaagaagaagaagagtttggtggggttttcgtgtgagggggctttcggtttcggagctctcggaggtgtttgtgtaattgtgtttggtgggctggaattcgtttcgttttcagctgtttcaaccgggttttttaaagtggacgttctgtcaatcaaacctttggccttgtgctcgcggcaagaaaatatgcgccgtccattggt

SEQ ID NO: 5482 - DNA, 23503 bp, Oryza sativa
cagcaacaggattatcaagttgcttgagcccagataacttctgtcctatgctagcatccacaaaggaatgagtgctgccagaatcaattaacatcaataattcaaaaccctgaatccacccccttaatttgattgatttactggattctatcccccacatagcttgctgagatatagccataagtgtctccttggtgtcattttcatcatcagtttcaaacacagcttctactgacacagcttccagaagttcttctactacatgcaactgaatggtggtggcacatttatgttcttttccccatctttcaccacaagtaaaacacaaccccttagatctcctatatgctttaagagctgccaacttgtcatctcttgccctagctgcatcagttcctctcctatcttcagaattggtgatactgagtgttctattgttagaagaagagattgggcggtggggtctggttcccacaattaggtcagatttcttgtatgacagagacttacaaccctctaatgcctcctccagaagtaaggccacagaacaggctgcatctaaatcagggggtttctgtaccatcactacagttctgatatcatctcttaacccttcaataaatttggtcacaaaatagtctggtatgtcagagttgccataggccatcagctggtgcataagattatcaaatttttccacatattcactaacagtcccagtttgattcaaatgaatccactgcctgatcagttctctttttctgtctctagcaaagcgattacacactatctcacataggtccggccaggaaattcccccaagttgtgttctgacagattgtaaccaaaaagcagcgttgcccacaaaattgagagtagcaatttttacccaattggcaggcaaaatcccatacagatcaaagtattgctcacagttagctcgccacatttgaggactatcaccactaaattgagggcacaacattggcggcacagcaccactgaaccccacagctccaagatcaacatccaattgcttatggccaagatcaagggaatagtgggcatggggaaagagattggaatcgggcgtaccggagaactttggagatgatggccccgaagcggtcccaatcttcccattgccacccgatgtcttctcagtcttgatttgccgctgaagagtgctctcgatcagatccactttggtattcatcgcctggaaagcttctccgatatcctcgaccttcctctccacggctggaattctagattccaccatcttcttgagctccagatactccgccctagtgcgctcatccgccaccacgcgcttcttctcgttctcctccaccattttcagcagcagatccagcttgctgctatcctgcgccatctccgagtctcggtgttagggctagaccaaattccgctaacctaggggaggcaagttgccttttcgcgggattaatccgaagaaaaatcccaatcctccctcaggattttgcagcagaattcggtagaactagcacaacggggatgaggctctgataccagattgttaggttctctcgaattcactcaaatagcacaggattatggcaattatattggttgtattgctccaattcaacagaattgagcctccgccgccttcgcctccaaattgccaaagccgttgttcttcatgttcgtttcagtatttaacgatacaagccaactcccacacgcaactctctctcacgggtacaactcacgcacgccagttgtcacgccacccactttgcgccatggtactttgggttgggcttcttgggccttgctggacgtgtcttctgtgtgtcatcttccttagtctgagtatcctcctcgcgtgccaccagctcgccctcttcagttatctgctcttcttctccatcatcttcagtaagcttttcctcctcttcttcagccagcttctcttcttcttcttcagcgacatcatcgtcaggtggaacaggtggacacctgacactctctcgcctgctaccgtcgtcgccgcctcccctgtgttcccctccgcacgcctccctcctgactacgggcactgttggtgacggcggtggcggctgggtcaggtaaggtgagcacgaggcgtgtgccctctgcctccctcctggccacgggcaccgggcgtcttcggtgaaggccacagcggctgggttggcgaggacgagcagaaggctctggaagaaccggcatctggactgcaatgcaacgcgtcgccggaaatcgggtcaatgcaagtggagcaccattcaagcaactaagaaaagtagtagttgctatgtctgatcatttgcccgtgtctttctgtctttcatcaaaatgttggggtgttggtttctgcaattctgctattgtttaaccaaattagttcctcggacctcagtcttgctaaaagtgatggggtgtatgatgtatcgctcacacagtcacactgggtagactgtttgcagcaatgacaaaggcttatgaattagtatacggcatctttggtgttctgaaatctagaatgtgatgaattgatgtgtaaaaaagattgtgattgtttgtctgaggttcatttctgcaagatatattgggtacaggggtagcagcaatcctgaaagaacacagcattaccacaagtgcagttgtgagcagcgatcatagcagaccatctcttttatttggctttgttcaatatcatcgtttctggacgttcacatttatcatatttccatgttctagagaaaaagacaagcgtgcatggagtttctatgaaaaaaaaggtaaaaagaccgaatgaacgtacagatcttcagaaatgttcagaaacgtgcagtgcaaatgttcagaaatcaacacattgtttgcaggtcttgttgaatttgcacgccaaggctttgaattatgtatgcgctagtgcgatccatggccaaaaagaaagtctagcggaatgtgtttttcgccggcaacaggctgtgaattgcaatcagccaatcacttctatctctagataaccaagctcctctggtcgccggcgtctccggcagagatcttcccagccttgatcgacgccgacgagggggcagctacaaggggaacgatgtggatgaggacgagagagcttaattagaaaggcggcgccgcggcggcgacggcaaatgcggaaggaccgctgctctgcggagccgatagaggcgtgcgagccgaaccgagttagccgacgtctgtgtccaagtcacgccgcctggagccccgcggggagcgccgtccgatccaaatgtaatccacgtggcattcatccgggccagggctccacagccaccggtttgcatccggtctccaccaaaatttttttcctgctacccgctgtgtcccggtttcacggcagcatatcaaacttatccaggccactggttttcggatccaacggtgggtgtatctctagtacacgttaccgtgcatcgcagttgcaggcttgaagtgcaagcagacaggcagagcaattcccacatggagcaaaggaacaggaaaaatcatggtgtaccggccgccgcggccggctctactccctacgtataaaaaactacggacctatttagattgtagccaaaataaatcctatcaaaatttagcaatttaataatattgttaagttttgacaaaatttcttatgtatttttcaaagtttgataaaaaaactaaatggatatatatatttgacaactttatcaaaatttggtaaggttcagtggtggatctagaacttttttttttagccgaggcaaacctaacaatagaaaacaaattaacacgtaaacacaaatacatgtagcattttatcatggatagaagtaaaattgagcgattagttaatgactgagtatgataattagtgctaatctaatggtgcaagtacagctaggctaatggctaagcaccatagttagttctaatgcttgaatgcatgcggcggagcccgggcgtctgcctgtgctggccggaccttggctccgccgctggtaaggtttatttcgtatacaatctaaaccggccctacatcaacctgatcgatgcatgccgtgtgcccatgtgcatcagcgagtttgcgcgagaaacctctaaaatgattttttagggataggtagggagctcctgcaatttcagtatagaagaagagagttgatccagtttataaggaaaatcgaaaaaaaaaacttaaactccataatgttttcgtttgcgtaacccaatcgtacgtctcacgtccgtcaaggtcaggaggaaaccggcacgatcttacgtgaaacagccaaacaggcggctgtacgtgctcggcttgttcgttcggttcgatgcagccagcagccagacctgtgcgcgcaaggttctcacgaaatcctttcgcgatgctgcaggaagacaagcagtgcactagtgaccgtacgtgtggctgtttcgcgtcgccacttgcttgctttcctagctacaacgtgaagttttgtacgctacctatctcctgttgggagacatacttgcatacatgagttacacgctcatactaacgacactattgatatttataaacgaaaaataatttataaataaaatttttatatttgtgttcttagcggtataaaagtaaatgctgaaaaataaactttgataaaaaaacccccaaaatcagctccaaatttaaggttgaaaattcaagaattggctgataaccataagcataaatgaaaagatgacacgcttgctcttccacttgccatcaaaattgttcgacatatccccaacgagcgatcgagaagacaaactccaccaaatactttctttgttttatattataagtcatttgactattttttaagtcaaacttagcaaagtttgactaaggcccagttctttttctcaactcctcgttttccgttaacatgctttttaaattattaaatggtgctttttgacaaaatgtttctacgtagaagttgtctaaggaattcaaataaacccatttttcaattttataataattaatacttaattaatcatatgctaatgagctttctcgttttgcgtgcgctgaaaatctgtctctcaactcagagatcgaaggggcttaagtttatagaaaagtttagcaacatctaaaatatcgatttagtttcactaaatctaacattaaatatgtgggactagctattcagctgtcgacagtttttaatagtgaaaactttcgaattttttgcacctcacaatctgcaatcaatgggccacacgaaacgggtctgaaccaactgaaagcacgaaaccaatccgtttagagcgtgcagacctgttaagaaaccctgaactaacttgtcagggttatgaataccacatacctaatagtagttgactaaatctcggcaggacccaccacataccatgtcctatacagaaacaacttgcggatataggaggagctccggataagaaaagacaaccagagttctacgtggaaacgacaaggactacttggattgtatccatattggtttccctagttctacttggacaaggggacacctatgggtataaatacaagaccccctaggaggagaggggacacggacaacatagacgccacaaagccacaagccaacatacgccaagacaagccgtcggatatcgacatcagagatatgcctggatcgaccctatctggtacctacagaggccggccgtagggatctagcgttgtctatgatctcgctgggcacaaactcgaggaggaaggctaccctgttgtcgactacgagtcagaccttcagaccgccatatcgacaacagttagataggctaccccaaatattgtactggtgtgattatggtgaataagagcaatattggcttcggccaacatgatatagggttattacctgacaatttaagggcccgaacctgtataaaaaccctcgtccccatctcttttacttcagtcttgcatataccttaataccaacgatgtccatactatgcaaataccagaatcgcgacatcaaacgtcgacataacccattttaaattagcacactgtaactagtctataagttctatgtaactgtaatataattaaacttattttgcatagcgcaataaaaaattaatgctctatgtgtagatgataattgacggtgactgtgcaaccaaacaaatatatcacatataagcaacagtgcaaccaaacaaatctctcacgaatcatggcgccagatcgaacggccagaaaatcgaatgtttccggcattcaaaactgttaacagctagctagcaaaaccatgaatatattttgataatatatttgttttgttgaaaatattactatatttttctataaactttgttaaactctaaaaagcttaactaaaatgttaaacaatttataatataaaacggaaaaattactatcttggtcataaaatggtactgatcgatagaatattttttagcataacaaattcggacagtgagtaatattttaggacgaagaaaatactgacacaagtcaaaatccaactcccatcccacctacccagccaccaacaaaccctttttttgcttttttaccatggtagtatcacctaagagcaggtacaatagtaggctataagccagctataaacatattttaaaaagataaaaaaagagagagaaaagcagcgggctacagatctgcagctggctgcagtacggactccaagacataatgtgtgtatgacagatgggaccaggtactaatagtatagtaagcaattattgtataaattagctattacattgactatagatattttggagctcatagtgagctatacgagctcactatgagctctaaggcttcgttcgttcttgggcgatctgggggattgagagagaaaagcatctcgttttccgcgcgcacgcttcccaaactactaaacagtgtgtttttttttaaaaaaaattatataggaaaattgctttaaaaaatcatattaatccatttttgaagtttaaaatagttaatactcaattaatcatatgctaatggctcacctcgtttcgcgtatcttcccaatctccccaatccctttctcctcaaacacaccctaagagcacccacgatggttatctataggctctctacaagatatctatatcagcatattttcctacttgaaagagattaaatgaagaaagagagcaaagctatctactaacttagagatagtctatagagaaaaacgaggcaatgcattagagagctatagatacccatatagacatactattgaggtggtttactattaatctaatctattgctgagatgtacatgttttataaaaagcacattcctttaccattgcgagtgctctagaggaccaacaactctagccagaaatatgaagaggactggacaatgaagccttgcaggccacaggatttccacgcactcgcacaccgtccaccgtgcgtgtactgccgcgcgcttgcacgctgcagcaccaccaccatggctcactcacctaacgccgtcacagttcacgtcgtttctcaagatcaccaaatgttattagatcattcataatgcgcggacgtgtcgttgagcgctaggaacggaatatccgacgtcacgtcctctgtcagcgttgccccgtaaagaacacggagccaaaactgatcacccattcttcggcctgaccgaggggaaaggggcacagctccacgttgtggaggtcggagcctcgccactcgtggctttgcgtaggcgtccacgcaccttttcccctcccgtgctttcctttctctcgtgcaagagcggtggaaaggagaacgagaacggcaggctggcaacacaagatggcagtggaagcgagaacaagcatcgggagagaagaggagcctactagggtctgtctgccgtcgcccacccgcccgccgccgaggccactcaaccacgttgccggcaagccgccaaaccggtgtcgatttctccgccaaatccgccgccaaggccactcaaccacgaaagttggccaggagaggagggccgccggttggggagatgatgaggagcgctggccgtgggaggagacggggttgccgggtgcaccgccccttcgatccgtgtcggtcaagctcgccgaccacgccacccggagctcgctagccgcctgcctctcgccgaccacgcttggactggtgtcgacattggtggagagaggaggggagggggagaggggcgccgccggcgagatagccgaagccggactgccggtgtagggagaggaaaagggagagaggggggaggtgaggggggattttatatatttgtttttttagatttttggggtgttcagtgtgaattttggacctctacacaaattacgaaaaatattagaactaaaacaaaaaatttagggactgaagtataaaaattaaagtcacttctaaagccacttacactgtgacactgtgaaggattaagattttagaccagtgatcttaatttatgtggcactctgagctcctcaaatgagagggacgcatgaatggccttagcaaccaaccaatcctccgccaccaaactcccctacctacccacagccgtcaactcttcaacggcgactcccctatataacacgcacagtcgcgtcgcgtcgcgtcgctcctccagcaacaacgaaccaacggctgagagtagagtacgtgaagttaagtgaagtgaagagacgctttgcattgcagttgccaccgcttcccacgcggccgtcgtcgtcgccatggacctcctcttcgtggagaggctcctcgtcggcctcctcgcagccgccgtggtcgcgatcgccgtgtccaagctccgcggccggaagctccgcctgccacccggccccaccccggtgcccgtcttcggcaactggctgcaggtcggcgacgacctcaaccaccgcaacctggcggcgctggcgcggaggttcggcgacatcttcctcctccggatggggcagcgcaacctggtggtggtctcctcgccgccgctggcgcgggaggtgctccacacgcagggggtggagttcgggtcgcgcacccgcaacgtggtgttcgacatcttcaccggcaaggggcaggacatggtgttcaccgtgtacggcgaccactggcgaaagatgcggcggatcatgacggtgccgttcttcaccggcaaggtggtgcagcggcaccgcgccgggtgggaggccgaggccgcggccgtggtggacggcctccgcgccgaccccgccgccgccgcctgcagctcatgatgtacagcaacgtgtaccgcatcatgttcgaccgccggttcgagagcgcggacgacccgctgttcctccgcctcaaggcgctcaacggcgagcgcagccgcctcgcgcagagcttcgagtacaactacggcgacttcatccccatcctccgccccttcctccgcggctacctcaggatctgcgaggaggtcaaggagacccgcctcaagctcttcaaggacttcttcctcgaggagaggaagtgagtactcctccatgagcgagactccatcaattagccaccagaaatcctctgctcacgtcgcatggtgggtgtttctttcttgtgtgtgtgcaggaagctagcgagcaccaaggccatggacaacaatgggctcaaatgcgccattgatcacatcctggaggcgcagcagaagggggagatcaacgaggacaacgtgctctacattgtcgagaacatcaatgttgccggtacgcgtgcctcggttcagttaacagtttcttcttcttctttttaatttattttcgttaaccatgttgcttgcagcgatcgagacgacgctgtggtcgatggagtgggcgatcgcggagctagggtgaaccacggggagatccaggagaagctgcgccgggagctggacacggtgctcggcccggggcgtcagatcacggagccggacacgcacaggctcccctacctgcaggccgtggtcaaggagacgctccggctgcgcatggccatcccgctgctggtgccgcacatgaacctccgcgacgccgagctcgccgggtacggcatccccgccgagagcaaggtgctcgtcaacgcgtggtacctcgccaacgaccccgggcggtggcggcggccggaggagttccggccggagaggttcctcgaggaggagaggaacgtcgaggccaacggcaacgacttcaggtacctgccgtccggcgccgggcggcggagctgccccggcatcgtcctcgcgctgcccatcctcggcgtcaccatcggccgcctcgtccagaacttcgagctgctgccgccgcccgggaaggacagggtcgacaccaccgagaagggtgggcagttcagcctccacatcctgaagcactccaccattgtcgccaagccgagagcgttctagagtgcacactaactagacagtgaactgcatcgtcttctctgttcctctagaagtatcaaccccattgtttggtttactcgtcgaataagccaaacgatatatatatttgtaaactagaactaatttgtgaataaaatttttatatatatgttattggtgatctaaaagcaaaggctgaaaaataaacttcgataaaaaaaaccctaaaatcgacttcaaatttaaggttgaaaatttaatttttgagtgataaacataaacataaacataagtgaaaagattattgcatcgctagttctctacagaagttccattatcatgtttcatgtataaatcttaccaccatcatcgtcatgtgcttaatgccgggctaaattcttgaaatgatcgtcagtcagaaactttgaaatggccaaactgaaaaatggtactcgtagaatttcttccgcataaaacacctaactcactactgtaatattttgtttcaattagtacattccccaacgttgtaatgggggataaaacgttggatccgctggttacgtacgtacgctacgtgtgtggacgcgcgatgggtgaaagtgactgaaggaggatgaccccgtttttaaattactagaatttccttctgtcttggaattcaaatttccacggtccgcaacactggtttttttttcagattctagcaaagcaactgtggttgtgggcagtctgctttggttgtgatgtttcagtttctgctaaaccacttcttctcttctggttaccctgacttctaaaatgcttgtgatatgtactagttgctacatagaattttcatcgatgcctgaccacatctgttaatcatcacatttcactggccaaatacccgtgctttgctacatattaaaacaaattaatactgaggtttttgggataattttgtacctatggatgttatactgtacatctgaaatatgatagaatatatatttacacggattattttataacattaaagtacatatgtaattggtactttctccgtctctaaatataagagattttgggtagatgtgacatatcctaatactacgaatctgcacatgtattcaaaatcccttatatttagggacaaagggagtagataacatgatggagcatgtggtaaataaaaaaaaagtaaatttcagaaaactgcaactttagtgataaaactatcaatttgttgcaacattagcgacatgtttcagtttgctacaacaatagcgtgtgaaattatcacaaactgtaacttttatgttatatgatgctacagtacaaataggtgacaactgaagcatcatatagatattataatgtacaaatattgaatatgtaaatacctgtgcacttctgatgtatttttaaaccacttattctaagttattttcagtttatttttcaaaatatttaattatcactgtaatgaacgcagttaatccgatcataaatcaatctctagcatggtccgatcaaaagtttagaccttactaaatttttagataacaaaccaaacataatctaaacattataaccataccacaatatgataactctcgggaaaaaatatttattaaaaagtttaccaaaatgtagtaaggtctcaataaaaatgtatatcaaccttccctagtcctttagtattatcaaattttagcaagttttatttgccataaactaaacatgcccaataatttatcaagacaaattgagttttctagtaaaattgtacttttaccaagctcaagagggggagaaggttacattgcaaattgcagtacacacaaacacatacttgaatgtttgacgtttaggataagattcaatcaaaattttaaattttgataatttcttgaatgttcaaatgttcaggaaaaaaagaaataatatatgtggatttgcttcaaactgtaccatatcataatatcataaatctgtatgttagaaatttaaaggtttaatcacatgttttttttctagacattaaatatttctgacaaaaaatactccacgataagtaatcgagagtggcagggacctaagagcaaaggaaatagtggactaaaagtcaattataaaattattatatgaaggagagagataaaggaaaatattgagtgtgggctctcaatgcaagatatgctgtaaaataaaatgcattaaattcatggtgagagaaaagaaaaaggagaaaaatgaaactaaccttataaataacttattatacatgttagctctaatgtgaagttatagttagtgttagctctagtattaaacttgctctaaacaaggttttccctaactcttgcactacctttggtatgcagtagcactgggatagaaaagtttccaatttaataagggcctcagactcagagaccttcatatgcaccctgcacagcaagtttctttgatcaattttttacatcagggtgcctctatatgtgatacacacgtgcatggtaaagtgcaaactttgcaatttgacatgtcaaaacacccacacataatcacttctttgcatgcatgagctgccagcctgtccgtccaataatcatcagaggtaaaataaaatcatcagccaacaaagggcaaaaacgcaaattatttttctccccccgtcttcctcgcctttcctgcaggtaggcccccgccaccgagccctctgttacctccccccttctcctccgcttcacccgacgcctcctcctgcccgcccggatctacctcggcgccgcgtcggcgggcggaacccaccggcggccgcgcggggaggaggcgatcgaaaaaacccgaggggggaatcgcgccgggataatcctagggcagaatgttcaagttcctcaaggaggtggtcgcgggatccggatcgggcctcaaggacttcccctacaccatcggcgagccctacgcctccgcgtggggctcgtggacgcaccaccgcggcacctccaaggtacgctctcctcccttcccctcaccgctcgatcgggggcgcggatcgatttgatagatccccatgagatggggcggcggagatatgcgagagcgtgccgctgattcggttcggtggtggtaagctagtgagtgatccgggtcaagctaagtttgagttggagctgatcgtgcgctgattctaacggcgagtctgagtgggtgctccctgggtacggtttggagctcgtgttaggtcgatattagcttgagtaatacctcaggaagtagaattggtgggctcagtgctgagtttatttgaggctgatctggtttaagggagcctgtgatttctgccagattactgggagttcgtcattgctcactgcacagttgcatgccatctggtaatagtgaggaccttactgatgtcagcacttagtcattagatttttttttttggctgtggaattagattattcgtgaggtttccttcatggttagtgatgttattgatttcagttggtggtaattgagcatccaaataaaagttatttttgatgttgttgcattgggatgctggagattgtgtcaggttttatcttttgttgactagtgggggcatgccttgtgcatgcgtgttctgcaaatggtgctgtagattagcacactctgatgatatatgtgacattggaggcctcatactgatgcttatgtcgattggagatcatggctcattcaactagggatgatcagatgtctaattatgcctaatgtacctgtgtttgggtggctgttaatggactaaaagaccaataatccatttctttttggcagttatggatgacctttcagggtgcaatgatctaagtcaagatggattgtatgtaacttatagtggcctttgtgtagttcaatatagagatgtgtagaacattcatgcgtcaattttaccacccagatggttgtgatgtgatgttgatcaaaattaggaggtctgttaagtgtgttatctggttccatttctttttcgcaagctttgatttatttgcgcagcatactcttttcccccaaatgattacatattgcattaattttacaacatatgtatatgatgctatcaacataattgttgccttgtcttttctgcaggatgatgggtcgcccgtgtcaatcttttctctgtcagggagcaatcctcaggacaggcacttggttgctggtcggaatggtgttaagagattacgaacagtaagttactaatgttgatcttaaatatttgtaatgtctacttgtactgcaagtgtcttattttaacagatgagaatggagtctatggtgatatactattgagttctagaagggtacaacaaaaacaaggaaaaaaatctgcacagagaagattcaataatggtggcattatatcatgccatattggcatttttttaaaaccaaaggccctttgacccagctttataagaaagccaaaaggttcttgcaacaatagattttggtttttgctgggatttccagcttacattaaagagtaggcaggaaattccatctgggcattagccattaggtacgaggttatgcatgccggtccacttttttggcatctcgcattaaattttctcagtgacttgcttctagtggacatctttacttaaatatcactttgtagtgcaattgagttttgcttttgtcatcggtttcattggacttctttactctcaatatgacacctgctaagttagttcagtgttattgacctgctgcacttattgcaggtgcgtcatccaaacattttatcctttcttcacagtactgaagcagaagttcctgatggacctgccatgaagcatacaatttatattgtaacagagcctgttacgccactttcagaaaagcttaaggaactgaacctgggaggcacacagaggtattatgagcttcccctatcctttggtgtttaacattatgacatatatatttgtgcagatatggagtacggttgctgcttaatttagtgtgagcaatatgttttttttgcttaatagtctagaactattggggctaatcaattctagtgcactagtcttgtcagagttggcagtttgcatgtttactgcaccatattgccagtagctatttctcgagagcaaaatttcatattgctcagtttttgtttacaatcatatttattctcactattgctgataaattatgggccagagatgagtactttgcttggggtcttcaccagatatcaaaagctgtgagctttctcaacaacgactgcaagcttgtaagccctccccccccctctctctctctctcacacacacacacactctctctctctctctctctctctctctcaaacggagtacaatcgcataatgcaagctgttgatgtggctactacttatctcacagaacttttcaatttccatcacaacaaaattatttctggtgggcataatttgctcatttttaaaattttaaaaatatcaatttatatttagtataagttacccttggaattagattgcacaaccaaattatcgtcaggatcttcttgtttacatgccaaattcttttttatccagatgagaaaagtatcacaatcagccagcttatactgtgtcatttcttcttgaccatttgatttcagaatttgtacttgtataactttgttgatatgatgttttactcttattttgttaatggcggataatgaacaatagtcaatataaatgcatgttcttatttgtgcaaagtcatgtaatgacacacgaaaacaatgtatgttggaagttctttggtcataaaatttgaaattgtcatcatcaatttcaggttcacgggaatgtatgcgtgacgagcgtagttgttactcaaactctagattggaagcttcatgcttttgatgttctttctgaatttgatgctaacaacgaagcctctaatagccccatgttggtatggtctcttaatcacagtcccgcacctttatatatagatatagaactattacaactctcttttggacatgtttggtgaatgtactgaaacaaatgcttttacaccgtgcttgtcatgttatcgtatgtcgagtttccattgtttctagaaagtaagaattggtactctttaatatcagggaaattcaacatgatagagggagatatataccatacttctttttacatacttatgttcctttgcagcaatttgaatggttagttggaacacaatataagccaatggagctaacaaagtcagattgggtgtcaattaggaaatcacctccatgggcaattgattcctggggactgggtaagcagagctaactccttttccttcattacattcttgtttgattgttctgtttccataattttacaattcggaaactgttcaacagttccttgtcggatgtgcactcggcattattgtactttaattgcaaaagttgtttattttctttaaatggatatctctctatgggcctgtatcgtagtttcaaatcttttatggtaaatactataaagttttgcactatagaccaggtcaagatcgaccaagaaaagacatgtctagagtcaaattaataaactatggttacctgaattcctttgttatttgcattttgcttttgtttgctttgctgcatatagactctctttaatattatttccagaatgatgaaatattgataataaatggcacccagcggaggatatatttttcgaattagagaatccattgtttgtaatcaacaagaaaaaaaatgggaaagtaagacaatctaaaggcaaaacacacagagaatagtcatatgttactaagctgaatctctttcacataatcacattcaaggagcacctgaaagtttcttatagcagtatttaacagtaaaaatggtttttagactcatctccaaaaatattgatctctggactcattgcagggtgtttaatttatgagctcttttctggtgcaaagctaaccaggacagaggaccttcggaacactgcttcaatcccaaaggttagtttgcacgatcatggtcctgaatctgtctctatttagctattgattttttttgttggtaatttttgtattgcttctccactgtttgaagtctgtaatgtagagcattatgctgactaatctatacattgttcatgcgtatcataaagttgttggtttccttctattttgctgcagtctttacttccagattaccagaggctcttgagttctgccccttctcgtagaatgaacccttctaaacttattgacaacagtggtaagttcaacatatttttctctcatcatttcaggaattactttttgtatttcgacacttattacatcgacgcccataaccttctacttttgctcttaatgctgtaattctatgtcaattatttggattactttaaataagctgcagtgacaattgtggttcttcattttcagagtttttccagaacaagttagtagagaccatacagttcatggaagttcttaacttaaaggacagtgttgagaaagatagctttttccgtaaactaccgaacatagctgagcagcttcctcgtgagatagtcctgaaaaaggtaatgttcaagtcatgaatagaacccattattcccccggttcttgtttatatgcttatcggttggttactctgtcaatagttgctccctgtgctggcatctgctcttgagtttggttcagctgctgcaccagccttggttgtattgttgaagatgggttcctggcttccagctgaccaatttagtgcaaaggtttgacttcatttctttcgttttcacccaatattcgttagtcattccagtaaatgtgtgttacgatgttataacacaagttaaaaccactggcattttcaggttttgcctacaattgtgaagctttttgcctctaatgaccgagctatccgagttagccttttgcagcacatagatcagtttggggagtcattgacagctcaaactgttgatgagcaagtatgctatcatttcctgtatggacatctgcatgtgtttctggaatgttgatgcttgacaggataaatatctctaatgcaggttttcccccatgttgccactgggttctctgatacttctgcttttcttcgtgaactgaccttgaagtctatgcttgtattggcacccaaagtaagaccctcccaaccctctgcatgatcaacatttgcaccccgaacaaaatccttgtggatgtctttcatttttactgattgtgctgtgttaacagttttctttttaaaaagtgttctaaatttatctatcgctctctctggttgtgtgcacagcgggcttttaaagaaaaaaaaatcctgggattgcaaatttctgtggtattattttttcaggaagattattgcttctttatgactaattcaccaatctgttactgtagttatctcagcgtacgatttcaggatctctcttgaagtatctatctaagctccaggtgatgttctgttctaactgaaatgcctcagatggactcagtttgacatgtgaaggtatacaatttagttaaaagtaaaaaaaatcattgttatctgtgttcaggttgatgaagaacctgcgatcaggacaaacactacaattcttcttggaaatattgcaaactacatgaatgatggggtatgtcctttttattgcttttttactaattttccttgaaatttcactgtagcaagctgactttaagataggtagccagtatatctggatttctgaccagcaagtttctcaattatttaaaatccacatgttttttgtaccatttatctccatggtctgtgataaactttgttaaaaactggctggttactggagattactgatcatagtgatcctggctagtataaggccaaggaaatgcataaatgcatgatagtaaagaaagaaagacaagaggaaataataatcacctgaaaattactagaaaatatgtttttgagttttgacccaaagaaagcaacacaaatatatcctggagttctccattcccttgcctagatatcgagttcattttctgtttgtactaaataagtaaatagtcattcctaacaatgtttggctattttgacagactaggaaaagggtattgatcaacgcatttactgtccgtgcattacgtgataccttcccccctgctcgagcagctggtacattgccctgtagagttgttctgttttactacttacaatgctatatcgtactaattattgacaagtaagtattgctttaccatttgtctggcaggcatcatggcgctaagtgtcactagttcatactatgaaatgacagagattgcaactcgtattctgcctaacgttgttgtcctcacatttgatccagataggtataacatacagcatttagctctcagtctctactttctcattgttgcttgttgtaacaagcaattaaaggctcagagatctgttagtttgatagaatagattattgtctcactaaccactagtagttatatccaagtaaaattcaaatggttggtaccctttccaacatgaatcatagcaccattgctcaatgttttgcatatgctagtagctatcagtctgatttgactttttttcttagaagcaagctttgcttattaactttctggcctaactgtcattgcacgattcattagcatatggtttccagaactaagacatctttgtgcattagatgtacccatgcacaattgatcgaaaaaatgtcctgtatggatatattataaaagttgatatggattgaaatatgaagtttaacagacaagacagttaaaactaacatgggagatttttgcattgacaatactactttctttaagttataactgtacgatgcatcttattttggtctttcaactaaggcatccaatggttttgtagtgatgtgaggaccaaggctttccaggctactgatcaattcttgcaaatagcaaaacaacatcatgaaaaggtatgcacatttagtcatacagtttatttgcttataatatatccactattctggaccgtttgttacactactggtttgctctagatggcatgctaacacaatgcatgtgtgttatgaccataatatgttggtagataacttactgtcactgtaaaatatcttttgtttttcattttcttttgctactaattgtatcataggttttagatatgccattacttttatccggttgtcatttctccactagtttagaaatgccagacgacttccaatggttttggctgttagaacaatgtcaaaagtctgaaaaaatacctcctctggcacatagagctataccccacatcctttttgcaacactagtctaaatactccaatctgtgttcatatatttttcatggctttggcactgtacacttgttgcttcaatttattgacatagcttcatacttacacttattgtagcttactatgggagacaacagcgcagccgaagctactggtatccagttaaagcctggaaatgctggtttacttgggtatgttgcctatgttccaatcactatatgcttgtttcatttcttgatattggagcctcatagatttataggctatcctctatcttacatgtcaatagaaataaatatttctttaagttgattgtcttgatttgatccagtcgtttttctaattactatttgaatactgggacaattatagtgaagtttctcatcctatcactaatacatttggctgcctcgtataggatgtgcatatggccagccttatataataaatggcttggtaacctctctaatactccctccgtactcgtaaaggaagtcgttttggacagcgacacggtctccaaaacacaactttgacctcttgtttctataaaaatatttattgaaaagtgatatatgtatacttctatgaaagtatttttcaagacaaatctattcatataatttttacattttcaaactcaacaacttgagagttattcatgatttatattcccaaggtttgacttaaacattgtcctaaacgacttcctttacaagtacggagggagcatttgataataataaataggaagctccttctctaagaatatcccttcctgcgtcatagatttgtatctttaggtcacagtacaacatttttttatgcttctctcttacacatgctgatgctttatagacatttatgctaccttccttttttatgactatttttcataatgtcttgtcctaagttctgatgcttcgtttacaagcaaatagaatctgttatgtatgatcctgaggtccatggttgtcaccggccattgttcttgttgaacaccaagttttggaggggccaatttgtcaaatattctgtgctgtgctgtgggatcccatttcatgggccctgtaatgtaggtttttctctagtcagtatatacaaaagaagaaaagaaaattgtaggtaaattcgtttctagttagccatcagccaaaggaattcataatttgtttacgtgtgtggaagtcatcttatgcttttgcagtttattatgatcctgtatgcaattgaattacttattagaaacatatccatgtacaggtgggctatgagttctcttactcagaagggaaaaggttctgaccatggtccggtttctagtgcaaatgctagcaactctcaaatttcagcaacctccagtgtcacatcaggtattagactttttttcaaattgctctaatcatgagtattaagctcagttttcatcactagatagggatcacgggctataaatgaaagaggaaaaatgtaaatatcttaaaagaggattaacaaagtatatgacgtgttacagttgaatgtgagctcttatcatttgtcaattctactgtcacagataatagatcttccaccgtagcatatgcaccatccacttctagctctcttgatcaaactgcaccagcatcagcaaggtcctcggtggatgggtggggtgaaattgaaaacgataatactcaggaagagaatggtagtgataaagaaggatgggatgatgtagatccgtttgacgagaagcctccaccatctcttctctctaacatacaggctgctcagaaacgtcctgtggcgcaaccaaaacaaccaggtaggctttgtttttgttactgtatctgttatatacacatatttgctaaaagagctgaaaataatgccattactttcttttatttattcaaatttgtcaactgtagtatcaaattcgtcaagattaaatcaaccaaaggtgcccaaaccagaagaggatcctctatggggttctatagctgctccagcacccaaaaatgcatcgaagtcttcagacatcaaaccttcaacgtcgcacaatgatgacgatgacctctggggttcgatagctgcacctccaccgaaatcagctgggaagcccttgaagccaccagcagcagcaaacagtgacgatttatggggtgccatcgctgcacccccaccatcaaccaaagctagacctctagcttcatcaggtaggggtcgaggaacaaagccagctcagccaaagcttggcgcacaaagaataggcaggacgtcttcaactgggatgtgaagcgccatcgtcatacaagtgttgtacaaggatgaatttttcttttctttttttttctttcgctttctgtcgagaatattcccattttgtaaactagcccaatcatttatatggacatgattatgcccaatgtattatttcacaattgtgtattacgatagcttcaggatatatgtacatcacaggagtgaccttcaattgttttcatcaatatattggttttgccttttgttctatctccagttcgctatcccagttgtgttggggccttgggggtggaacagataaagcagtttctacagttctctctgctattaaattatcgagcttaaagtcattctttatcaaatgtttatgctatcggcagccatgtg

SEQ ID NO: 5483 - DNA, 8771 bp, Oryza sativa
ccagtggtggtgggaaagggaagaagacatgtcggcttgggaaggttaggggaatgacctgggaagggaaaaggaagcccggcgtactgtgggagattaaaatttgttatgtgtggcttcattcacttttttgtctatgtcgagcacatggtcacacgaaccaagccggatgcactgctaatgcccttatgtgaccaacagtgtgctaaaagcagcgatcaatcacacattgtccccaccagtaagtcatccgggacttgttacaaatagacttcccagccatcgtattatttgcttcattcaagttagtacagtcaatactacaccctttccttccttttttttttcatataggaagactttactactccctctctaggggtcggtttcactgtccttggccgactctacaagctttactgttgaaatttgacgatgactccttttttttttcttcagaagtataatattttgacatcttcaaggtacgaaacgtacgtaatcttgtactatcccaaaagttctaaacaatacatagcactccacacatcatgcagctccatttgttggtcccctttaccataatcagtcgattagtcaggtctcgccggcccatttcggcctaagcctgatgattgctactcctgcatgtctagctaagctggtcattaggagagaatttgttgaaccgcggtcccgttgaatgaaaccgtgcaaacaaactcggctagctaatcgtgctacacgtgcgtcccccccgccgtaacctatgacatcggaccaacggacagatcggcgacaggttcatgcacacggtttcctgcaaaaatgtgtgccgctccagtgtgtgctgctgcctaccgagacgcgatgtgaccttcagttactgcagcaccggccatttcatggtcccgggtctcgaaacagaggttcatttccatgtttctgtctgtctttctgatagagatatttggtgaccatattggtgtcgtcccggatgaactgtgcagctagccattcactgaaatggcgtccgagttctcttcagagaatctcgagttaattaccgggtcagttataaattgttactgcaattccatatttgcatggcatgtcgtatcaacagaaactgaacgctggcaacgttggtctggggactctgggcgtctggctggtcacagaagaaactcaccaagttggtttaagaaacacgataattgccaaatcaatgacctgccgaccatcatctcgccgtttcttccgtacatgcatggccgtggctcgatcgttaagtcggcatcagctggacaattggacgaattcaaagacgctacatttgacatggtacatatggcacaagcagacagctgaaacaacaccagtcttacttttgagtagcgtcactttcttggctggtaattaccaagggcttcatggttttactggccaaagcgcgtgttaaaatcattgagctaagtcagactgacactaattttgttagataatggaataggaaaatattagtgtcaagctgacagtaatattccggttccctctatcccactaagtcgttcaaaatttgtgatcgatcaccgtacgatttctagggattattgcaaatcaggctaatgcatctaattaactgaagtctacctagaaaatacaattaacaaagagtattaattagtgggtacgtacctagggtttccaattgatgccagatctcgacccctagcagtctaacatttttttttgtcaatttttgatcaaatttcatccgaattttcatgtttccaatttggattctaaaaaattattcaaaattacattcataatctactttcaacccgtgtcaaaacctcgagatttcgtgcatcgaaaatataaaccctaggtatcatggtcattttacatgactgatatgtgtgagaattgctacaaatataatgaagtcgacgaagcgagtagtcgcttagttgccgcgtgccatcgcgtaagcatcactcagtaagtaactccgagctcgtcgcaccgtccatggaagccattttccagggaatacatatatattatgcttatattgacaaatgcgaagatctgggtcaaaactactcctacagaagagaaattctaattggtcagtagaacgtcagtgcgcgtgttcgcagttttttatactagtatatattcatcgaccttaaaaacaaactagtatatattcatcacaagggagatttaatttccccgaccggttttggtcaaaacacacgtacgtgtgttgcagaacagatttctgtcagagacctcaagctacagcgacttcatagcggtttataatataaattgcagagattttgagcgttgttttgtattgttgcgtgaaactaactacgcatgcgtggatggaacattctaaaatgtgatgggccctcgccatgcaatctgctggagttgacagagaaaaaactggcgggtcaaatgcgcttgccggtccaggccgtagaaaaaccagaccgtgcacgggtctttaattattcagcttgtctatgcctatgcgtcatctctcccacgattagcctgagtcggcctagccgtcagatgcttcgagcacgaatcttgagaacacggggggaagaaagatctggaaaacataatggtgctagaaattcctgaccaattaagtgagtatcatttctgtaaggatggattatattaagccgttttctattttagccatatataaatttgacttattttataatattattgacgtcgtattaaagatgtcatcaaatacttaaatttataaataaaaaaaatcaaataatcaagaactattttctagagatgatatcgtttccaaccgttttcattttatcttggagaggttaagaaagaagcactcagccgttggatgcacatccaacagcctggagaggtttctaagtcgagatcagagcactagcaaccaacagataccagggccaatgatatgagataagagaacatcagcgtcatgttagagcgcgttagggagactggttaaatcgaatctaataaatctgagatcaagttgcacatatgcccaacgacccgtactattatttgtccaagttcggttcaatcttggtccaatgtcaataaggagatccaacttatagaatatgtcactcaccagctacatgctgaaagcggtactgatccgagatattagttaattactagtacaaaacgagtttaattagcactaactaggagtataagctaaacctgtttaagccggcccgagcgtttcgcctagagcttataagccgtagcaaattaatattagaaaaagaaaattataggtaaaactttttatgtgtatgtttttattgacttaaaacccaatgttaaaaaataaaataagtacaagatcgaaactaaaatcaacttcaaattaacttttaaaatttaaattttgactgcaaccggtaatctcgagagttgctgcacatgtcccgttagaccgtagtcctggtgagaaagcatcactatccccgttatatatatattttttccctagaccttcctagtcattgttctcacgtcccaatgagagtcagcgtacgttaaatatgatatgaacatggcatgtgtcaacttgtgcaatggaaaaaaggattagacccaatcactccgggttgacacgtaaagtattacggtgtagttagacacaaagctggaaagaatatccacttttatcacctcagaatggcatgaacgactgaaaagacaaatagaaatgcagtgtacgacttttattgtagacaatgagatgcaatgtacttggcgcaagatttgcgaatgctgaatgattctttttttcttttttggaaggtcaacgctggatgattcttaaattggggacaatttacacagtggtacatcgaatgatttacgcgcagagttaggaggttacggtgtagttagacataaagctggaaaacatccacttttatcacctcagatcagaatcgcatgaacgactgaaaagacaaatatatagaaatgcagtgtacttttgttgtagacaatgagatgcaatgtacttggcgcaagacttgcgaacgctgaatgattcttaaattggagagaatctacacagtggtacatcgaatgatttacgctcagagttaggaggttatgttcgttgcattgaagggttcccttttttggtgacttttatttggtagaagaccccaaaaggccaaaactcgtctgcagttagctaaaagttgatctagaaaaaaaaagttagcatctgatacattgaactcgaatctgaaacgttttggagccatcttgacctgagagaatctgtgatatacctgtgttgtgattgatcgatcataattaaactctgctctgggcctcgggtacgtgtgcacgtgtgatcgtaatatttggtttactgacgagggagatttaggcgttgatcacaatctagaaaagctttagaccctatttagatggtgttaaaaattttaagtccctatcacatcggatgtttgaacactaattataaatattaaatatagactattaataaaacctatccataatcttagactaattcgcgaggcgaatctattgagcctaattaatccatgattagcctatgtgatgctacattaaacattctctaattatggattaattaggcttaaaaaatttatctcgcgtattagcttttatttatgtaattagttttgtaagtagtctatatttaatactctaaattagtgtctaaatatagagactaaagttaagtccctgaatccaaacaccatcttaggcgttgattagtggctgagaattgagatgacccgcgggaatcgatcacacgtatctcagttagttctaggaagaaaccaattatttactccgcctaatattatatctaactatatattattaaaacaatttaaaaggatgcaccatattgtacgctagaaaccatgattatcattaaggtttttaaaatcgaacatgattaacattgagcttttttttttactttttagaagtcccgccaactgtcgtgattatgctcttaacagtctatccgtcgtcccttcttttaatcgtcattgggattatatttgagatttcgttaatagtttctagatgtcccatcaactgccgtcactcactcctttataggccagttgcttctcccatctttgttgttatcgttgtgctttatatgaacttttttaaaaaaattccatatttttattccgatatttttatttataaattgtactcctacttaaaatcttataattattttctctcttcataatttattttagttgttattctgaattttaattaatctcggtcatgtgttctatatggtttattctttcaatagtttttattttttattacgaattttagttatttataaattatatctatagttgaactcttattcttatttttctaattacagaatttattttactttttctttcgaactttaattaacctttaaccttgtgttctatatggattattcttttaatactccgtccattccataatatagcaacctagtatcggatgagacatttcatattacaataaatttagacaccctcttgtccagattcattatactatgaattcatatcccatctgatattgctatattatgggacggagagagtatttattttctattttatattttaatttcagttgtttcaaaattgtatttctacttgaactctcttttttattttcctaattttgtattttattttattttttattatatattttaattaatctcgtattagattctcagatggattcttctttcaatattgcttattttccattccgaatttcagttattttgaaattgcatttctacctgaactcttcttttcttttctaattttgaattttattttatattttattctgaattttaatttctcgtatttaattcttatttggactcttgtttcaatattgcttatttttaatttcgaattttagttatttttaaattgtatttctagttgaactcttatttttctttttttttctaagtttaaattttatttttaatttcagttatttttaaattgtatttctatttgaacctttttttttccttttatccgattaatgtgggaatttttatttccttaccatgaacttggtgtctccttaagggcaagttttatggtagaggtgactaccatatccaatttcatacatgacatacataattaaattaagaggtgatatgtataataggctatctctatcacataattcccaatatctctaacactctcacatgtttattgaagtttgtgtaggggctgccccttgcatgagaggtgactatttctctctcatccttcttctctcctccacctcactatttagtcttttgtgtcatcttgggatttatgtttgaatgtccatagtacttgccctaagttatctacagatactccgatacttcgatcagtttgatgagtaaaattttagcacgacacttcgaaaagttcatcaccgagaagttggctactctaaaaaaaagttagcatctggtacagtgagctcgaatctgaatcattttggagcgaccttgaccggagcgaatctgtgtggtacacttgcggttgtttttcggtcaatcccaatcccctgcatgcgcccttccctgcgcgcgtatgcatgtgatcgatcgatcatgagctctctgctctgtacatctggtacgtgtgcacgtgtgatcgtaatcttggttttactaaagaaggagatttaggcgttgatcattagtagaaaagatttaggcgttgatctgttcctgccaacgacgacccggggggaatcgatcgcccgtatcttattgaaaccaatcgaacaatctatctattaacttattaaagtaatagaaaaataagcatccacgttggcttttacggtctaaaaattattatattaatcggagaaaaataaaaacaaattccatataaaaatacaatttaaaaagtaaggaatattggaagaggagactagaagcctccacgctcgctctcccggcctagaaattctcatatttaaaaaataaaaacagagtccatatagaatacaatttagaaatagctaaaattcagaatttaaaaaataaacaatattagaagaggagactagaattcatgacgatatacaatttagaactaatgaaaattcgaaattaaacaataataaaattaaaattaagttagagtccatatagaaatacaatttagaaataactgaaattcgaaattaaaaaataaaaaatattagaagaaaagtatagagtgcatatagaaatataattaagaaataatagaaattcggaattagaaaacaacagatattagaagaagagtatagagtccatataagaatttagaatgaactaaaattcggaataaaaattaaaattaaagatagaatttagagtctatatagaaatacaatttataaataattaaaatttgaaattaaaaaatttatggaagaagagtctagagtcaatatagaagtaactgaaattcaaaaataaaaaaaaagaatattgaaagatgggtttaaagtccacatagaaaaacaattagaaataatgaaaattcaaaattttaaaaaaaatattgaaaaaagagcctagagactatatagaaatacaaattacaaataacgagaattcagaactaaaaaaatgaggaatattggaagacaagtctgcagtccatatataagaatacaatttagaaataactaaaatttgatattaaaaataattaataactatcacgtatatacaatacagtatgagacagtggtagtttagtaaagttagtacaaaatttaaaattatgttatcattttaatatattttaataataaattgagaaaacatatatgtggccaccgtgctagttctgggctgtttagttggaaaaaaattttgctcctgtatatcacatcggatatacggacacatatttgaagtattaaacatagtctaataacaaaacaaattacagatttcgctagaaaactaagagacgaatttattaagcctaattaatccgtcattagcaaatatttactgtagcactatattgtcaaatcatggcgcaattaggcttgaaagatttgtctcgcaattttctgacgaactatgtaattgatttttttatctacatttaatactgtatgtatgtgtctaaatatttaaggtgacaacgtgaaaaattttgttttggactaagcaggccctcagttgatcagatgagagatccacatggaacacaggactctgaaccatgtgatgatgtaacgtggcgacgatcgaggacacataattaaaaacttggccgcgacacgtttttggcaacttctacgcgcggccgtcgtcgtgactctcgccatagttttatcatcatcatcagcgatcgatcgatcgagtagccgagtacagtgaccgagtagcactagtgtacagtgtggctcctcgctccatcgatgggtcgcgacaacgccataattggggacatcgacagagtagttacgtgtactgtagtagcggaaggggaatcacgttgcggccaggtgatcgagctgccgaagccgagtgaagtggcggggcggagatctcgttgtcgatcgcgcagcaacaaagcgggtgctcggtcgctgagcct

SEQ ID NO: 5484 - DNA, 59821 bp, Oryza sativa
tttatttttttaaaatttatggtgtagtaggaagagaaggagaggatgaagtaagtagagaagtgtataggggagataggggggtgatcgcctatggcggtcacccgcccattagccggccccacattcaagacatcatgtgagataagtcacattaaatttaagtatgtaatagtggtgtttatattggaagagtggtgcctaatactagtttcttgatgatgtggagtttatggaaactatgtctaatgtcttgggttaggaatggtcttactatactactccctccatcccataatatatgggattttgaatttttatttgcattgtttgatcactcgtcttattcaaaaaaaaatttgtgcaaatataaaaaacaaaaagttgtgtttaaagtactttggataataaaataagtaaaataaataaataataattccaaaaaaaattaataagatgagtggtcaaacagtgtaagaaaaaactcaaaatcccttatattatgggacggaggaagtattaatatcttcgtgctgtaactggctacagatctgtagcctgctgctcttttatttcctcttttatctctttaaaatatatttatagttggtttatattctgctatggtacctgccctaaaccttgccacacgaaaacagtagctgagcagaacatgacaaagcaagagcacaatgctggaaagatggtgccaatccccaaaaaacaagattgattcccccgcagcttctgcacaccataacatcaatcagataatcacccttgggtttagctactgagctcgttgtcaccatttgccgcaacgtctgcaccactgccttgcgtatcgccactggtctccatcactgcctgcgcgggtgggatcatctcaccgtccataccgagttttatgtcaccgacaacgccatccccctctcctccacccaccgataccggcactactcccgtcgcagccgtcgatgccgcgccgccctccacatcgccgccgtccatcgccttctcgtagaagacgccgccgccgtcctcgacgtcgtacaggttccccgtgcgcacctcctgcgcgagcgcgcacggccagcagaagagccaccgcgcgtagtccgtcagcgacgccgagccgcagcaccaccggctccccggcagcgcgaacctcttccgcatctggaccctccagaacccgccgtacagcaggccgaggaagcacagcgcgatccccgcggcgcccacggcgtcgctcaggtcgtagtcgtggatgtggagcgccgtgatgttgaatacccagaagggcgcgacgcagagcagcaggaacatggcggtgtggacgtacatgttgccgaacccgagccgctccatgttccagccgaacacgcagaaggtgcacagcgacgagaggcagcacgccgcggggtcctcgccgcagtcgaggaggccgcccgcccacacggggtcgacgaccaccgttctcgttccgggcagctcggcttcgatcatgtgctgctgctgctgcttggcttcctcgccggaggcatcgtcgtctgtgtccctgcctagagggctgtacaccgtgtacgctccggcgacgacgggcgcgacgacgccgaggacgaagaagaaattgtcggcgaattcggatcgcgatctgctgcggtaagcccagtagaggttgcaaaccacgtactgagaaatgcaagtgacatggaggagagccaccacgacggacatgtgcgcccgttcgccgggacggcggtcgccattcttgcagtacaccttccggagctccgcggcgtcctccggccgccatcggcagagaagaacgaggtggtggatcaggctgggatgctggtatatgctcatgagcgtgaagagcgcgttaaggatctggttgtcgatctctatccagtgatgcctcaatggcttggaagggaaggccctgttcagcaatcctagcaggagcaggatcaacatgccaccagctgcagcgacgcagagcagccatgccaggagagcaatgttcagagggtgcttgagccagttcttgcagaagctgaacaccgagctccagttgattcttctgacgaagtgaacctcgacatggaggtaccggcggacgccggtagatggcagccggaaattcgtcagtggagaacagaggttgatattctttagccactccaccgagggagtggctctgaggcaatccaggagtctcctctcgtgatgaacagatccttgcattgatccatcatgaagagcaggaactgtgatatgatattcagtcaaaattggtgaggtttgatcagagtaaggtgtgcctgccatgtcgtcttcaggaaaattctgaaccatttttctctgtttaactgaaactctgaacaaacaggtatttcttcttcagcctaaaaagcagaaggcacacataacttaagaattcgcccccaaatcgccaaatccaacagtcacaaatttatcccccaaagccaaagaacagggttatgcatgaactgggaccgaagacataataagtcacaagtgaacatacctcacagatgtacaggacaagtcaatcgggcgaaaagcagctcaattcctccaaacaggctcaaacttctgaagaactggagatgtggagaactcttgaggtaggggaaagtagcagtctgctaaactgcacttcgattctttaaaatctcacgactttcgcttgccaggacatttgacttgggcgccaactaaatacagccttgtcatcttcccaagttgtagcagagctgcatcgaagtcgtgtgcacgaagttgagctgcatcgaagtcgtgtgcacgaacaaagcaagcagggatcacagttcacacatcagaaatctgaattgatgttatgctgtgcgcctgtgccccgggatccatagagtaccaaagcagtcaagcttggaggcatgtcagtgtactcgtgtatacgcgatgccatcaataaatcataaatcaagcggttttccttggtcagatgaaggcggcgagcgttgaattctcaaaccaggtcgtcgtcctcgctgggtctctttgaagcctccgcgagaggcgggcaagcagcagtgcagcacaacgggattgaccacggtggggagagggcagccggcagtgtctctccatgacgataggttccgtggattttttcaacaaaaaaaaaggagaaaaaagaaaccttccgaatacgccggtaggttgacggagatggaagaaacggagaaagactagagagggtttggcctgaaggcacgcgcagccccgcagctctgctctccaacaatatactccgccggccgcggatctcgtcggccgacgaggcgacgtggcgtcggacttgcggcctcgagggtttccccagtggagagccaaaccgcaaaggagaggcgaacgggaggaagacggaaaggttttcactagtagtagtactactttccaggggtagattagtttaccatgggtctagaagtaggcccaactccatgtaaaccactcagcctaaataaaggcccaagcaggcgaactctcaggcttgttctcttgccgaattgtaaagcccaattggtcttaattgacccacttagggcccctttaatcataggattgagaaaacgtaggaataagaaaaacgtatgattttgataggaatgtaagtataaaacagaggattgcaaacacaggaattaccgtttgattgaaccacaggaaaaacacaggaattggatgagagagatagactcaaaggaaagttagcaagaggttaaaactcttgctaaatttcctctaaaatctctataggattatccattccataggaatttcaaaggattggatagaattcaatcatttgtttcaaaggacttcatagaaaatttttctataggattaaaatcctctaaaattgctatatttttttttccaaatcaaaggggccctcagtaggcaaattgttcgtccatgctgtagtttgtggagaaagggggtgcgtagtttgtggagaaagggatgcggtagatttaccaggtttgtcatctcggtgtaaaaaaaataagtttgtcttctcactttggagagtttagaaaggaaaagcaaacatctacgtcgaccccatggatccatggattcaacggcggatattgtgtccggcgcctgtcatgttgctagattccagcaagcaagccagtggtatggatccgttaggctggccgactggccaatcgttgggcatagcaaatcagcacgccgctgctaaaaagggtcccgcttcattgtatcatcgcaaaatcaggaatcggggccgtgttcccgtccaagtacagcacctgaaacactagcttcctctctccgctctgtaatcacatcagtcctttctgtcgcgtagtacgcctcccacgcggaattaccatattaggccccgttaccagctgctgcttctacagcgatcatcattagcgcgtaaggatatgggcgtaattttcaccggattaaggaagcataggttcaagtggtactaatttaggtggtgccaacgagcgccatccacacgcctgaaatccccaccgaaaatgacgccgccggcgagcacgggcaagtgcaccggcgccgccgccggcgaggtggaggagccgctgctgccggagttctctggcggcgggcatggggcgtcggtctccggcgcggtgttcaacgtgtcgacgagcatcatcggcgccggaatcatgtcaatcccggcggcaatgcgggtgctcggtgtgctccccgcgctcctcctcatcgccaccgtcgccgcgctgtccgacgcctccgtggaattcatgctgcggtacacgggctgggacagcggcccgccgtcgtacgccgggatcatgggcgacgcgttcggccgcgccggcgccaaggcgctcaatgtctgcatcgccttcaccaccacgggcaccctcgtcgtctacctcatcatcatcggtgagcccacgccgtcgaggacgcgctgctctgcagctctgggatacatccgaattgcatgcggggagaaaatattgaattaaccgcgtcgagcatcttggtcgccgtcgcaggggatgtgctgtctgggagcgcaggagcaggagacgagcacgccggtgttctgcaggagctgttcggagcgcagtggtggacggcgagggagctcgtcatactggtcacggccatcgtcgttctgctcccgctcgtgctccgccgccgcgtcggtgagttgctctcgaatacaacctgatgcacttaattagtatttattaattgctactctaaaatagcttgattagtttaattgctactctaaacgtacttcatccgtttcatactaaactaagaatatttttattcaaactttattaagtttaataaaatctatagaacaaatttgacaatatctaaaacatcaaattagtgttattgaatatattttgataatatatttgtttaatgttaaagatgctactatatatttttttataaagccaaaaacttatgacatagaaagtaattaagctagtgctgagttgtaaatttgagttctcgagcggtgttcgacacgagtagttgagccacccgaattatttgggacatggagatggagtggctcattgtggacgtcggattgcgctcgtgcacagggtttatctcagctaccgattgagtcctctaaacgctttaacaaaaatccaatttgtcgaactacggaaacagcacataatggtggtgatttttcctcgatttccattaccatgactaaacggtatattttatttaaaaaaattgaccaaatggtatattttgtgaaaaaaatttatgtagaagttatttaattaaaaaaattaaataaacctatttttaaatttataataattaaaagtcaagtaactatgtgctaatggctctctcattttacatgctctaactttatctttatagtagaaaatatgacacccacgttgacgtgtcaactatttagccagtgtgcgctagttagagttacttttagaatgcatgaaagacataatatattactccctccgtcctacaatagttgtcattctaggttgtttaggatagattaagatttaataaaaaactataataccccttattaaataatgtatggtggtaagtgaaatgattattgagggtaaaaagggaaaacttttgaatagaaagtgattgatgggacaacttagtactccatagtgaccagtattttgggacaaaatttaaatcctaaagagacaagtattctgggacggaggtagtattagccaaaaattgttgacgtgttttttttaacgatcgatttgtcagccatcagattcacgtcacgaatagcaaatgtgagttacatataaataactatattatagatacactacaattatactacaaccgcgtttgaaagtttagccctatatttgaaaggatattcttctatcaacaatcgttgtagcagagtcttgcacttatgaaaatgaaaaacatcatattttccatcaacgtcttttttaaaaaaaattcatagtttttcatcaaattcatgaaattcagaagatatacgtattagttaggtcatgaaggaatatacttatcatcgtactacctccgttttttaatagatgacgccgttgactttttctcacatgtttgaccattcgtcttattcaaaaaattacgtaattaaatcacacttaaaatactatgattgataaaacaactcatgataaaataaattataattatgtaaattttttgaataagacgaatagtcaaacatgtgaaaaaaaaagtcaacggtgtcatctattaaaaaaacggagagagtattagttaggtcatgaaggaatatacttatgatgatgttcttgctggatgaacacaacatccaccaatcgatatcctcttttactatttttctgatggaaagattaattgaaaggaggagaagaatggtttggaaggttctggatttggtctaataggataatctcttttttctagattttttatgaacggatttgctagtttactgtcgacagtaaacgaggggaaaaaatgtcgaatttttgactgtttttgtctgtcggattcgcctcaagattagtgctggcacgttcgtgtaaaaaatccatgcgataactaaatttgtgtgctgcatggggttcgaacctaggacctcaatcccactagctatgcgtggtagccacttcatctcattaaagttttctaaaaagtttgcaagttatagttagttatactccagttacaccctagttacattgtaactatattgttatctctatataaattatatataaagttgcatatattatttgaatacatatatacaagttattattattatatattattttaatacatatatacaagttattattattatagtatatagttctagtgaaattatatactgtagctagatttgaaaattttcccctaaaaaaacactcgacagttttttttagctaatcccttttatgaataacttggagatttatttaaaaaattactatgccacatggttgtggcacgagcgactagcagtaaaaaccatcagctttagtaagatagatagataggataatatatttttctcaaattttttataaataacttggagatttattttaaaagctactgtgccacgtgtggcgcgagcagctagtggtaaaaaccatcagcttggggctgtttggatggagctaaaatatttttagtccctgtcacatacgatgtttagatactaattagaaatattaaacgtagactaatgacaaaatacattccataaccctagattaattagcgagatgaatctattgagcctaattaatccataatgtgctaattatagattaattaggcttaaaaaattatctcgcgaattagcactcatttatgtaattagttttgtaagtagtatatgtttaatagactaaattagtatcaaatatctgatgtgacagagatttttagttcccagatctaaacaccctcttaaagtttagttcgtggatcaaacacctccttaataagatagctagatagtttctatttcatccatctgccgttgagtccggaaggccgaaagagcgttatcttgggcctcgatctcatgtggaccctgagacccatttacacatccctttcaaccatgtgcaccaaatgtgcaatattgccatagtgcccataaacaaggatatcattgcctcgtcggattgttgcacgcggaccacgaggctggcccagttgtcagccactcgcccaccagtccggactaaattaaaaaccctatcgtccttcgaagttcgcagcgccacgccacaataatttggtcgctgagctccgttcacccatctgactaggctcttatcacaagcacactcatcgcccctcctgtcgttttcccgcgccacgtttccacgctctcgagccgccgattccaaagaaacgcgcaccaaactctcgtctagctccccgcttaacgtatcaacaccatggtgtccaagaagacctccatcgccgccgccgccgccgccgccggcgacagcggggcagcagaaacgtccctgctgccagagcgttacgccggagcggggacgccagccgcagccgcgtcggtgctcggcgcggtgttcaacgtgtcgacgagcgtcgtgggcgccgggatcatgtcgatcccggcggccatgcgggtgctcggcgtggcgccgacggtggcgctcgtggtcggcgtcgcgctcctggccaacgccgccgtggacttcatgctccggtacacccgcgggccgtcgtcgtacgccgcgctgatgggcgacgcgttcggccgcgccggggccgcgctgctcaacgtcttcgtcgccttcaacgccatcgggaccctcaccgtgtacctcatcatcatcggtaacgcaccacagcatatctccccccgagccgtacacccagcgaacctgcagcgctggtcgccgcgtgcagacgagtgatatttccggggattttggtgtgagtgttcctgcaggcgacgtgatgtccggcacgacgagcgacgggaaggtgcacgacggggtgctgacggagtggttcgggcagcaatggtggacagggcgggaggcggtgctggtggcagccgcggtgctcctcctccctcttgtgctccggaagcgtgtcggtacgtaagggagcccgcgatgattgttgtttctcattaggaccgacgagcagactctagatccagtgccccaaactaaaccgcattttcagtcatttggtcgaattctaaattcccatttccggaccaatttccactacgatttggcaaaactggacggtgtcgtatagtagtatatgaattttgcaaggttagaatgccttatgaatttgggaggagctacgacatttgaaaaatacctgaataccgtagtccctgaagtcataccctttaatttgctgtgacctgtgactaattgcagattcactgaagttcacatcagccgtgtccatcctactggcagtggtgttcatgttcatcagcctgggcatcgcggtgtacgccctcttcaccggcacagcgaagatgccgcggatgctgccggatttctcgcgcctctcctctccgttcgagctcttcaccgccgtccccatagtcgtcgtcgccttcaccttccacttcaacggtatcacatcgatcgcgccattgttaacactacaccatctttttctcgagactgaattatctgccttgcatctggcagtgcacccgatccgaacggagctaagcaagacgtcggacatgaaggcggccgtgcgcatctccctcgtgctctgcgcggccatctacgcggcggtggggttcttcggcttcctcctcttcggcgacgccaccatggcggacgtgctcgccaacttcgaccgcagctccggcgccggggtcccgcaggcgctgaacgacgcggcgcgcctcagctacgcgctgcacctcgtgctcgtcttcccgctgctccacttctcgctccgcgtcaacgtcgacgagctcctgttcccggggcggcggccgctggccacggacacgcgccggttcgtggcgctcacggccgtgctcatggcggtgctctacgcgctcgccatcgccatccccagcatctggacgctcttcgagtactccgggtcaacattcgccgtctgcatctcgttgatcttccccggcgccatcgttctcaggcacgccatcagatcaccaccatggcatcatacaattctcatcgcttaacgcttggttacagttgtcatgtaatgctacaatttttttgcagggatgctcatgggatagcaaagacgaaggacaaggcattggcagcgacgatgatcgctctggccgtgatcacgagcagcatcgccatcgcctccaacgtcatgagctccatcagcggcaaggtggaaggaggccatgccgcaggtaggtagcatgtggtatattggtttgctgtccgacagcatcaagattcaaggctactgcccctgtagcgttcctctgttttacattttttttaaaaaaaaggaaaaaaaacttgcagggattgactcgtaacaatgtatacttgtgtgttgtaaggatttagcggcgagtcattgttgtatacttttacaggagatgcattatcgtgtataatgtgatatagaataaggaatagtgccttcagagaaaacggttggccctcatcagttaaaaggtaaacctatatgatccattgaattgagagttggagatcggcaagaagaaagaacatgaataatggatcaaagtagagttgcctgcttgaattatggagtgtgaaatctgcttaatgcaactcattcacgtgtttgaatctcggcagtacgttccacatgctgactgttttttttttttttgagacatgctgacagtattgcattttaggcgaatgcaaggccggacttatgtccatgttctgaggctgaaagtatagaaaggcccatctcaacttttcaagcagtcttggcctgctacggcattacggcccataaggcctaaagctcagccatcagattcagcaagcacttttatagaccgacaaatagctgtcacagctctatcagtgtcctccaaaagcaacaactccgacttgaaaggtcagactccatacatctattccgagtcctgcctcgtaagaactttcgcattgcaattgataatgttgcgttgctaaaattgttcattatcattagcgatcttttgaatctgctgctgtcaacaagtggttggacgcacgcaacatctgtagtttatacgacgcccatgacgagatgtacggtgtaccaaaccccaagcaagtggctccaggtggaaacctcccatccaaccactccaaatatactaacaacttttagtctcacgattttatcctaaaatataacaattttcttaccaacattctcttccatatccaccattcacttttttcacttatcttcacaactcatctaataacaaatctccatcactcacttctacctactttcttaataatcatatccaattctaaaacttcttatattctaggacaaagaagtacttggggacctttgaaattataatgcaaatagtagcattggcctgctcatttgtgctcaacagtatctaatatatttttaaccttattttaaaattaatttagctttatttcacgttctaactttggctttagaagtatataagtttttccttaaaattgttttcgttagatgggatacgtgtctttgcttaaaaaccacagccccaaaataccttccaagcaggcccacagagtaccgagggtaatttgtacttcgcaaagtgcatcatatcggagctaaccactatttatggataaaaatatattatactccagccaaatatacatacttgctcccaaagtatcattggtgagtgattttatagtcggaaggaagattttttttaatatagaatctggtactctctgtagctcacgtatcacgacatatcaaaaattacttaaataaaaatgcggattgtctcacgtaactttacttgggattaggtaaaaatagaattaaatttggtatacaaatttcatacatctctatctctatctcttctctctactattataaaaattatgtttttgccggtattttagtacgtcatccgtatttgagtcggtttttatgtttgttcgcttttagaaatacaaatctgtatttaagtcagattttaaattcgtttgcttgtgaacatataaaagcattttaagttcggattttaatttcataaatattcaacaattaaaactagatttgatatacaactgtttgtttgttccctatatatatgattgtatttcctatacaatagttttgaaaagtatagttggttgtcatgtataactctcaacctctatttcacatacataaaattgtattctttatacaattactcaatcgatcagtgccttttacctttttcgattattaatacgaaaatttgtcagcactgttagttttcttcaggctggagtctgtgaatctgacgaaaaacagagaaaaacaagccaatgaaagaagaaaaactcctggactcgttgaccaaaacctaatacggagtggtactattaatctctctcccaatccttggcccgtgaggtcgtgacacgccacgtcacgcttgggaccacccgtcgtgacggagacaaattgttaatcccgcacgcctgcttccgcggcgctaaacggacagcacggattaacccctacctcccccccccccccccccgcgctaaactcagcggtttacgagtagtagtttattcgctcgtctcctcgggggagtccaaaccctaggctcttcctccccagcgatgcacccggcgggggcggtggtggcgccggcggcgggcgcgcccgctcgggcggcgccgcgggtggagaaggcgacaagccacctgctcatggggcccgactgggccgtcaacctcgaaatctgcgacatcatcaacgccgacgtctggtgatcacctgctgtctctctcacctcaactccgccgcgtcgttgctcccgattttgccctgttcggtgtacggcttcctgcgtgtgagattggatgtttagtggaaaaatttcggtattcgattagggtctattgggtgttccgacgggttaaattagttagttgattcattgtttggggcaaattttggtcgactttggtattcgggtaagacggccgtgtacgcatatttgaagtagagtcgagatggtttcaaggccctggtttcgcgattcgatgctttttgtggtgaataggatgccattcaacttagccttcaacgtgtgcgtggattttgccctctcccaactcccaggctacctgagagctcttttgataattacctgcacttgcaaaggggatggctttgactctaatctgaagaaagcaattggagtgagggaactcatatagggccatagataggtcgatagtatgaaataaactagcttatttttctactccaagtaattatctccttaacaagctaatatttgtgaattcttatcaggcaaacaaaggatgtggtaaaggcagtgaagaagcgactacagaacaaagacccaaaagttcagttctatgctttgacggtatgttcttttgttatgtaatgatggatgcagtgttttcttggctacataatttttcatctttgaacagaatacaaattttatttcacaaaaaagtaaaggagaaagttccctgaatactctcttacccaacaatctgaagttgttgtttgtctgatgtatttagtttgaaatttgttgcagctcttggagactatgatgaagaattgtggtgaatatgttcaacttgaagttgctgagcaacatgttctgcaagaaatggtgaaaatcatccagaagaaggtccctttactcccctcctcactactaattacttgctcttctgaattcctaattttgtgcacatggtgattttctcagttgtttttttaatcatatgcattcttaatggcattgcataatttgagatgacactgaatactgctagtgtttttggtataagacatttagagtttcgtgtgttacacgaaacccctgttcttttggctggttttacggtttgtctaattagcaatcaaactaatcttctaatgcgattggatggttattctgtagagagctaatatattaaaacaggataatataaatggttaaacccattttcttcacgggtggaaggatatttttcataataaacgctgattggttgtttgtagtagagtaatagggtaactagcctgcaaaggcacttgatgtcaccagcctatcattaatatcatggttacttgttcaatgccctgcttaaagtttgatattatgtggtagcacttacaataacccatatttacctttactgaatagtttgatattatgtggtaacacttacaataacccatatttacctttactgaattaatctttgcattcgattagtcctgacctgtgcactaagaaaatttgagcttaacaccaatttcttcacctatactaattttgtggttaagttgaatcatcgttgacagtgcaccttatcttcttttttctcagcacctgatgtttacacacatcagatttatttcctggaatatcaattctcatttggtatttgcatgttgttcaattcacatcaatgaggcaattactggacatgcccctactaaaattatgaatgttttctcttttgtaattttctttcagaatgatatgttagtaagggataaaatattattacttttggactcctggcaagaagcatttggtggacctggaagtaaatacccacaatatcactttgcgtatcttgaagtaaaggtatgtaacaaattccatgattgttccttaagaagtatagaagccttgtttcgtcatggtatgtggaacgatcatgattacaagaggcatgtcatgtactcatgtgttcaacatgcatggctcacgtgtttatgctgaaatattcatttcttttctttgaaaacatccctataatatctaaccatatttgcaacttgtcaattttgaattcagaggataggtgccgtgttcccaaggcgtcctatagatgcaccaccgatatttacacccccggcgacacatacttctcaaagctatggttcacccagatatgaggcaggaagtctgaatgagataatgtcttccgatgttgagacactaaggttgctttcttggcatatcggattcatttggtttggtcagctatcacccaactacttcaatttatgtttgtaacatttttttctctttttctattacagtttgggtgacctgaataacattcgaaatgtgacagaactactatgtgatatggtgcatgctttgaatccatctgatcacatggtagtgaaaaatgttcctgcctaaaaactgttacttttgaccatatggactaaatgccagcagattttgatctagctcttgacttgaacaacctccctttttttttaacccaggctgtcaaagatgaaattatcacagatcttgtgagccaatgtcgctcaaaccaacaaaagctcatgcagtttgtcagctcaacagggtaatgttatcaatatttgttgctgccccttgtattttgaattttgtaatgtagtgatttcagggttctcctttgtttctcttcatagcatttcataggcagagcaaagaagtttgcacaaaatgtgatatgatatctgaattcatttatctgttgtttaggaatgaacagttactgaagcaaggtttggagataaatgatcggctacaaaatattatttcaaaatatgacattatggcctccagtactcatttagcagttgaagcacctccggcagacaatgttgaggctcctaaagaggatccagcagaaaagccatctgcacctcctatcagcactcttgaggaggaggaggaggaggaggatgagttcactcgactagcacaaaggtatttataagtagccttgtaacatgcagcttcattttcatgcacagttaacttatgcttcattgtgcatctgcagaaaaaataagtctgtgatgactagtgatgattcattatctagcactggagaccttgcccttgtacccattgatatggaaagttcagaatcttcatcttctgttgcaagcaatgctttagttcctgttgacccagctcttgtcagtagcagtcctcaaacaaaagagcaggatatgatcgaccttttaagcctcaccttgtgcagtcctacacatgaagcttctacagattcttcaacgcagggtcctaatggacctcagcagcctgcagttactgatgggcagcacaacccatcgggtgtgccacagtatccttcaaaccaccagtcgcatccaataaatcaggaatatattcgacagaacagaaactatgttgcaccttgggcacaaagtggtcaatattatccagcaccaccatgggctgcacctccaagtgtcaattctaatcctttccagtcagctacttaccaagaacaacccccacctgttggttctgtttcctcaacctattcagctccctcagcatcatatacttccccttcaatggcatatgtgccaccttcagcctcattgccgatatggaatggttctactacaagtaatggactaagtgcaacacaagctcaaatgaatgggaatcaacaaccgccaggttcttcagcggcagcaagcaaaccttattacatacctgacaatttattcagtgatttgattgacttgaagggtctcagtggtggaaataagatgggcgtacccactagcatgggtagtgcaaatggtggtcaacctacgattggtggaaagaagtaggtttctctaattggttggtggtgccgtggtgaacgttaggaattctgatcactcagtttggtgtacatttcatgtatatctcccttgccccatttacatgtttggttacattggttcatttcatggctgctgactgttcagtcgagtagagatggtataccattattactgtacataaatgatgagttgcgcattgccttgtttttacttcgcgactcatattttgatatgtttggcttctcattattgagcacacgcatgaaatcgtgttcgtccaggatattaaatcctgttcgtgcgttgttattctccagcatattttatggttctgttgatctcaaggaaagttctcttatatagttattacttcctctagcccataatataagggattttagagcgatgatattttctaggactacgaatttggataggtcgtagtcctagaaagtgtcacatctctccaaaaatcttttatattataggacggagggagtagtaatttcggtgcgttggtaatgcccaggatttggtctcgttttggctttgttgtaattgtgggtttgtacgcctgcctccggtgcgaagggaaggcattccagcggttcatgatgaggcccagcatggggtgtaggctatgatgagcccgtgaactaagggccaggtcgtgacaattgtgcacgtaacaagtatagaactcaaatacactgggtctccgactgatggatcaaacaaaactacttaccattacttcactgtctattcctaaaaaaaattactttactgtcaactacctccattgtcaagtagatgtatagttaaaataagcttaaacttaaactttgcagttgatatgcacaggaacagaaggtatatttgtaccatggaaatgataatcttttagcgccgagttgacacacatttagtagatgtatagttaaaataagcttaaacttaaactttgcagttgatatgcacaggaacagaaggtatatttgtaccatggaaatgataatctcttagcgccgagttgacacacatttagtagatgtatagttaaaataagcttaaacttaaactttgcagttgatatgcacaggaacagaaggtatatttgtaccatggaaatgataatcttttagcgccgagttgacacacatttgagttgtttcgtcgttcttgtgtttgttggtacgcaggatctaaaagtcacgtttctttctcgtcgcgcgcggagcgcaaagcgacaactgcaaatctgcaatgccgccactccactttaattagtccactccatgaactggcaattaatgatcaaatctctgcaagcataaatgctgatgaggaggatatgtgcattaaaatgtgatattctttagtacagtttaatctttatgtagaaacaaggagaaaaaacacacttccacgtaaaaaaataaaccctcttttttaacataaaccatttttaaaaattattaaacttccatcaagctttatcaattacagaggaacaggtgtatattactcccacttttatacttgtacaccttctatcccaaaaaggataacttatagatataaatttgaaccaatgcttgtccaagtttatctttagaagttagttttttatcatacggatggctcctttagcaattgcatagtaacactgtttctttggttcatttcaggtagttctatttgactgtttcttgtcagtaataccattaattctcacagcctagtgaccatttataaacgctaatcctgccaaaatgattaatgtcaacagttaaatcatataccattccccaccgtgagtcttcacactctaaatacagagcaaatctgcgagagaaaacaaaccaaattgaacccattttctcttttccttctccaactcaaccccaaaaaagaaaaaacgaatttagaattctccaaccaccgcgacggccatggccatggccccccggtgcaccttgtccgtgctgctcccggttgcgctcctcctctgcgccgccatcgcgtcgccggatttccctctcggcaaaaacttcaccgtgcctttgtactaccagcagccggccgacctcgccgtgacgacgaccacggtgctcaacgcgtcgcacggcgcgccgctgcggcctggcgtcgccgccgccatcagcgtcgtggccggcacgggaggcctggaagggctgtccatgtgctccctcgtcgtcctcctgggcaacgtcacggtctgggcctcggaccacgacggcgggaggttcttggtgcggggcttctgccggctcgagctcacggtggacggcgatctgcggctgacggacgccgccgggaccgtcgggtggtcgtccgccacggcagggcgacgcgcaaaggtgatgcatgcatgactcctcctgtggatctacctagtttgcttttcaccattctgtctgcttgattattgcaatctttaccattgtttctgctcttattacaaactcgataggattgtaagctagatatgcgatgcgaggtacgcccagcgagccaacaatcaaggtatataatcgtacaatgttgttgaagatggaacagtgctagacttagtgcatcagcgttatgccgatatatatatgggtcggttgatatgaattatgatggagttatctgtccgaggatttgatgatttgtcctccctgttcttggataattggatagaggatttggcaaccttatgtctaggactggactagtatacatgccaaatactgacatgcgactgttaagtggacaatcctcgatttttccaagaactacctactagatcttatataccataaaaaatagtctatatataaaggttcatttctatgaggatttggttctgagcatttttttaggaaaaaaagggcttattttaagggctaccttgagtgttttaaaaaagcgcgcgaaaggcatggatcggatatcaacgtcataataacgacttttatcgataacctaattaataacgacacgtaagtcatagagggcaacaaataagtacaaacgacaaaaataaataaagcaacaaagtaaagctaccgttattatagttatcttttatgcaataaagtgtgactccctattgaaagtaaagcgcgtatagatttctggtggttttatgtttttgcactctttgcccaactaattgcctctcaattttgttacttattagtgtcaacctatttcatgggagatcacctttgagttatagcctgctaggaactttctataacgtattgctttttaatgtcgtgtggctgatgtcggttctctaacaagtgagcctatatgtcagccatatacgttagaggacgatacgttaaagaaagatcatctctctttctaggtcctctattcttagcaattcttttcacgtacgctttgttggttcaacctagagtaaccgattttacgttttctatcctctaaagtgattgggtcattttgaaatgaaaccaaaatgtgctatactaagttattgtcactttgaatattagtacttttggcaatgtttggtttgctaccaaaatatgctaaaatgtgacctccaacggttactttgacgtgataaccactgggcccactcaaaagtattgattgttaatagaaccaacgtctatgtccgacaacactcaaatgtgttgattgttattaacaaccagcacctttttcgcattataggtgtcagttcttccaaacaacacatcagatcagggacgtgtgctcgggcaaaaaaaaaaacactatatgttttagttgtatagacttctaataactataatgttatccctattttgcgtttatgtgttagtgataagtcaactagaaatttttaacttactaccaaaattttcctaggttttagcattacccgacattctgataaggtagcaaaacaaacaaacccttttaagtcagagctgagatactcacgttccccttatgtttcggcacaggttctgcgtctgacccggagtggcaacctccgtctcctggacgccaagaaccaatatgtatggcaaagtttcgacaaaccagccgacaaactgctacgcggccagcgcatcggggtgccctcctacctcaccgcgccggtgacaatgatcggctccgcgttcttctccttggagctcaaagagcgctcgatcactgccaacttcaacgttgggattaagaggtacacatactgggagctcactccgcgccataaccggagcgtggcatttgcggagatggacgtgctggggctgaggttgctggaccgtcaacggcgaccggtcgcgcagatctcgccggcgatcgaggcgcaggtcagcttcttggcgctcggagaagacggcaacctgggcatgtacttctacgacagccatgacatgaagttcgggccgtcgtacgaggcgctcgggttctgcgagcttcccctcgcctgcggcctccgcggggtctgctccgccgccggcgaatgcgacgacttctccacctacggtgtccatccggcgccggcggcgcaccgccacagtgcctgcaacgcgaccaccgtcgccgaccggcactacatggcggtgatggaaggcgtcaccacggcgatcaggcccgcctcgccgccgacggccaacgtgacgatgcggcagtgcgcggactcctgcctgcgcgactgctcctgcgccgccgcgctctacgtgctggcggccgtggccgaccacggcggcgcgtgctcgcgctacgagatgacggcgggggcccgggaggtgatcggcgggggccaccggcacaactacctgtacctggtgaaggctccaagaacgagagactctgagcacgagcacggagacgacgacggcgccgtgagccgcgtgctcaccaggatcctgatcggcttcggcacgctcgacgtgattggcctgtgcgcacttacatggctgtgtgcgtactactgcatctatctccgcgacatcccggtcctcgacgacaaggacgacgaggaggctgacgatgaaggaggggaagcagcccggcgaggagacgccgtgtcgcaaagtcctcctaccaacagtgaacctgtaatagaattgaactgataaatgaaaaattaagaaaaaagagaggatatactttttcttgggtgaagtgcaatgaagtacatgccacttggttcactgaagtgagcgagagccgaaccaggaacagagaactaactagcttggcaaaggggaagagacggtttgtctgtcttttaaagacccgcacgttagcccgctccaacacagcaaaacggtccagctcaacacaccaccgtggcaaaaccatcttaggtcttgcacggtttgaaagggattgatggaaaataattttacatcacaatagatgtagaataaatccctccaattcctccctcatagggattacactgtcttaagggttaagtacatggtatagaaaaatttaggagggtagaatacattgtttaaaaagtgaggggattaaatagttgacttgcaatagtttaggggtctgtgtagacttattccttggttgtttagtaccgctagcggttacagtttcacgcgctgcaatgattcttttatttagtttagtaggatgatttgggtctagtgggttgttcattaaatgatttgtttttttgccaaatcaactttttgggtagatggtttttatggaatgaatggtcttttggcctgtttggttgtggacttgtgaggaattgttaggagggaatgagagttcgaaggatggggattatcggaaaggaaaatttaagatcaaactcccacatttttaatatctagataggggcagataattgggatggaattccttttctaagtacacaagataaatgtcgaccatatatcatcacttaaaatttaattccacctgaacttcctatacttttcatcttacttaccaaacaagagacaaggagtaaaattgtaactctcatgaccaatccctcccccaattccctcctctaaactccccatctccattctcttgccaaacagtacgtttataaatagtagagaagagatttgcaattccaacttttttctccaacgagatgaatcagtcgaaacttccaagagcctattcagtttgttgttgctttcaaccttaccatattaaacacacttcaaccattgctaccttaccaaaatttggtatttctagaagcttcctctcttaaacatctaccaaaatttggtaaaggtatcaaaccaaataaagccaacactaataaaatttggtattaccaaaatgtaccaaatttagcattaccaacagttggtattgttgatatgggcaacaaatttaacaagccctagatccagctgttcagatgacaattctatatttctatgggccggcccatgtccacaattaggccgagtggtgaaagaatacgaagcccactaccaagaaacatgtctcatgttttgggccgagcccactcggaaatacagccgtttgcaccccgccggcctgacattaggcccaacgagacgttcacggtgtcttccgtctcactgacaacccggtccctacggcgtgcggcgcgattagcggcgaaagccaaccaaactaccaaccccaactgaacttggccgggcgatgcggacataccacaacaacccactgccgttggccgccggtcgccgggatcgatcgtccatgggcttccaccacttatcctctgcttgccggcagcggcgtttactgctcctcaccttgtccacagaggaggcagagattgccagattatcttggcattgttcaggtacacttgtacaagatctcttcctcctcattttgcgtagtttccagggttagattgggcagagagagttgttaggagttgcacgctctaaactctgaagttggggttactacctacttcggatttgcacatggatcctacctgggggattcaaccaacgtgaccgctgaacagtgcttgtaatgacgccgcaaccgaatatgcagttgcttttcacttggaaaaagaatatgtagccgctttaggagtgccaccatgtggtttgtgctctgatgatgttctccgatcctgttctgactgtgtcgactcaaagtctcgtcgagagcttcctggtgaacttttgacctctccattttctttttatcactataaacgacaaatgaaatattgcatcagatgagatcagcattcggtcagacattttagagatcagtggtttttcctgctaaaaggaaaaaggcgatgttggttaatctgaaacctgaagttcggttgatcgtctgaagctttaggaatccaggaaagcatgttgggcgtcagtatacgtttacatttgcaagtcctggccaccatgatgccaccatttaccgaacgagaatggcgattcaagtttctaacttatggtggtctgaactctgaattcagaagaaattaggtctcaggtatggtcaggcagtcaggctgaactccactccgtacaggagccacagaactcacgctctcctgtgccgtgcgtctgatctcaccatgaccttatgacaacggtaattcaattcagcttcaggctgaaggcggtctatagcatgaatgcgagtgctagattcagatgctgcagacatggctagaaatcattacacgatttcattgcctcggatcgcctctacgcggccgggattatcaccgtttcctttcccgcggggccatgttgatctggtcttcggtttttaatggcgtcgaggtgagctgaaagtaaccgcagcagcgagcgcggccagacacggaggagcagccggcgagggaggagttaactagccgtgacgtcactgctcccggcaaatggcagcggtggcgtggcgacaattcatggcgagagagcggcctgatcgtgaccgccggagggcggagggcggccggtgagtggtggtgaaccgtgcttgtgcagatccagagaacagtgacaccgttggttcaatgtattgaaagacatggcgcggaaattgaaccgaatggcgggaagagcttttagtcgacagctgactagctgagctgatcagatctgaattgtgtatgggaaatggtatctcttgctgcactgtcagaaagtgctgctgcaagctgaacatcagaaattgaatccgattaggattactatttgtaggatctctcttctgaagttaaatccgattaggagtactgctcagttcatgtttaagtgtttcatgcatattcggattaggacaccggaatgatcaggccaagaaaccttggcctatatatgcaaagcattcgaaagcattaccagttggggagctagcttgtaagatttgttgccgaatacttcagaaaacagtagggctagctaatctggccctaattatttgttgccgaataccaagtgtttgatttcgaattagcttgtaatgccgggcaaaatcacagtgacgtctacgagaggggcaggcaagtcagcaacggccagctccggtgagccctgcaattgatccgtcgtggctgcaaggtggccatgacaagctccgataattccggaccaggaattagatacagccattgatgccattcattgctccccggttaatagcaaacaatagcaacagatgtcatgatgtaccagtactgaatatcttgcaagcaacccgcagtctgaaatctcagcctccgtttctgaattctggtcacacctgctgagagttacgtcttgggccatagcacttgtgccctcagttgggctggttgctgtttaggctaaaacttatggcctaattgctgatctactaattagtccatactggctaacaacaaaccacataagctagctttgcagccacagtcatctccatcggacaatttattgccggttaattaaccgccggaattgcataaatacctagcagacagaggccattacagctcaagcaagtgcgcaccaccaccagcaacaatgtcttccccttcctcggcccattggctgagcttggtaggaagtatctggctccagaccatcaacggccccaactccgacttcccggtgtactcgtcgcagctcaaggagctcaagagcatcagccaggtgcagctcaacttcctcgccttcgcgtccgacgcgggcaagctcttcggatggttctccggggtggcggcgctgtacctgccactttgggtcgtcgcgttcgtcggcgccgcgttcgggctcgtcggctatggcatccagtacatgttcttggacagctccggcctccggtactggcatctcttcctgctcaccgcgctggccgggaatggcatctgctggatcaacaccgtctcctacctcctctgcatcaacaacttcgcgtcgaacagccgcgtcgcggtgagcctcgccaccagctacctcggcctcagcgccaaggtgtacaccagcctggccgagacgttcccggggctggccaactccaagacgaagacgtacctcctcctcaatgccgtcgtgccgctgttcgtcaccgtcatggtggcgccgtccctcagggtgttcgacctcaagagcgcggcggcgagctcggacgcggcattcctcgtcatgttcgcgatcacgctcgccacgggcgcctgcgcggtggtcggcagcatcggctcgacggcgaacgggctgtcctccaaggagcacatgatcagcctcggcgtgctgctggccaccccgatcctcatcccggtggggctcaagatccgcgagaccctgaccaagatacgggagacgcagcgggagaacaggatccatgacctcggcaccgacgagtcggagtccgtggagagcgtcgtcgtcatcgacgtcgccgccgacgcaaacgccgaggttgccaaggaggaggacgccgtggtgaagaagccccaagaggaggtcggcggcctccggctgctgaaaagcccggacttctggctctattttttcagctacatgttcagtggcaccctcggcttggtcttcctcaacaacctcggtcagatcgccgagtcgcgaggaatcgggcagacttccactctggtctcgctctcgtcttcgtttggattcttcggccgtcttctcccggcgttcatggactactactccgcgaagtaagcgatcattcctttcacacacttccatgattaaaaaaaaactccaagcagagtagcaaaatttgtcaaaacagagtattctttaactactacatgagtcctgagattttggagaccacgtacacttgttgttatcaaagattcatgcagtctttgtttgtttttcttttcaagtttcaaagacgacgtgctaactacttgttgctactgcctactataagtcgtagagttagatcttggctgtttgtgtcagagtgattcagtagctcgctggttttccagttccagaggctgattaattagggtgctaactgaaattttgttggtttgtgcagaagtggctactccatatcgaggacggggtccatggcgtcgctgatggcgcccatggcgggggccttcttcctgctgctcaaccagcgggacttctttctgtacctggccacggcggtgatcgggacgtgcacgggcgccatcacgtcggtggcggtgtcggcgacgcgcgagctgttcggcaccaagaacttcggcgtcaaccacaacgtcgtggtggccaacatccccgtcggctccctgtgcttcggctacttcgccgcgttcctctaccagcgggaggccggcgcccgcggcacgctcacctgctccggcgccggctgctaccgcgagacgttcgccatctggggcacgacgtgcgccgtcgggacgctgctctgcgccgcgctctacgcgcggtcccgcaattttgccgggaggctacctgtaaggataccgtcctgcctcgcccgcttagctaaccttgtgtagggtgctagaactttcttacacctctcagaggaggcctcttcttaatttaacgaccatacacgaaagcatcagccattaggcgatgtaattaattaggttttgtttctttccaccacctttttctttctttctttctttcctttggttttcttgactgattatcccacggggggatacagacaaaaggttggagcctgatcagtagatattgtgcaggctgatcaccttgttttctctgcatatattatatatgcaatcatatacgagtggttaaggggaattcaggtcttgatcatattggctaagttggccatgctactggtactagcatgttcatttttctttttgggtttcgatttattagctagtagtatttgatagcactgtagtgctactatgaggagtactacgtactgacgtacgtggagctggaaattcgcatttatgcgtgtgcaactacgggcaactactgccatttacatgagtggtccactgaagtctgtagcatgtagttccacgttattcaattgaaagccaggtatatgatagtactaacagtttcgaatacttgctgttcattccaccgtagcctgatagttgcagttatatggaacactcgtaggcagatagatttatacgtttacagacgaaattgtcaggtaccaaacctagtgcttgatcattaagtcaaaccagatccacgtcaataactgtccataacaattctgttagtatctcttcgtaccgtatatatagtcaattcgtagccgtaggtctaggacaaggcagggaaagcatgtaggcgttttaaacttttaatcctctcctggtgaaagttggacaaccgtgttaatcctcttctcagcaggcggtatcatcagacgtttaactgaaagttacactatggcccatacatgtgtgaaagatcaaatgaagaaatgttcaacactatcctggccacctttaatttctggatatgttcagatgcatcactgctactccctccgttccacaatgtaaatcattctcacatcgtggaacggaggaagtagtacttatctttcgctcatttgagaaccatccggctatcccgtccgacagtaacagcagtgatgcatccaggtccaatccacacacacaagctgaacagtgttatatagaagaattttaccatggttcatgtaagtactaagtactctgtatatacatatgcattgcatgatcatagatatatactccacgcattgcatgattatatggactcctatctgacaggcatgtgaggaagatgtaaccatttaaggatgggcagagtaggttgatccatggtggccatcggtctctcgtggtccactcacatgttgcatcatggcactgcgatgcaaagttcagttccatcttcccccgtgtacttggatggacaaatgctatttattcgccgaaagcttgcagagccatcaacagatcaactccctctagccccctggccggcaagaggcgtctccgccgtctagctccgtacgtacgtctccgatctttcagccggtgagctactaaaatcatttatgatctgcgtggttggttggcagtattgttgagactgcaacatcgacagagcgatctatcataagctcagcttaggctgtgttcgtttggacgttttcccagcgcgctacagtagcacggaaaacggaacggttcattaacacgtgattaattaagtattagctaatttttttttcaaaaatggattaatttgatttttttaagcaacttttgtatagaaactttttgcaaaaaagtacaccgtgtagtagtttgaaaagcgtgcgcgggggcaaaacactgtagcgcgctgggaaaacgtccaaacgaacacagccttagactcacttaaaaatctgtcaaagccttgaattacttccttatcatgatgcatgactactgctccatgttaattaatttgtagcgaaatctcttatagatagttgaaaaccacgtctaagctaaaccatcttaatgtcctgctacgatcgagttgatggagctagctagtgtggtacaggcccagattaagctccttttcatgcttctgcatgtctctgcctgctgcccggagatggtcagatggagggatgcgctcattgctcggtgcagcgtagttattgtggtggatgggtgcctgtgttggtggaggtaatggggggtggttgttgagaaggcaaaatttgtgaaggtcatatgacatgtgtcctgtgcacgcacatgcctggcacgaagcgaatccgcggacatggcagcagcaacaaaggagctatagctagcttagctaacgcggggaaaagcgggaagagaaaaaggttagggacgacgaagtgaaagcgtgcgctcttcactgtccatttgtaatacagatttgccactgatcgtgtgtagttagttggacatctttgtttgtggacgcaatgattacactcgtttcttgctgttgcattgctgatggccggattagactcggcaatgcgcatcctgccgctgctgaaagcatgtcgtcagcagaaagaaatatctcaggttattgcgagatgccgcccggggcactcgatcccatatttttgaatcaatcatgtacaaaccattaatgtgggtggaggatgggagtgttaaaatattttcattaccttaaatagagactgtgtcgatcttgtctaatactccctccgtcttataatataagagattttgaatttttacttatactgtttaaccactcgtcttattcaaaaatttttgaaattattatttataaatttttacttactttattatccaaagtactttaagcacaacttttcattttttatatttgcacaaattttttgaataagactgtcggtgatatgggcccgggggtatcacgtctagagggaggaggtcgccctcaaacccacgtggctccccgcgaggggggatcaagcccggggtggagcggtggctacccccacccagctagagggaggaggccgcccttaaacccacgtggctctccccgagggaggtcgagcccggggtgttgtggcggctgccccctcccagcttggggttgggccgcccccaaacccacgtggctccccccgaggggggtcgagcccggggtggcgcggcagctaccccctcccagctagagggaggaggccgccctcaaactcacgtggctctccccgaggggggtcgagcccggggtgttgcggcggctgccccctcccagcttggggttgggccgcccccaaacccacgtggctccccccgaggggggtcgagcccggggtggcgcggtggctgccccctccaagctagagggaggaggccaccctcgcttggggtcgagctgccccgaccccctccacatatcagcccacgtgtacagggttaggtgggcgcgcctaatgcccacctaactgcatttaaagcagtctatgcaaccgcgccaggccgcatttaatgcggcgtgctgcgcatctgaccggttgaatgaccgatgggatggcgactgtgtacccctgccctgtcagtgtgtcaggcggcgagcggcgtgctccatcccgtcccatcataatgatgaggggcttcacagcctcttaccccggtcagagctggtccaaccactctgaactgacccgggttcccgttttctggtgtgaacgagaacccgaaagtcctcatccattaaatggcgaatgacaagggcgctctgcattgatttgatgggccccgcgcagcaaccgcggatagcttctgggctaaggcacaagacatgtaattaatatagagaatattttcccttctccctaggtagcactcgcagcacatgtggtatccccttagagtataaaaggaggaccatgcctagcgaggaagggggatcggactgaggatccctgagccaaagcttgtctaaccctagcttgcataccagggattcagggactttctaagcacagaagaatcatacacacaggagtagggtattacgcttcatagcggcccgaacctatataaacctcttttgtctcatcgtcttggaggggcctccgagatcaagatcacacacagtttcgctcaccaaatcctcgaatctcacccgctgcccctggccgaactctcaaaggagggcctcacagcctcccgctagagagggtcacccctcaacaaagacgagtggtcaaacaatgcaaacaaaaactcaaaatcccttatattataggatggagggagtacgacagaaaggagtgattttgtttagtgccgtagaacaaaaatatttgaaaaaaatacataatcacaaatatcttgaattgcaaaagggcgtagctagaaattgtgatatgaatgatactttttaaaagaacttttcacatttattttatgaaagtttggtttgcgaggatcttatctatttatagctatattaattgagcacttcgagtgagctcttacatgaacttaaaaatatataccatttgataagtgaatatgtaaattacacattcagatttcgtgttaaatgaaacatattccatggattctttatatttagttgatttatctccgatgtttttctttggttcgacgccatttgccaacagtaatgtgagcggaattcgatcgacaaaagatctaccgttgattttagatttttttttctattttgaggaaggcaaggactacgtacaacttaatatcagttgataaaaacaatagttatggacagggcactatgaccaaccctagagggagatttgtcttttaagatggtttttcttattagtttctttgtaagaattggctttaacttctctgaaataaaatccagaatgaattccatcatcttaaaatagaaaaaaaatagttatgggcactatgaccaaccatagagggagatttgtctttaagatggtttttcttattagtttctttgtaagaattggctttaacttctctgaaataaaatccataatgaattccatcgtcttaaataaaaaaataccgtcttaatttgagagataccaagaggtgccaaattttacagtagaaaatgcagtacctccttgtacctccccaaggaccgtaaaatccctctcttaaaaatatctagttgttacaaaaattggaattaatagatatggagttgtttcatcgctttattaatttaatatgaatttgaaattgtcgacgtttgatgtcgcgattccggtatttgcatagtatggggatcgttagtactaggatatatgcgagattgtagtaaaagagatgagggcgaggatttttatacaggttcgggctcctgaattgtcaggtaatagccctacatcctgttggccgaagccggtcgttgctcttattcaccataatcacaccagtacaatatttagggtagcctatctaacggttgtcgacatggcggtctgaaggtctgactcgtagtcgacgacagggtagtcttcctcctcgaatccgtgcccgatgagatcagagacaacgctatgtctctcctgacagtatccggagacaccgtaggggattagccatgcctatctctgaagtcgatatccggcttcttgtcttggcgcatgttggcttgtatgtggatcttgtgtcttgatctattgtttcgtgtcccctctcctcctagggggccttgtatttatacccatatgtccccttgtccaagtaggactagggaaaccaatatggatacaatccgagtagtccttgtcgtttccatgtaaaactctattcatccttccttatgcagaactccttctatatctgaaagttgtttccgtataggacatggtatgtggtgggtcctgccgagatttagtcaactattattaggtatgtggtatccataaccttgacagaaaccaataattatcaagttgtaactgaaacaaactcttctttttaaactaatatgctaaaattaacaaacaaatttagaaataaaatgtagatggactcacaatttagctattttaaatataattataaaattcaaagttaacaattagccagttgtaactgacacggtttcttttaatttaatatgctataattctaaaaacattcaacaacaattttagtgtatgatcaaaatttaaaatatatataaaaaatagcaatagccaatgtaacacatgggtgtgacatcccgacctaggggttaataggattaatagaatactcatatcaacaggttacaacttcttttccggaagccgatctccaaagaacaagttgcaacttcttttccggaagctgatctccaaagaactccagggttaagcatgcttggcctggagcaatttgggatgggtgaccgaccgagaaattcttatcaacaagttgcaacttcttttccggaagccgatctgcaaagaactccagggttaagcgtgcttggcctggagcaatttgggatgggtgaccgaccgagaaattcttatcaacaagttgcaacttcttttccggaagccgatctgcaaagaattcttcccgggtacgcacgagttcacagagggacagtctatgacctatgaaaactatcagatgtaagcgggcccggcctgggaagaggcgagacgttacaatgggttaatgactaagtggtatattaattcacgccatgggacagtctatgacctatgaaagctattagatgtaagcgggcccggcctggggagagacgggacgttacaatgggctatcagatgtaagcgggcccggcctggggagagacgggacgttacaatgggttaatgactaagtggtatatcaattcatgccatgttttattagcatggctgtgaacaaatgatattttgctcaagtaaaaaggagtgtgagtagtactaattagttttaagccatgggacaggctatgacctatgaaagctatcaaatgtaagcgggcccggcctggggagaggcgggatgttacaatgggttaatgactaagtggtatattaattcacgccatgttttattagcatggctgtgaacaaatgatattttgctcaagtaaaaaggagtgtgagtagtactaattagttttaaaatttcttgatacagtgttacttcctcatattcataatatagtgatttttaggattcaaattttgtatcacaatataagtattcatataatgattcctatagttcccattattccaactataggggattgcccctattcagttttgcgctgaggtaggtgacggagctcgtggctcctcaccgggagaccgcgcaggcccccctttgccagttcggccgggggcttagggtgaaatctcaagctctcgctctctctgtatgtggaaatatcgtctgccagccagaaaacacgagacaccggcgatctatacaggttcgggccgctcagaagcgtaataccctactcctgtgttttggtggatctgtgtatgaatgagctacaagtgtgagctgtcttctcccccgttctaagctcctaatctgggaaagaaccaaaaaaatccccccacctctatgggcaaggtcctccttttatacttcaaggggataccacatgcacccttctctttccaaactggactgttctttttctcttgaacgggcggagatcagcacggttgctgtccgaatgacgctccgatgggacagcccacacctacctccacttccgccgggggtgagcgcgtcgtgggaacatggctgtgcgctgacgatatgatcagtgtcagaccgatcacaaatcggtcattcttgtccaccgcgtgtaatcttggcaacgtgcatgtttgcccttcttcacacaacatcttgcctgtaatggttaggatgaagcctggcatatatcgaccgggtctaacgtgtcatctctaagagataacacgcttaacgccggcttgagacgagtgcctagaggctttcgtcttgacgggatggggcatggcgtgcgtcagaccgccagtcgccacctaacccgtgatctgaccggtctgtgactggtcacagaccggataaagggacgcgccgtgctgcactgcatgcagcgcgacacgcttgaccagactgcaataaatgctgttaggtgagcacagctgtgctcacttatcccatatacgtggcgcagacttcctaaagggggtcggggtgcctcggccctcggggccggggcaagcgcaacccgaccccccctcgggggaaatcaggaggagggcggacacctcaccctcgggcccgacgtccccgaaggtgccaggccacgtgggcgattgcgtctgcctcaagcctctggtcatgatactcccggtcccatatcaccgacagtagcccccggcgttgtgccagagcaatttcccttcccaagggaagcggtcaggtgtgacgccactcctaaagcctggtgacaggtgggaccggtctccgtaattgggcaaaatacccaacggtctcaatccatgcacatcggtattgataactttggttgtccataatgggcggtctattcagactgccacaccacttgagcagcgcgcgaatctgggtgagcagatttgtctcgctcggagatacggtaacgccgcttcggtcggcgagcgtaattaacgcgcgcacgatacaatccgtttcgattgccacaaccgcatatccacttcaagcgccgtaagcgggcgaatgggattagtggaagcgtgggcacgggaaacgggggagcgagatagcgagatacgagggagcgaggtagtgggcacgagaaacgaggagccaggcccagcgatggcaagggtataaaagcatcgagaaaaggatttgctcccttcctttcgccattgttcctcttgccttcgctgcctgagctctaactctttctctgctacgccctactttcgccacacgcgctcgttcccaatcatctcttcctccaccgccatggcacggggctctgctctgctcgacggcagtgtactgccgccttcccgcatcgtgaatgagaggcacgccggactgccgcgccgcttcatgccggagtccgccaccggtcgggagattgtgatgctgggcgaggggcgcccggcaccagactacccggggcggtccatcttcttcctccccttcgcgatggctgggctggccccgccattttctcatttcttcatggacgtcctggagttctacgatctccagatggcgcacctcacccccaatgcggtgatgacattggccatcttcgcgcacctgtgcgagatgttcattggggtgcgcccctctcttcagctgttccggtggttcttcaccgtgcagtcggtgtcaccgccgtcggtggttggcggctgctacttccagccgcgggggccggtgctgaaccgctatatcccctgcgtcctccgcaagaagtgggacgactggaagagcgactggttctacaccccccttgccgacgaagcgcgcctccgacttccgagccagcccccggcgcaggtctccagctggcgggcgccggtagatctgggggaggagtacgacgccgtcctcgaccgcctggcgggcctgcgatcccaggggctcaccggggccatggtattcggcgattacctccgtcgccggattgcgccgctccaacggcgcgcccggagcgcctgggagtacactgggcctgaagactacatgcggacccatcagggagccagatgggattgggctcccgaggacttcaagatcgtggtccaaagggtgctgaaccttagctccgcggaggcgtctcaccttcctcaggagatcctccccctctgcatcgatcccgaccgtgtctccattctatccattatgctgggggtcggggcctcagaggagagagcccctaagggcaacgacggcgcgggcgagcgccgccgggggaaacaatctgccccgggagggggtcgtgcttctgggccccgcgtcgggggctcggggagcagccgccctgccgacgccccggggaagaggaagctgggaggaacacctcccccatctcccccccgagggggcggggcggtgcgtaccagcggccggcgcccggagggggccgcgccgacgtctcagcccgagggggagcgcaagaagaagcggctccgcaagatgggggagacggaaccagcccggggaaacctaatttcccccccaaggtggtcattcaaccgaccccctcgcaggttcgtcttactctcattgcaaccatctttctccaaaaagaagttttttcttgctcactttgttcgtcttctggctttttcttctgcttcagagacgtcccgtcgcattcctcccgccaccccaagtccggccagttcgaggccgaagatccagcggccgcagaggagcggaggcgagagtctgaccggcgtgaagccgcagcccgccttcgggaagctgaagaggccgcccgggaggccgcccgggttcgccaagcggaggaagctgctcgggaggaggccgcccgggctcgccaagccgaagaagctgcccaggaggaggccgcccgggctcgccaggctgaggcggcagctgctgctggcgcgtcactcgggcccactccctcgggcggccctcaggcgacatcctccgaggcggctcgcgacgaggccgcgggcgcgtcgcctgggcctacctcaccgggcgacgcccaggaccaaacgggcccgggggacatccccgagctcagcgtatcctccggggggccaagccgcgtcgctttttctccaaggcggcttttctcctcctcttccatcgccccggtgagcgccgagcccattatgcaggccttggccgccgcaaacaccgcggtactagacggatttagcgcccaggtggaggccttgcgagcggaacgagcggagctcgaggccgcatgggcgcgcgtcgaggaggggcggcgctcggtggacgccatggtggaggtgggccgtaaggctcaccgccgccacatctcggagctcgaagcccgcaaggcggcgctggcggagatcgcccgggaggtggaggaggagcgagaggccgccctcgtcgccaccaccgcgatggtcgaggcgcaagacaccctccgtcttcagcacgcaagctgggaggcggagctgaagagcaagctcgacgccgcccaaggggttctcgactccgctgccgcccgagagcggcgggcaacggaagccgaagcggcgtcccggcggcgcgaggaggcccttgaggcccgtgccatggcgctggaagaacatgccggcgccgtggagaggggcttgatggaccgtgaggccgccactgctctccgggaggcgacgctggcggcgcacgaggccgcctgcgccgaggaggagtccgcgctccgccttcgcgaggatgcactcgccgagcgggagcgggctctcgaggaggccgaggccacgacgcgacggctggcggacagcctctccctccgcgaggcggcgcaagaggagcaggcgcgccgcaaccttgaaagcgtccgcgccgagagaaccgcgctggagcagcgggctgccaacctcgaggcacgggagaaagagctggccgcgggggcgcgcatcggtggggcggctgcgggcgaaagcgacttagccgctcgcctcgcggctgccgaacacaccgtcgccgacatgcagcgcgcgctggactcttccaccggggaggtcgaggcccttcgcttggcgggcgagattgggcccggcatgctttgggacgcggtctcccgcatgaagcgcgccggtcggcaagcaggcctctggggaggccagacgacggtgccccccaccaatctggaaggcctcgctccgcacctcaacaggatggcttgggttctcgagcgactccccgaggagctcgagaagaccattaaggcatcctcgagggacctcgcccggggggcggtcgaactcgtgctggcgagttaccaggcccgggatcccaacttctccccatggatggcgctggaggagttccctcccgggaccgaggacgaggcgcgcgcgcgggtcggggatgctgctgaccacatcgtcaacggcttcgagggctcagcccctcggctcgcgttcgcccccagctccgacgaggaaggcgacaccagcagcgaggacggcggtggcgacgaggccggcgacccgggcgcatatgaatgagcccccaggcccccgccactcttaacttttttttcttgttctttcttctaaggccttcatgcctcttttttgtacaatctgacttaatctgcaatgagaaatgatgaaaaatttttgtgttaattttattttgctatatatatgagttgaggatgatctgtgccatggtccttttgcgccttagcttgaaataagggctcacgcccaagtcccggtcctcgaatggctcgggtcggggctagtgcctggggagatccgcatgtcgagactggccaggccgggaacgtggtgaccgaggggtatgggtgacccgattgtgggtttttgccgatccccccccggagttcaccacgccccggggcacggctcggttctgggccccgtttggcgattttagctgaccgaaccgagcccccgaggacaaggttgagcacgagtgacattatttcaagtcaagattcttcaaaaggaaaaaacggcacagacacaacctttaggaaattgaaactgcttctattgaaatgctgaaaggaatatatgtgcatgtgtggtagcccccggctaaccctgcacacccgaggggggggtgcggggttagcccgagccaaaacctgacacccgaccccccccttcaggggtagaagcgacgaaggtgttcgatgttccacgggtttggcagctccgtgccgtcgcccgtggccagccgtaccgagcccggccgggggacaccgatcactcgatacggaccctcccacatcggtgagagtttgctcaatccagcacgcgtttggacgcggcgtaggacgaggtcgtcgacgcagagtgatcgggcccggacgtggcgctgatggtagcgccgcaggctctgctggtagcgcgcagctcggagggccgcgcgccgccttcgctcttccaagtagtcgaggtcatctctacgaagctgatcttgatcagcctcgcagtacatggtggcccgaggagacctcagggtgagctcagatgggagaaccgcttctgcgccgtagacgaggaagaaaggcgtttccccggtcgctcggcttggtgtggttcggttcgcccagagcaccgctggcaactcctcgatccatgaatcgccgtgcttcttgagaatattgaaggtcttggttttaaggcctttgaggatttctgcattggcgcgctccacttggccattgcttctggggtgggcaggtgaggcgaagcagagcttgatgcccatgtcttcgcagtagtcgccgaagagctcactagtgaattgggtgccattatccgtaataatacggttaggcactccaaaacgggccgtgatgcccttaataaatttaagagcagagtgcttatcgatcttgacaaccggataagcctcgggccacttagtgaacttgtcgatcgcaacatacagatactcaaacccgcccggggcccgtttgaacggtcccaggatatcaagcccccagacagcaaatggccatgacagtggtatgatctgcagggcctgggccggctgatgaatttgcttggcgtggaactgacacgctctgcatcgccggaccagatcgactgcgtcattgagagctgtcggccaataaaatccttgacgaaaggccttgccaaccagggtgcgcgaggcagaatgggctccgcactcgccctcatggatgtcagcaagaagctcaacgccttgttcctgtggaatgcacttcaggaggattccattagccgcgcgccgatagagggtgtcacgaccggaaatcacccaacaggcgttcctgacgtgcgtgtattattccttgtcccaggaggcaaggtacaccaaaagttgatacaattcagagtttaacaagcggaagcgtaaatataattattacatgggcaacgaaggcccagcacactcaaagacaacgaaaaacagcggaagactagggcgacgaccacaggcacttgacggcaggcacgagctagacaccgaagccttcatcttcagggaactcctcatctgggcttgggaaaattaagcaagactgagtacaaccaccgtactcaacaagacacacccacaaatgcaaaataaatgcaagggagtacaagggaattataacataaggggttagagttgcagtaaacagcatttaaaggaatttagttgctcaaagctagttgtaaacacgatcctagaactaaacaatgttattaatcaaggccgtgaacccacacgaacctgccttaacccaaggcctatgatgattcagaccgaactggcaacccgaccctgggtcccagctcgtcctaagccaacccaggccaaccattccacattttagttgttgagcaaattttaagaattataacactgacttgggtacattgctaggcttgcccatatccgagggctcggctattcgaatagatttactctgatcagaggtgtacatctttacccacaagacacatcttcctcacgtgtaaccacgtgccacataccaccacggtatacagacgaaagacgtgacatagtttccaacccatcctagccttagacaagagtaccgacccaattccgcctacggccgggacccccgggacaggcagacggaactgagcccctggcattgggcaccaaccctccgccgtatgacatctcgactaccgggccgcagctcgtgtagccttcatttgccctggagaatgtccatcgacccccgacttcatccatctccaatccgtgtacttttgtttatgactagactgagccacaaactaagccttacccattagacatgtggaagtacggtagtgctttgcaacagaggcccgagctttagtccttatagtggccggggtgctacttcccacaactggcatgcacccaaaccccaccgaaaacaggttttaggggttttgaaagaggaagagaggtgtgtgtccaattccaacataagccaaccattccatggtgtccaaatgatatgagaatttcccaagtctagagttgtaaaaccacctaatgttgcctaattaacttgcgaagcatctacctagaattatactagtggtactatgagtagagagtgtccactagttggggttttgtttgtctagggtgaacaaggtaataataataacaataacaataataatatggtcataacaaaggtaaataggcatggctaaataaaacagtgataacgcgggaatttaaataaagcgataatgcaataatttaaatcaacataattttataaactgggattcaatatgatcaagatgatgtgtcttgccttgctcgttttcccaatcgacggcttcgacttcaacgaagagcggatcttccgaagctgcagcgtctacacgaccgacggaaaagaaaaaggctttaacactaaataactccacataacagcagaaacaaagcacaaaaatgggttctttacatcttaaggaaaaattagagacttgaacggtccaattccgagttcaaatggccaagatatggccatttgaagtttatatgctctttaaatggatatttgcgaatttcttcatttaattttcaattaaaaatcatgtttattgcgtcagccgaggggcgggcgcgcggaccgggtccacgggaagtggggcccacgcgtcagccgctcggtccacggtggaccgggcgcacgcggctggcggcggtcggcgccgtgggtcccgcgcgtcagccgcacccgcgggcgcgggcggctgacggccgggcccacttggcagccgcgagggcgcgcccgagggcggcctcgccggcgcggccgacgggagcggcgcgcaccagcgccccgatggtcgccgccggcgaccaacggcgcggcggagtggcacccgagagagaggagggaagggggaaggcgaacggcggtcttcggctcaccccgagacaacggcgacgacgagaacggcggacggagaggaagaaggtggcggcgcggctcgggatgacgacgacgacggtgctccggcggtcggcggacgaagcggagcggcggacggggtcggcggcgatgcggcgatgccgaaggaggggtcgccgagccgggaggaagagcggagcgacggcggcggcgaaccgacggtcgacggcgacggcggagagagaggagcacggcgctagcacgattccgacggcgagagcgagcggcgaacggcggaaacggaggaggagagcacgggcaacgtttttatagcgacgagagggggagagcgcggccggggagagaggaaacggcgcgcggaaatctcggccgccatagatgcgccggcgaacttcgcgggattgattcgaacgaatccgagggagagagagaggggaaagagggggaaacgggggaggagatcgcggggagtaaatcccccctcttgattgcacgcggagtggacgggagcggcgggattcgcggcggcggcggcgctagggcacggacgcggcggcgggcgcggcgcggggttggggatgacaggtgggacccacccgtcagcgagagtggcgggcgggcccgcctgtcagcggcgcgcgcgcgcgcggggagccgatgggccggggggagagagagagagagagggagggaatgggccgagccggcccaagagggaaaaggggggggggaacagacttctttttagggtttttctttttataaacctttttaactttgtttatttcttttcaattattatttgtgctctgaaaattccactaaaatttatttaagcattttaggcttttaggaaatatacaaaaatcctccaagcctcatttgacttttatctttgcacattttaattgttggaggctttcacattgaattttacttattcttttgcacaattttgaggatagattttagagtcgatttgggacgcgacagagggtcccttctaccagcacatagcgtttggaaatgcgttgtacgcgttcactcccttcgcggtcctcaggtagagtcttatctgtgaggtatgtttggatctcagagatccaagcaatcaatctaagggagcttggaacgctctcttcgggtcccgaggcctggactccgacgggcctcgggtgccggtcaggcgcatccgtctcccctgaggggtcgggtcgcgccgacggctgggtaagcctttcttcaaaggcgcccggtggggtctgggctcgcgaggacgcgagccttgagagttcgtcggctatcatgttgtcccttctgggtacatgccgaagctctatcccgtcgaaatggcgctccatacgccgcacttggcgtacgtaggcgtccatctgtgggtcagagcaccggtactccttgcagacctggttaacgactagctgggagtcgcctaataccaagaggcggcggatccccagtccagccgccactctgagtccggcaaggagtccctcgtactctgccatattgttagtcgctcggaagtcgagacggaccaaatatctgaggacgtctccgttcggagagatcaacgtgacccctgcaccggcgccctgaagagacagagaaccgtcgaactgcatcacccagtgggcggtttgaggcagctgtgaggggtccgtgctggcctcgggtattgagacggtctctggagccggggtccactctgccacaaaatcggcgagggcctggctcttgatagcgtggcgtggttcaaagtgcagatcgaactcagaaagctcgattgcccattttaccactcgtcctgtaccctctcgattatgcaagatttgaccgagggggtaagacgtaaccacagtgacccgatgcgcctggaaataatggcgcagtttcctcgaggccatcagaatagcgtaaagcatcttctgggcctgtgggtatcgggtcttggcgtcccggagggcctcactaacaaagtagacaggccgttgcacctttcggcggggccgatcctcctcgctaggggccgtacccccggggcgttcttcgtccaagtggcccctcggggcacactcgtcttccgcgctgatgacctcggggtcggaggatgacaggagcggccctcccacagtggcctcggggccgtcctgggggtcggggactcctggcatcgtcggacaagcgggcaaagggccaactccggtcgtcaggggcctctggcctccgttcggctcgggggcctcttctccctgctctttcccgggtcgagtcagcacagggttagcctcggggccaaagggctttaagtgcagccttccctcagtggcctcggggccttcctgagggtcgggggcacccagcaccgtttgacaagcgggtggagggccgactccggtcgtcgggggccttaggccaccgttcgactcgggggcctctcctccctgcctgctcccgggccaagtcggcacagagcgggggtgcgcagaatgaggattgtcctcatcgcgctccacaaccaacgctgcactaactacttggggggtcgccgctaagtaaagtagcagggactcatttggctccggggcgactagaaccggaggagagctgagatacgccttcaactgggcgagggcattttcagcttcctccgtccaagtgaacggccccgagcgcttgaggagcttaaacaagggtagcgccttctctcccagccttgatatgaaacgacttagggcggccatgcaaccggtgacgcattgcacgtccctaagtttgctgggggggcgcatccgctcgatagcttgaattttctcggggttggcctcaatgcctcgggcagagaccaagaacccgagaagcttgcccgcaggtacaccaaacacacacttatcggggttcagttttatgcgggcggagcggagattctcaaaagtttccgctagatctgaaagtaaggtctcttggttgcgcgtttttacaaccaagtcatcgacatacgcctcaacattacgtcctatttgactacccaaagaaattcgagtagtacgctgaaaagtaggacctgcattttttaacccgaaaggcattgatgtataacaataggttcctacgggggtaatgaacgcagttttttcctcatcctccctagccatgcgaatctgatggtaaccagagtatgcatctagaaaacacaaaaggtcgcaccccgcagtggagtcgacgatctgatctatgcgaggcagggggtaaggatccttaggacatgccttgttaaggtcggtgtagtcgatgcacatccgaagcttgccgttcgccttgggaacgaccaccgggttcgccagccactccgggtggatgacctcacgaatgaacccggcctccaaaagtctagccacctcctcgcggatgaaggcttgacgttccggggcttgccgccgcactttctgccggaccggccttgcgcccggccgcacggcgagacggtgctcaatcacctccctggggaccccgggcatgtcagctggtctccatgcgaagacgtcagcgtttgcccgcaggaaggagacgagcgcgtcttcctatttgccatccagaagaccaccgatccgtgtggtcctggatgggccgtcgcccaaggcaacctccttgaccggggcctcgtcgcaagtggccatccgctgcctcggggcggtgggggcagaggggccaagcctctcgtcaccaccctcgggcttggacgcagcagcgaggcggtccgcgcgctgctcaatgcaagcaagcgcgactttaaggtcgccacggacagagatggggccaccggggcccggcatcttcatctggaggtaggcgtagtggaccgccgccatgaacttcaccaacgcgggtctccctaggaccgcgttgtagggcagactgaggtccgccacatcgaagctcacccgctccgtgcggaagttggcgggtccaccgaaggtgaccggtaggtcaatgtgacctaatggccacgtgtgccccggcgtcacaccgatgatcggttgagacggctggagcaccatccccggggccttgatagcatcaaaggccgcgggggaaaggatgttgagagccgctcctccatctatgaggacacgtcccaacttcatgttgcagatggtgggggaaaccaccatcgcaacctgccctccccgggcaatgcacggtgggtggtcagtctggtcgaaagtgagagcgacctccgaccaccgcgcccgacgcatcgcctcatgggtaggggccatggccagaagctctcgtttcatagccttgaagctccggcgagagacgtgagcacacgctcctccatcgacggtggcaatggtggccccaggttcttggaaacctaggtcatcatcaccatcattgatgtcaacagcgggggccttctgcttggcctcacctcgccgtttgccggatggaaccaccggggacttgccctcacggcgttcctgcctcttgtcctcctcccacttcctcgttcgctcagccaggtttttgactgcacgacagtccgcgagatcgtggagggaggtgttgtggacggagcaccacctgccggcggagcgctccctgccgggagttccggcctctttctttttgtcgctcgcaggcctcccctttcgggtggcccgcggagcgccctcgacggcgaggacatgaccctcgtcgccggaacggtccgacctcttcttcctcctcctatcacgccgccctgtctgagcggcggatccgggggcggccgaagctgccactccggaaccggaggagttccaggtccacgcttcctccttacgagccactcggtccgcgagctgaaaaagctccgcggtagtctggggctctttggaagcgatcttttcgagcatgcggttgtgccgcacgccccccctgaacgcgtagatcaccgcgtgtgcagggatgcatggtatagtgttgcggacttggcaaaaccgctgaatgtacgagcgaagcgactcatcatcgcctcgctgtactgcatgcaagtccgcttcttcgcctgggcgcggatatgtgccttggaagttcatggtgaactgttggcacaaatcttcccaggagtggaccgacgcgggtggcaggttcattagccaaccccgcgcctgtccttttagggccatgggaaagaagttcgccatgaccctgtcgtcacccccagcggcctcaatcccggtcgtatagacctggagaaactcggtggggttgacgctcccatcgtacttctcggtgatggtgggccggaaccttgggggccaacggacattccgaagactcgccacaaaggctctacagccaacaccaccggccgggggcacggagggctgatcttcacgtccatgtcgaggtgacactctggacgaggaggctccctccgttgcacggggagtacgccggctattacgccggcgcccgatgttgaggcgggcatccggctccccatgctgatcctcccgagtcgacggtgtagacgagggagtggcagccgaatgacgtgcagccgccgccgctcgccgcgccctccgccttgatgacacggagccggtggtagcggcgccggaggtcttggtggtggtggcggaccgtccaccagcacccaggcgctgctgtgccgtcatgaccaagttggccacgtcttccagccatcgttgggctggagactccgggtcatggacgacaggcgggtgtcgtaggagcgcgccagcagcttgaagcgcaccctgaggcgtactgccgtcgccgtagacgaggaggcgatgctccccgtctcgccgttctcctgcatcacctgcggccggtgacgccgcggacttgtcgaccctctcaagcgcctccccctgcttagggctttggcgcggaggaggtggaggagtacgagctcgacggcgtggattcggctccccgtcgtcgccgctcacactcggcgagaggtcgtgcgtttttccttgctcggccattaggctgaacaagaaaaacttggggcacacggaagagtctgagagctcagaaagcacacgctgagccccctacctggcgcgccagatgacggagctcgtggctcctcaccgggagaccgcgcaggcccccctttgccagttcggccgggggcttagggtgaaatctcaagctctcgctctctctgtatgtggaaatatcgtctgccagccagaaaacacgagacaccggcgatctatacaggttcgggccgctcagaagcgtaataccctactcctgtgttttggtggatctgtgtatgaatgagctacaagtgtgagctgtcttctcccccgttctaagctcctaatctgggaaagaaccaaaaaaatccccccacctctatgggcaaggtcctccttttatacttcaaggggataccacatgcacccttctctttccaaactggactgttctttttctcttgaacgggcggagatcagcacggttgctgtccgaatgacgctccgatgggacagcccacacctacctccacttccgccgggggtgagcgcgtcgtgggaacatggctgtgcgctgacgatatgatcagtgtcagaccgatcacaaatcggtcattcttgtccaccgcgtgtaatcttggcaacgtgcatgtttgcccttcttcacacaacatcttgcctgtaatggttaggatgaagcctggcatatatcgaccgggtctaacgtgtcatctctaagagataacacgcttaacgccggcttgagacgagtgcctagaggctttcgtcttgacgggatggggcatggcgtgcgtcagaccgccagtcgccacctaacccgtgatctgaccggtctgtgactggtcacagaccggataaagggacgcgccgtgctgcactgcatgcagcgcgacacgcttgaccagactgcaataaatgctgttaggtgagcacagctgtgctcacttatcccatatacgtggcgcagacttcctaaagggggtcggggtgcctcggccctcggggccggggcaagcgcaacccgaccccccctcgggggaaatcaggaggagggcggacacctcaccctcgggcccgacgtccccgaaggtgccaggccacgtgggcgattgcgtctgcctcaagcctctggtcatgatactcccggtcccatatcaccgacactaggtaattaacgtggagttagatttaatatacaatgctgatattttatttctataggtaccatagaaatgtagaagtatatttggattttatatacgactcttaacttttgtttttataaggtctaaatttcatagacaactcttacattttatttatacataagtattattatatgtagaagtatatttgaattttatatacaattcttaggttctatttctataacataaatttcatatataactcttagactttattcatatagacttatatttcatatacaactcttaacttctatttatatttatatatataattatattttcatacaactatatcaataaatctataccattataatccggacccaccatagtctaacggttattttttctttttctctaattaatttggaacttctaacctatagagcgagcatggtggctcttttttcgagctatcttaataatataataggtagatgattccagtgctgattaaatgcttggaaagggaatttaagcaattcaaaattttagaaattgataattgaagtgactaaaaataaatcttttgttctaaccttagtattttcaatataacctagaaattcttatgtttttaaaatgagggagtattttctatactaattcagttatattaattgttatccaatgcgtcataaagaggcttcacagatagataaagaactactaaaaagcaaatgttttgttgaacttagcttaaaatgaccgaacagttataatgaatttaaccttcggtccatttcaaataaataaataattcaaaaagttaatagtgattttgaaatgtgtacacactggccatcacatgacaatgggacatgtaaacggatttctgattcgtgacgaaatcatcttgtgtgaattatttctctggacatgaaaaagacaattggcgatggatggactaatctgacctcagcattcccaaagctagccatgtactattactacattcaatatctcaagaatgaacaatgtatcacaactttcccatgtaccagacagcatgctcgtgttggccacggccgaagcctcacacgatcacatcagctgatgcaaaataatcgtccgctcgttttcactcgagccccatcgatcaatcgatccctttcgggccccatcagctgatgcaaaattttgcggctggatgaatccgagacgtcactttggagaagaaatttgaatcaggttttgctaccagcgacgtccggatctctcggcgtggtgagatagctaggctatttcttccttctcgggttgaatttgtcgtgacaggaaattatttaacagggtcccgaaatataacgaaaatcaagatcacggccctctacaattacagcatcgagaccgaaggcacagagagtacggatagttttacgtagtcgtagatgctttggcgactaaactcactgttctattccctccgtctaaaaaaaactcaacttctaaaatttgaattttgtcccacaaaagatcaacttctaccatcgtatctactatcaacacataaaatgataagttttattccttcaatactatttatctatctatcaccattactcaataatagaggtattttggttattttttttctactatttttatcttagaatgttaggattggcttttatatgtgagacaagggagcaggagtaacgttcagccaggtactcatgaaggcaagacttgcatgtccttgaaccgagagatagaagtaggctgtgtttagtttcgtgcaaagtttagattttgattgaaattaaagatgatgtgactgaaaagttatgtgtgtatgacaggttgatgtgatgaaaaaggactaaagtttagatccaaactgccgtagtagtaatagtggtagttgcatcaccggtgcttggacgatgccggcctggcaactgcgtgtctgcattgtaggagtacgtgtggagcagagcagcatggggctagaaaatcttcgcatgggcagcgttagctgcgtttactgtcctaatcactctgagctagctgtagcaacagctctgccgagcgcaggattgcaggccggtgtcatgggcacgacactggccgcgtcttgtcgactgtggtgccggcctgcatcgcacgtactaaaacgatgggatccaacggaatcggtacacctggatgtatacggcagggaccctcggcgtgtacgacatgcacggcgcatgcagtctcgttgatgatctcacctcgatctcgcgcatgttcgattcatccatccatcctctgccgtcgtgtggcatagcccttcaatcttttctctcacaacggctcgatcacagaggtcggccgaggtggtccaccggctctctccctgatcgatccaaagtacatcagagaagaaaagccaaaggcacggcacgccgaggaggggagcctggcatccgtcggtggtacgagggggaaagggacggcacggcacgggtggcgcctaagttagtacctgaccacacacgcttcgctttattagccttagccagttagttaatgttgtttgtgttagcggatgatgagcgattgagtgaacgcttcaaccatttacagtgtaggataggccgcctagctacgtacctaaggtttgcgaattgtgatcgtggatcggtcgttgatcgatcttctcccgtttctctctttatccagcacgcacgtagaataattcactaatctgaattctgaagtgatcgacgacgactggcttttcatgcgagattgtatggatgaaacggcctggctgtggcggtgcatgcgcgctcgcgctttatgtttaccggccggtaaagaatcctatatgaaaaggagtcgatcaggagagcttgagagtactacaactgcatatgcaacggaagacatagcgtagtggctggatacatcaatggaaatgctatgcccctttcgctaaccgcatgtgcgcgtgaagaggggaaagagacgtgcatgagtacatgccaaggaaagctggtatgaactccgatcacctacgggacaaaaagggaaagcgaaagcaacgaccaacgaagaggaaacgaagcgacacgggcagatacatggagctcgatcgctcgcgagcactcaccatctccgatctcgcgaggcactacctgcaagaagtgcaacaccgaccgtacgcgagcgagcgagcccgccccggccgtgataatgcgcgatacagtgcggggccgatcgatcgggacgacgcgcgggggcggacgaaagcaacgcccgcgacgcgaaagaccactttaaccggcccatccgatatatatccgcgcgacaggagcaaaacggcaaaacgcgccgcaattattgtgtttctgccgtcacccagccaccccatgcgccgcccggccggcgctgcacgctggggagggcacgcggtcgcgcggctctggccgtcctcttggacggccgcgcgggccggggggtcgtcatattagtgcgtagataagtagattagccgtgcgacctagccgtgccgttggtggcaaagcatcggtaccctgctagtaggctggtagtacgtacagtatccttggttggtgcctcggtggagttcggggaggccgaacgtacaaggaatttttggttggtggttaccacatatacgttcgatctgcagtggaaggcatgaagaaaagctaatttttggctggtggtcatcacatatacgttctattgatctgtagcggaaggcacgggaaagcttaccaacaaatgagcaaactgcgatcttccccgtcgtccgactccggtacgaaccgcagcagcaaaggcacagctaggaggagagaataattagttcgcaaaggcgacggagtttcgtgacggcgatgggcaatcaaggccatcgcacagtgcaatctgctggtacgtgtgccgctggctccttggctgtcaccgggtcaagcatttaggcgaaacactgaatgccgaataaatcggatgcggacgtgctccgacagtggtcgtgcaggctgacgctactctcacgtcatcgttacgtcatgcattgctagtaaatcatttgggaagaaaaaaaaacaagcaaaataaaacggggagaaagcgatcgagagatctatcacaagctgctagccatactgacaagtcacaagagaacagggctcgcacagtggcgggcgtactagctaatggagtgttcacgtgtgcgcgtcttcactcacttcgatcttaactgatctggcagctagctagcgtgccggagcgcgcgttggcccagttgagagcacatcaacgagctgagcagtcgaagcagacgttcctaaacaaggccttgattgcagccatcctggatgccatatatgcagccgtgtactcatgttgcttcctgcaaccgtgaaccagctttgcttgggtatcaatggacagaggtcatacatgtatacagtaccttatccctccttctcacaaaagtgtaaagagaacaagaagctcatatattctacgtgtcgaaacttagaagttaaaatcatacagattttcaacaactatagatggagattcacaaatatacttcaataatagtttacttcttatgtgttggctttattatttaagttatttttttgcttaattaagtgtttgcctttttgagagaatattataataattggttatagcttcgttgtagcaaaagccggctttagtcccattatctaaaaagaaatccctctttttcaaaatatgatcactactaacatttaaaatttgtatctaaatataaacaattttagcactattcatattactacttatccatttaattaccctatttaaatttatttccattttacatcaaacaccatctcatcccaaccattcttggatattcccttttgggtcttaatctttgctaaataagttagctaggtgactgatccagctggaagaggtcatgattatgttacttatgtatgcatcacgctgatgcttgtgtgatgcagtgtgctgatatatcagtgtttttactttaacgaaataaaaattgatggtggtggtcattttttaagatccaagtgctgtctccacaaaattatcggcagggttgcatttgactctcctttcccagtcatagactgtaactggctaaactcctctgctgcacctctgtgagagtactagtaataagcctacttggctccaccatgaaaccttaagtggaagagacatagtgctaatgataagatatagagtactcttctagaagaccaaaaaggcatatactattttctttttcattctcagcagtagtataatactacgaccgtacatagacagtctacgtcatccattcgttcacattatccgtcgagctagcgacgacaccacttgtagagcatgcagagcgccaagacctctcggccaatgcacatgacttcaccgagacgatgcgaattttgtacgcgagacattgtggagtatatctcaaagctgttggcagtgtagtggcaagtacggagtatatcctagccgctatatgcgtatttacgtataacagatttctgaaaaaataaaggttgtttttttctgaaagagattggagcacagagggcaatgtgctgatcatacagatagtgatgagattgtccagatatttgagaaaagggattagtgagagctgatacacttgtggaaagaaaagagaatgcactaagcaaaccttatccgttccagtatatctccaaaactggcgatctcgattcaagaatgaaacacagtgctagctagacaggatacagcgcagcagccagcaggctagctgcttctggtcagagaaaacaggtctcatactttctgaagcgtttagttgcatgctatcttttgatcatggcttgatgtgcttaggatctccgggtgaggtgacaggagattttttgctctcttatattaatttgtttctttttgacacgagagagttttctttctttaatgaacgtggatttgtaggtcgcctcggaccattaatttgctaatgcgaagtagacacctgtcgctggagacaaaaatcttgccccgttactatttgggctgttttttttgggtccaacagacagctaattaagctaagccatggtccagtgtagccgattggttagaaggccccagtatggagaggaaatactgaatcctttgttgaagtgccaaattaggggcacgaacgtctgtacctcaatgtgtgcaagtgtgcaacatatgctctgccttcaaatgcttatcactggatattatttatctttatttttttattactcatcttttttacagaaaatatataaatatttaaagtatttcatattaatgaagtgtgttgtaagctaaatatagtaatgaaactttcgtatatcaccgatctaatcatttaaatagatcaatttaaaatttattgatggttaaaacaaaaattatacttgtcggcaatgacacagtttgagactggagacaatactagggtggagaggaggctatagactcatgatataggtaattttgtagcggtccaagatttttcatttttattttttcttatcaaaccattttcagaaaatcatgcaaagactgatgatggttgtatcttccttattactaaatgaagtagttacccatttcatattataagccactttgacttttttttcctgtagatcaagtttaaaaaatttaaaaacatcaataagactaaattagtttcattaaatataacattgaatatagttttgatagtatgtttgttttgggttaaaaacgttactacattttctataaatttagtcaaacttaaagtttaattagaaaaaagtcaaataacttaaatataaaacttaagtactaaattacttacataccctaaatacttacatgctgtcctgtgttatcctgcttgacaattcagtgaacgtgcacttctcttttttcttttcttgtataatggagagtatataaagatttccctcgacatgccttaccacgcttggcccaccttgcactttagcccacttgtccccacacgcggccttacaggcccacggcgatgtgtgggccgaatatcactaacatctcgctatgcgactattataaagtttgacaactctcctgtggtcacttgttgagatggccgagttggtctaaggcgccagattaaggttctggtccgaaagggcgtgggttcaaatcccactctcaacatatattttttaaaaatattcggaaggccgagctgatgcaatgcagcggcagcaacgccacgatgtttcccctgttttttttttctcttcattcgcgtaattcctgtcgtcccaggctcccagcttcagccccagttcaattcgcgcgtaccattctgccagaactgacgaggctaaccgagcagtagcactgatgccccttcggggacctcatgtgatcatgtccttcgtacctcccggggctggcccatgaaaaaaattttgttaaaatgaaaaagaaggccaaaaccgtgtggcccgataaaggaatgggttaactgttaactgaccgcgcggatcgatctgacgttttcgggtttggcttaggggcctgtttgtttctcatcgtataagattattataatacagattatttagccagatttataaactgaattataataagctatgagtttgtttcaatggattatagtagaatagaggcagtgactctttagccacccaataatatgaaaaatatatgtttagaacagattaccaattatactaatctggcttacagattacaataatctatcataataatttacctatttattttttattattactaataatctagattataataatcctaagcgaaaacaaatagagcgttagtatggtttggtctctgatcatgaccgaagttaggagatcacaaaataaaagaaattacaataaaattttggcaacccaataatatgatacatgttttagcaattaaatagcgaaaagcctaatggacgatcgatcgctccaagcaatcaccccttctccacgtggtttctttttttttaccgcattactttcctgttttagtaaattcatgcacctaaagtttgtacaccccaaatttacacatctaaagtttatacacctaaagtttagagacccaaagtttatataaccgattcaattttgaatttgaattcaaatatttttttaatacatggtatttctatatatttaaagtttatagacccaaagtttatataaccgattcaattttaaatttaaattcaaattatatatatatatatataggtatttctatacataaatttttctaatttttaaaattttatggtgtagtaggaagagaagaaggggaggagaaaggggggagaggagcatgttaggagggggattggggg

SEQ ID NO: 5485 - DNA, 71247 bp, Oryza sativa
  unsure (1)..(71247): unsure at all n locations
catgcagcttgctaaactgacgcgtggtggacgagagtgaccggtctgtgactggtctgacagctgtcatgtcatcggcaaacaaccgtgcttccacgttgcacctgcttccgacggagtggaggttggtatgacccatcccatcggagggtcattcaaacagcaccattgcaaatctccgcccattaatgagggaggacagggctatcccggtgtcagataaaagtacgagccaaatcttgctcaaagtaggatgggtccccacccaaaagaagggtaggtagaaatggtatatgtggtatccccttgagatataaaaggaggaccatgcctaccaagaaaaagggagaaaaaaaaggagagaggggagctcgtagaaaggacgaggggaaaaatagtagggagagggtctctagagttcaaaggctcttgctcttcagctctttgtaactccttcagagacagatccgccagaacacaggagtagggtattacgcttctcagcggcccgaacctgtctacatcgcccgtgtcttgtgcgtttgctctctcgcgaaccattccacagatcaagggcttagaacctcacttagcgcccccggccgaactggcaaaggggggcccgcgcggtctcccggtgaggagccccacgctccgtcatctggcgcgccaggtagggggcgcgtgtgtttttctaagctctcatcctctttcgtgtgcgccaagcttttcccgttcagcccaatggccgaacgagcaaaagcgcacaacctctctccgagcgctagcggtgacgacagcgagcagaacccgcgtcgtcgagcttgtactccgccgcccccctctcgccgaagtcttaggcgggaggaggcgctcgagggggtcgaaagatccgcgacttcgccgcccatgagtgatggagaaggacggcgagacggggagcgtcgtctcctcgtctacggtgatggcagcacgccccagggcgcgctccaggctgcgggcgcgctcctgcgtcacccgcccgtcgtccctgatcaagagactccaactcgacgttggctagatgacgtggccaacttggtcatgacggcgcagcagcgtttaggcgccggcgggcggtcctccgccaccaaggccactggcgctgctactgccggctccgtgtcgtcgaggcggagggcgcggcgagcggcggccgttgcccgccgttcgtccgccattccctcgtcaatgcctccgacccaagaagatgtgcgtgaggggccggatgcccgcctcaatatcgagcgccggcgcaatgatcgccgtgctgcccacgcatcggagggcgcttcctcgtccggagcgccacttcggtccgggcacggaggccagccccccgtgtccccggttggcggtgccggctgtcgagactttgtggcgagccttcagaacgtccgttggcccccaaggttccggcccaccatcaccgaaaaatacgacggaagcgtcaaccccgccgagtttctccagatctacacgactgggatcgaggccgccgggggtgacgacagggtcatggcgaatttcttccccatggccctgagaggacaggcgcggggttggctaatgaacttgccacccgcgtcggtccactcttgggaggatttgtgccagcagttcaccatgaacttccagggcacatatccgcgcccaggtgaagaagcggacttgcacgcggtacagcgaggggacgatgagtctcttcgctcgtatattcagcggttttgtcaagtccgcaacaccataccatgtatccctgcacacgcggtgatctacgcgttcagggggggcgtgcggcacaaccgcatgctcgagaagatcgcctccaaggagccccagaccactgcggagctttttcagctcgcagaccgtgtggctcgcaaggaggaggcatggacctggaactccaccggttccggtgtggcagcttcagccgcccccggatctgccgctcggtcagggcggcgggacaggaggaggaagaagaggtcggcccattccgacgacgagggtcacgtcctcgccgtcgagggcgcttcgcgggccacccgaaaggggaggcctgcgagcgacaaaaagaaggaggccggcgctcccagcagggagcgcccgaccggcaagtggtgcaccgtgcacaacacctccctccacgacctcgcggactgccgcgcggtcaaaagtttggctgagcggacgaggaagtgggaggaggagaggaggcaggagcgccgtgagggcaaggccccagcggctccctctggcaaccggcgaagtgaggccaagcagaaggtccccgccgaggacattgacgatggcaacgatgacctagggttccaggagcctggggccaccatcgccaccgtcgatggggagcatgcgctcacgtttctcgccggagcctcaaggccatgaagcgagagcttctggccgcggcccctacccatgaggcgatgcggcgtgcgtggtggtcggaggttgccctcaccttcgaccagaccgaccacccgccgtgcgttgcccggggaggacagatcgcgatggtggtttcccccaccgtttgcaacgtgaagttggggcgtgtccttatagacgggagagcagccctcaacatcctttcccccacagcctttgacgccatcaaggccccggggatggtgctccggccgtcccagccgattatcggtgtgacgccggggcacacttggccgctaggtcatatcgacctcccggtcaccttcggtggatccgccaacttccgcacggagcgggtgaacttcgatgtggcggacctcagtctgccctacaacgcggtcctggggaggcccgcgttggtgaagttcatggcggcggtccactacgcctacctccagatgaagatgccgggccccggtggccccatctctgtccatggcgacctcaaagtcgcgcttgcttgtatggagcagcgcgcggaccacctcgccgccgcgtccaagcccgagggtggcgacgagaggctcggcacctccgtccccgccgccccgaggcagcggatgatcacgtgcgacgaggtcccggtcaaggaggttgccctgggcgacggcccgtccaagaccacacgaatcggtggtctgctggacggcaaataggaagacgcgctcgtctccttcctgcgggcaaacgctgacgtcttcgcatggagaccggcggacatgcccggggtccccagggaggtgattgagcaccgtctcgccgtacggccgggcgcaaggccggtccgtcagaaagtgcggtggcaggcctcggaacgtcaagccttcatccgcgaggaggtggcgcgacttctggaggccggattcatccgagaggttatccatccggagtggttggcgaacccggtcgtcgttcccaaggcgaatggcaaggttcgaatgtgcatcgactacaccgaccttaacaaggcatgtcctaaggacccttaccccctaccacgcatagatcagattgtcgactccaccgcggggtgcgaccttttgtgttttctagatgcatactctggttatcatcagatttgcatggctagggaggatgaggaaaaaactgcattcattacccccataggaacttattgttatacgacaatgcctttcgggttaaagaatgcaggtcctacttttcaacgtactactcgaatttctttgggtagccaaataggacgtaatgttgaggcctatgttgatgacttggttgtgaaaacacgcaaccaagagaccttactctcggatctagcggaaactttcgaaagtctccgcaccgcccgcataaagctgaaccccgacaagtgcgtgttcggtgtgcctgcgggcaagcttctcgggttcttggtctctgcccgaggcattgaggccaaccccgagaaggtacgagctatagagcggatgcgcccccccagcaagcttagggatgtgcaatgtgtcactggctgtatggccgccctaagtcgattcatatcgaggctgggagagaaagcgctacccctatttaagctcctcaaacgctccgggccgtttatctggacggaggaggctgaacgggccctcactcagttgaaggcgtacctcagttctcccccagtcctggtcgccccggagccagatgagccgttgctactttacctggcggcaaccccgcaggtggtcagcgcggcgttggtcgtggagcgtgacgaggacgaccctcgctccgcgcatccccaccctgtgtcgactcgacccgggagagagcagggaggagaggcccccgagccgaacggtggcccaaggcccccgacgaccggagctggccctccgcccgcttgtccgacggtgccaggcgcccccgacccccaggatggccccggggccactgcgggaaggccgcgcctgtcgccctccgaccccgaggtcgtcggcacagaagccgagtgcgccccgcgaggcctctcggacgaagagcgccctggagatgcggcccctagtgaagaagatcggccccgccgaaaggtgcagcggcccgtctacttcgttagcgaggccctccgggacgctaagacccgatacctcaggcccagaagatgctttacgctattctgatggcttcgaggaagttgcgccattattttcaggcgcatcgggtcacggtggttacgtcttaccccctcggccaaatcttgtataaccgagagggtactggacgggtggtgaaatgggcaatcgaactctctgagttcgatttgcgctttgaaccacgccacgcagtcaagagccaggccctcgccgactttgtggcagagtggaccccggccgctgagcccatctccgtccccgaggccagctcgggcccctcgcagctgcctcacaccgcctattgggtgatgcagttcgacggctccctgtctcttcagggcgccggtgcgggggtcacgttgacctcgccgagcggagatgtcctcaaatacctggtccgcctcgactttcgggcaaccaacaatatggcagagtacgagggactccttgcgggactcagagtggcggctggactggggatccgccgcctcctggtgttaggcgactctcagttggtcgttaaccaggtctccaaggagtaccagtgctctgacccgcagatggatgcttacgtgcgccgtgtgcggcgtatggagcgccattttgacgggatagagcttcggcacgtgcccagacgggataacacggtcgccgacgaactctcaaggctcgcctcctcgcgagcccagaccccaccgggcgcctttgaagaaaggcttgcccagccgtcggcgcgacccgacctcctaggggagacggacgcgcctgaacggcccccgaggcccgtcggagtccaggcctcgggacccgaggggagcgatcccagctcccttagattgattgcttggatcgctgagatccaggcgtacctcgcagataagactctacccgaggaccgcgaagggagtgaacgcgtccagcgcatctccaagcgctacgtactggtggaagggaccctctatcggcgcgcggctaacggagtcctcctaaagtgcattcctcgggaacaaggcgtcgagcttcttgccgatatccatgaaggcgagtgcggagcccactctgcctcacgcaccttggttggcaaggcctttcgccagggtttctattggccgacggctctcaacgatgcggtcgacctggtccggcggtgcagggcgtgccagttccacgccaagcaaacccatcagccggcccaggccctacagacaatacctctttcatggccgtttgctgtccgggggctcgatatcctgggtccgtttagatgggccccgggcgggttcgagtatctgtatgtcgctatcgacaagttcactaagtggcccgaggcttatccggtcatcaagatcgataagcactccgcacttaaattcatcaagggcatcacagcccggtttggggtgcctaaccgtattattacggataacggcacccaattcactagtgaactcttcggtgactactgcgaagacatgggcatcaagctctgcttcgcctcccctgcccaccccagaagcaatggccaagtggagcgcgccaacgcggaaatcctcaagggcctcaaaaccaagaccttcaacatcctcaagaagcacggcgactcgtggatcgaggagttgccagcggtgctctaggcgaaccgaaccacgccaagccgagcaaccggggaaacgcctttcttcctcgtctacggcgcggaggcggttctcccatccgagctcaccctgaggtcccctcgggccaccatgtactgcgaggctgatcaagatcatcttcgcagagatgacctcgactacttggaagagcgaaggcggcgtgcggccctccgagccgcgcgctaccagcagagcctgcggcgctaccatcagcgccacgtccgggcccgatcactctgcgttgacgacctcgtcctacgccgcgtccaaacgcgtgctggactgagcaagctctcaccaatgtgggagggtccgtatcgagtgatcggcgtcccccggccgggctccgttcggctggccacgggcgacggcacagagctgcctaacccgtggaacatcaaacaccttcgtcgtttctacccctagtaggggtcgggtgtcaggtctcgggctcgggccaaccccgcaccccccctgggcgtgcagggttggccgggggctaccacatgcatatacttatcttttttctcttccgtatttcaataaaagcattttcgatttcctaaggactgtgtctgtgccattgtttcctttcaaagagtcttggcttgaattagcatgctcgtgctcgaccctgccctcggtgtcccgggccggcggaaatcgccaaacagggcccagaatcgagccgtgccccggggcgtggtgaactccgggggggaatcggcaaaggcccacaatcgggtcatccataaccctcggtcaccacgttcccggcctggccagtctcgacacgtggatctccccaggcactagccccgacccgcgccatttgaggctgggacctgggcacgagccctcgttcaaaccaagacatagaaggaccacggcacagaccatcctcgtctcatacacacaacaaacagagctgacacaaaaatttcctctttatttgattgcagattaaattagtttgtacaagaagggggcccgaatgcctcggaagaagaaaggaaaaactatttaagattggcgggggcctgggggctcacttcgaggctcccgggtcgccggcctcgtcgtcgctgtcgtccacaccaccgtcgccgccctccacgtcggagtcgagggcgaacgcgagccgaggggccgtaccctcgaagctgtggacgatgtgatcggcggcgtcccggacctgcgcgcgcgcgtcgtcctcggttccgggagggaactcgtccagcgccgcccacggggagaagtccgggtccctggcctggtagcttgccagtacaagctccactgccccccgggcgaggtctctcgaggatgacttgatcgtctcctcgagctcctcgaggagccgctggagagtcccggccatctctgagaggcgctgggcgaggaccccatggttggcggcatatttcgcgatccgcccgccccagaggcccgcctgccgcccagcgcggtctagacgggagacggcgtcccgaagcatgccgggccctacctcgcctgccaagcggagggcctcgacctccccggcggacgagtccagcgcgccctgcagctcggcgatggtgtgttcggcagctgcgagnggncngctagatcgccgtcgcccgtggccgccccgccgctacgcgccctcgcatccagctcccttgcccgtgcctcgagctcagcggcccgctgatccagtgcggccctctcggcgcgggcaccttccagattgcgacacgtttgtttctccagcgctgcctcacgaagggacaggctgtccgccagcctttgcgccgcggcctcggcctcctcgagagctcgctcccgctcggtgagcgcatcctcgcggaggcggagtgcggactcctcttcagcacaggcggcttcgtgcgccgccagtgtagcctcccggatggcaacggcggcctcgcggtccgccaggtccctctccttcacacaggcgcgctcttccagcgccgtggcacgggcctcaagggcttcttcgcgccaccgggacgccgcctcggtctccgccgcccgccgtttccgggcagcagcggcttcaaggaccccccgggcggcgtcgagcttctttcctagctccgccgcccagctcccgtattgaaggcggaggtcgtcctgcgcctcgttcatcactgcggtggcgatgagggcagcctcccgctcctcctccacctccctggcgatctccgccagctccttccgacgggcctcgagctccgaggtgtgccggcggtgtgccttgcggcccgcctccaccatggcctccaccgagcgtcgcccctcttcgacacgtgcccatgcagcgtcgagctccgcccgctctgcctgcaggacctccatctgggcacttaacccgtccaacactgtcgtgttcgcggcggccaaggcctgcagaagggcctctgcgctcagtggggcagcggaaggcatgggggagagccgcctcggtgaggatgccgcacggctcggcccgccgatcgacgtaccggactcagggacgacccccggacctggcttgtcctgagcgtcgcccgaggggtcgggcccgagcggtgcgcccgcggcctcgtcgtgggtggcctcggaagtcgtcgtcgcctcgggcggagtcgggtcgggggcttggcaggccgcctggcgtgcgcgcgccgcctccgcctcccgggcggactcctcggcccggcggagtctggcctcctcccgagcggcttcctcagcccggcgagcccggacggcctcctgggcagcctcctcggcttcccgaaggcgatccgcggcttctcgccggtcagtttcccgtctccgggcctccgcggtcgccgtatcctcggcctcagaccggccggacttggaatggcgggaggggcgcgacgggatctcgctgaagcagaagaaaaaccagaagacaaacaaaacgggtgagtgaaaacttgcattgggagaatgaatacagccacagtgggcgcaggacgaacctgcgaggaggtcggttgaacgaccaccttgggggggagataaggtttccccggtatgattcggtcccccccatcttgcagagccgtttcttcttccgctccccctcgggctgcggcgtcggcgcggccccctccgggcgcctgctgctgacacgcgccgccccgccccctcggggaggagatggggagggggtaccctcttgcttcctcttccctcgggcgtcggcagggcggctgccccccgggcccctgtcacggggcccagaagcacgaccccctcctggggtagattgttctcccctgcggctcccgcccgcgccatcgtggcctcgaggagcccgctcctccgacgccccgaccgccatcatgatggtcaggatgttggcacgatctggatcgctgcagagggggaggactccttgggggatgagggacgcctccacggagctgagattcagcacccgttggaccactatcttgaagtcctcaggggcctagtcccatctgaccccttggtgggtcctcatgtagtcttcggacccggtgtactcccaggcgccccgggcgcgccgctggagcggcgcaatccggcgacgaaggtagtcgccgtacagcatggcccccgtgagcccctgggatcgcagacccgccagacggtcaagaacggcgtcgtagccatctcccagatctagcggcgcccgccaactggaggcctgcgctgggggctggctccgaagttggaggcgcgcttcgtcggcgaggggggtgtagaaccagtcactcttccagtcgtcccacttcttgcggaggacgcagggaatgtagcggctcagcgccggcccccgcggctggaagtagcagccaccaactaccgacggcggcgacactggctgtacggtgaagaaccaccgaaactgccgaagagatgggcgcaccccgataaacatctcgcacaggtgcgcgaagatggccaacgtcattatcgcgttgggggtaaggtgcgccatctggaggtcataaaactccagaacatccatgaagaaagaagagaatggcgggaccagccctgccattgcgaaagggaggaagaagacggaccgccccgggtagtgtggtaccgggcgtccctcgcctagctcgaccacctcccggccggtggcagatgccggcatgaatcggcgcggcagcccggcctgcctctcgctcacgatgcgggaagacggcagcacgctaccgtcgagtggtgcggagccccgtgccatgacgccggcggaggaggagcttgaaaacgagtgagtgcggcgagggtagggcacaggaaacaaggagttagggcgcaagcggcgaaggcaaggggaataatgacgagaggaaggaagcgaatctcttcctcggcgtctttatacccttgccaacgctatgcccggctcctcgcttcccgcgcccactatctcgccccctcgtttctcgcgcccacgtctccactaattccgctcgcccgtttgcggcgcacgaggcggatgtgcggctgtggcagttgagatgggacatatcgtgcgcgcgttaactacgctcgccgaccgaagcgccatcatcatatctccaggcaaaacgaaccggctcgtcccgattcgcgtgctactcgagtaatgtagcggtcttgaagagaccgctcattatagacagtcggttttccgttgctgatgtgcgcgatttgcgaccgctgggtttctgcccgcctgtagagaccggccccacctgtcaccaggcctaaggagtggcgtcacgcccgagcgcttccttcgaggggggcgatcgccctggcataacgccgggggctactgtcggtgacatgggaccgggagtatcatgactagaggcttgggcagccgcgatcacccacgtggcctgacccctcggggggggggggtcgggcccgagggtgatgtggccgcccctccctttgtctccccgaggggtcggactgctcccgtttcgaccccgagggccggggcgccccgaccccctgtgggtttggcgccacgtatatgggttaggtgagcacagcggggctcacctaaccgcatttattgcgggttggacgagcgcgtcacgccgcatgtaatgcagcgcagcgcgctcgcttatccggtccgtgaccgggcgcagcgtgtgaccggtcacagaccggtcagatcgcgggttaggtggtggcaggtggcctgttacacgcctcgccccgtcccgtcggattgatgagagcctccaggcacttgtccctagccggagacggcgtgccagctcctgaagatggcacgtcggtcccggtcagatatatgccaggcttcatcccaaccattgcaaggaagtcattgtatgaagaagggcagacatgcagcttgctaaactgacgcgtggtggacgagagtgaccggtctgtgactggtctgacgcctgtcatgtcatcggcaaacaaccgtgcttccacgttgcacctgcttccgacggagtggaggttggtatgacccatcccatcggagggtcattcaaacagcagccattgcaaatctccgcccattaatgagggaggacagggctatcccggtgtcagataaaagtacgagccaaatcttgctcaaagtaggatgggtccccacccaaaagaagggtaggtagaaatggtatatgtggtatccccttgagatataaaaggaggaccatgcctaccaagaaaaagagagaaaaaaaagaaggagagaggggagctcgtagaaaggacgaggggaaaaagagtagggagagggtctctagagttcaaaggctcttgctcttcagctctttgtaattccttcagagacagatccgccagaacacaggagtagggtattacgcttctcagcggcccgaacctgtctacatcgcccgtgtcttgtgcgtttgctctctcgcgaaccattccacagatcaagggcttagaacctcacttagcgcccccggccgaaccggcaaaggggggcccgcgcggtctcccggtgaggagccccacgctccgtcatatttaataaaacttttaaattctattaatataatcttttaaagtaacttcgtttagaatacttttacaaaaattaccattcagcagtttaaaaagcgtgcgcgtggaaaatcagaaaatagaagtttggaagagaacaaatcctaagttacatttgtaaatttttggatgagttttctatggaagttgtatatctagtccttattttctaagcccagtaattattgcagcagacatgaaataatgcaattgcccctgaaaaacaaacattctctggaaactcaagctgaaggcacatacttgcgattatgttggagtccaaagtgcttggatgcaaaattccctttgtctctactcgctcacgtagcgcttgctagcattaagaaaggactcgctgtacggtcgtagataagtccaccattccgcgttaaagcgttttcccgcacgggctgagctggtgcacctcccacgagccttctcatcccctccggcccatccacctcgcttcgctagctagctgctctccccacctatataacagcgagcccgcccaacacccgctcgccctcctctacttctgccgcgccaccaaccatccatcgctgacgcttccaacccaactgaattcaaacgaagcgaacaacacgaaccatgcaggcgcaatcccgcctcgctgctgccgcgagcggcggcagcggcagtggaattagcgggagcggtggcattagcaggttgggtggtggagcgggggaggagcacgaggcggtggtgagggagctgacgcgcgggcacgagctgacggcgcggctgcgggcggaggcgctgcgggcgctgcgcgggcaggggcaggccgaggccaccgctacattcatcctcggggaggtctcccgcgccttcaccgtctgcctctccatcatggccagcgcctccccgtccgcctcgccgccacaaccggacgagacgccgccggccgactcagccgtctcgccaccaccaccgcgcgcggcgagagaggacaacgtcccgcgaaagtgagttattctgcacgtgctatacagttatactggaagcataaataaatgcctagctagctagcttccagccgcagaactagtagctagctaatcaattagtacaagatcagctgggttaaatatgctataggaattgagtacgagtttatctgattcatcccgtgcattgatccacaggagattattgacagcctctccttacgacgatgggtaccagtggaggaagtacggtcaaaagaagatcaacaacaccaacttcccaaggtttaaattaatttctcaaccccgtgcctgcaggctagatatatcatataccttaacccatggattaattaatcgacaaccctgctcatgtcaaaatgctcagataattaaccatcgcgactactcgttttgtttttaaatgtaacgagattatggttacgaatttagatacgcatgcatcttctcttgtccagattcatagccataatttttatatttagaaacggaaaaagtatatatttagcaaaaatgggtaatttaccatgtcgttgtaaataaaaaaccaaggtgagtacttttggaccatgacggttctagctagctagagacagcgtataggagaaaaggtattattcgtgatgtattgattggactttgttggatagcgaaggcgtggcaccggggacggaagagacaaacggaaaatgtcgcttgacacgcaccctacaactttatagattcttttgagcagccaggcgaattaattgatcgccacatgtttgaaaccatccataaagttaagccttatcagttggagaaaccaaagttaagctgattttttttctgtcatgtggaaattaagctgttctgttttcttcacatgatcattttgtccctggtgtcacgttgtgtagcgcgagcaaataactgtggtttatctgcgtgtatcactgtgagctctctgctagtttaaagctggagtttgggttatattatatcggaagcatcttgtgacgtcatcacctaataattatttcttgtgatgtgacctcatcaggccagcttgctagctagccgccatgttcttggattaggttacctaattatgtatacagtacacgaatcttaattaaatcttaatcgtttgttatactgatgattcttcctaaacacgcaggagctactacaggtgcagttaccaccgggagcgcagatgccccgcgcagaagcacgtgcagcagcgcgacggcgacgacgtcccggcgctgcacgtcgtcgtctacacccacgagcacacgtgcctgcagggggcgcccgccgagcttcccgacgcggcgacgaacggtggcgccgccgccgccgcgtcgccggactacttccccgccggcggcgagacgccgtcgtcgctgcggcggctccggggcgtcggcggcggcggcctgcagcctcagttcgtggaccaccgcgccgccatggaggagcgcgagcgccaggtgctcgtctcgtccctcgcccgcgtgctgcaggggcggcagtgctacgacgacgacgacgacgacgacaccgacgtcgcctccctcggcgccgtgcacgcgcgcgcgcctgcggcggcggcgccggtcgccgcgtcgtcgtcgtcgtccgggcccgtcgacgctgccggcgaggagctggacgtcatggactacgacatgacggacgcgctgttctgggggcctttcggcacggacagcaactcgtacgacggaaacctgacgtcgacacgctgttttgatctaattaattaatcaggcgcgcatcgatcctacatgtggttcggtcgatacatatgacgagtcgcggtgcgcatgtccacggctatcggtaggccgttggattcggatatactactactactactactactacattttgcatgaatcgtatactacgtacaagcgtactactactaatttgcattacgtatgtaccttgtgtgttgtaaaattaaatcaaccctgtgttgtgcaactattatgattgcactaggttatatgggttgcgtagttgattaagtttggtccggtcggttggagtggtttttgtatgcacacgtaccaatatgctgtacgtctcactgtctcggtgattctcacaccaaataggcaaagtgcaaaattagcaaaggctgtgtttagatttaaagtttagatccaaactttagtccttttccatcacatcaatctatcatacacacacaacttttcagtcacatcatctccaatttcaaccaaaatccaaactttgtactgagctatacacaaccaaaatacacaatagtgttgtatgacgtgtggctttccctatttgtcaagcaaatagcaaatctgatatacagtattgactacttgtaccactactggtataaaagcgttctcttttctctaaagaaaaagtgatttggatccagacctgtttttcatcaaagtagacatgtgtctaatcaaaagtactactctgtatatgaatataaggccccctttgaatcaaaggaaaaaccataggaattctagaggattttatcctatgggaaataatcctacagagtcctttaaaacaaaggattgtttcctatcaattcctttgaaattcctatggaatgaaccttactagagcaattttggaggaaaataagcatgagatctcacctcatgttttcctcttcatgtgtctaaggttcctgcgtttttcctgtatgctaaccaaacgacagtttgaagactttcctgtgtttcaaaatcccataggaatccaataagcgtggtattcaattcctacgtttttcctattaatatgttttctcaatcttgcgattcaaagaggccctaagagattatgagcttttttttttgttaaatgatgatggatgagagaataaaatagtataaattatgatgggtgaggagggtaataaaccaataaacctttcctcctagaaaaaatcaatttcgattatgagcttctttttagaagttaacgaagtagtaaaaaaacaaagcatggtacaaataatgatggttgagagaataaaatacaaaatatgatgggcgagggtaatacacctactcccagaaaaaatgattttctttttttcataaatgcgtaaaagaattgtacgtcaatatattagaagaaagcaagagtttttattacacaacacaatcagccagacatgactatgcctgtggagggaaaaagaaaaagaaaaaaaggctgctgggcaaaagaaaagaactactattcaaacgctactccaataatgcgggaagttggtggtagagccacactacactgacaataaaccctccaaaagcagcagctcctgcagaagaccacagacgactttccagatggattgaccccataaccactaagatcgaggagagcgaaagatcaaacaccctagagttctgcttcttctataactgccaagagatcaagaagactaggagccggagcctgcacgaagatgctcgaataggcatatcctagaagacagccatcagatctaaagctaaaaaaatactctttttgaaaaaaaatgataaatgagaagtagtaaaaaagataataggtgaggagtaaagcacggggtgagtatggagtatggagtagcagtaagccagtaacacaagtacccatcaaaccagaggcgtcgccaagataggtcaacgggtcggattctaactacagattagtgcatcatgacatgatagcctgaagacagaatttcctttctctgatgatcgcgacgattgccacagtgaccctatcggtttgaccaccgcaaggaatttcgctgcgcggcacgcctgcagcaaaagatggtggatggccgaaacggggacgaaaggcgacacggacaggtgagatcaatgtgcgtgtgaacccacgcctcaatcacacgcccggatgcccggaatcccgtggtaattaagctcgattaattaataacaatactaacagtagactactactcgtagtacttggggtaagtactatgggcatccaagcacaaaccccaaaatgccacataggactaaatagtgaggtggaggagagaataaggaagagagagaaatagtcaactctcatgcaagaggcaacctctatacaaacttcaataaacatatgagagtgttagagatattggggattgtgtggtagagataacctattatacgtatcacctcttaatttaattatctatgtcatgcatgaaattggatgtggtagtcatctctactataaaacttgcccttattacgttctccctccgtaaaaaaaagacaaaccctgaattttcgtgtccaacgtttgactgtccgtcttatataaaattttttataattagtattttcattgttgttagatgataaaacataattaatattttatacgtgacttatctttttaatttttttataatttttttaaataagacggacgatcaacgaacgttggatacataaacctaatatttgttttttttttatggagggagtaacggctatcagcctatcagcaaaagaaactactggaaggcaatatatacacggcagatgcacggatctgattagccggccgggtagtacgtgatttgaccgtatttctggcctcttcggccccaccccgctctcgcgctagcagcctgccgcctgccggctgcgtggctggctgggctggctcgacggtgacatcacgacgcgggcgtcacgctgcgccgctgtgggcaacgtcacccgtgtgggcgtcgccccgagttccccacttgccgccgtgcttcgtcaggcagcgctatagctgccgatggcgaagtccgcggatcgtaccgcgcccaagtgagcagaggaggcgaggcttcgcgggccacgtgaagttgacggatgagaaggcgatgtacgttcctccgcttccgattccgcgcgcgcgcgcgcgctcgtgcaaagcattgggcatactgggcggcccggtgcttgactgaaatcgacgtactgtacgtcttttttggtactgtacgtgcggtgcttggctggctgcaaggcgatgtgtgcggtgcggccttggccgggcgtcctttctctttacggtaaagacggggagacgttggctgtgtttagtttctaaaaaaaagttgaaagtttaaaaaaaagttaattttttttaaaaagtttaaagtttatgtgtgtagaaaaattttagatgtgatggaaagttgaaagtttagggtagttgggggtgaactaaacacggccgctattgctacaaccacctccatcagctcgaggatgtgaaaacacacctgaataattgcatatgagcgatgatggtaaatgcgtatgctactacatggtggatgcatggatgtcaaaaaacgggggcgttttttgttctatgtgtttttggaaggccgaaagggtagatatgaatgctctgcggaaaaatgtacgggaagcaatatgatccgtcgccgcggcggccagccggccggcaagtcatccatcggctcatcgtcagacagtgatgagtgatggactgcgaggacggatggcacatcgccgtcgaacaactctacatcctgcgccgtggcgtttcttccatttgtgcttgggctttgatcttgaacggcgcggttcatacttcataccataccatgccgcaatggtcgccacgacaccgagaaaactgggccggcgcggagccgtcatatgtgtgcatgtgtggacgtcattcggactttctgagtttgtcctttggcttatcagtcagccatcaattgctacctccttacttatatatttttatatcaaacgtttgatcgtttgttttatttaaaaaatatttttttaaaaaaaatagtcacacataaatttttatttatgttttatttttatgttttattatcgaataacaataaaaatactaataataatttttttcaaataaaacgaacgatcaaatgctgaatataagtagtacaaaattagtatagttatttagcttacccgagccaagtcaaccaactgacccaaccaagccaattcattgttgtcaatgatagagcgtacacatccttagggtacccacaatggttatctataggctctctataagagatccatgtcagcatattttcctacttggaagagattaaatgaagagagagagagagagagtaaagctatctactaacctggagatagtctatagagaaaaaacgagacaatgtattagagagctatagatacccatatagacatactattgagatggtttactattaatttagtctattgttgagatgtacatgttttatagatagcaccttactttaccattgcgggtgctcttatttctgaaggcaatggaaacaagctagaaaccccaagggaaacaactaaataaattttaggataacttaactagttagatttcttatggtgcaatctaatctacttaaatttaagttttagacttaatacatatgctcatatttagaataattattctttcagcagtagacgacatacctgttgagagtaggacgtatcttgatttcgttagtctcaaaatatgcatgtccagttttcgaaggtactcatcgtgatagggtgaaagtgagagcacgcacatatataaacacctgatgtctgtagtgacttcgctatctcaaaatatatatgctggcctactttattgaggtgcatatagggattaggtgtgagcgtgtatgcattaataacagtggcagagtgcgcgcgtgtaaatgaggacttgtgtttttacggtattgaaaaaaaaacctcttgttagggttgtgtaactaaggaacagaaggtgattttctcaatgccaacctctatatatacagaggtgaactctagaaagggaagagactctctctcttttttttttcccacgttggttggttcaaccattttcccttagcttaagggtacacgtacctacttgttatttatgcaacaacaattggcaccgtctgtgggaaagatgtcaagaaatgttaggtatagatcagcgaagctcaaaggttgttatgttggacgaatgccgaaatgttcgacgaagcttaaaatatgacaaaaaccgatcgatatgatcgacaaagccgaaaatttccgacaaagaccggtataagatcgatgaagaccacatatggcctcgaaaacctattctctaaggcttcctccaatggtgccatgtaagctatctcataacatgtccacgtcatcatgtatcctatgtggaggaaagagaaggcaaaaaatcaatccatctatctcctattcccacgcctatctcgctcagttaccgatgccgtatgagcctgcgcaagagacaacagtcgactcttccacgccaaaatcagatcccgtgctcccttcccccaaattgccccgccgcacctcccgcccacccccgcacgctgcaccccgttcaagcccaatcccgcgcgctgcaattcgctcccccaccccctggcgcgccaatttgctctcctccgcgcaaatcctccagccacccgcgcgccaatctttcccttgcaccctccctcttttcttctccagtgtgtgaaatcttcctcgtcggcgtcgacgtatccgtttccacgagcccaacgacgaatccactcctcttgccaacgacgacgagctgtagagcaggatgagctgccggtccaaacgacaagtagctccgcggccgccgccgtcgtcgtcgccgccgccgccgccgtcgggatctgcgactgcctctaggtgcttcgatgctgcctcgtctgccttctttcaggccagtactgcaatggctcctcctctaggaggccaaccacgtactgtaccgtacactcaaacctgatggggattgtagtggctctgccttgcttgcttcctggatgttggagtagaacaataagctgatgatgctctcaactcctttgaccctgcatcctcagattggtaagaaaccaatttgcttgtgtgttgtttctgcaagaaacaagcaaattcctttttgttgagactatttagattgtagaattaataatgttttagcacagataggaaatgtgttgtttcttcctcgctcatagtcatgatttttggctcctgatatttcagtggtatggatatacatccacctggtggtttcctaagcatgttacaaactggccaacagccattagtcccacctcatgttttgttcccagcaacatggccacctatgccacctatggcaccagcaactaattcaggcactacgcatgctagatcaaggtcaaaagccaaacctgtcatcaacttagatgatggtgacaatgttaggactgctaagcgtcttacatgggcatcagatgaggacttgcggttggtgagtaaaattttagacaacttgcagggatttgtaccatcattctaaaactttactaatacataatgctaaatgtaggtgagtgcatggctgtaccactctaatgatccgatcaatggaaatggcaagaagaatgagagctaccggggagatgtagttgaattatacaacaacactacacctattaaccggaaaagggaagtaaagcatctcaaagatcaatggcaaaggattaagagatgggtgggatttttctgcgcctcctggaagaaggctgcattagtttatactagtggatattcagatgatcagttgagagactttgctaatcagttttatgtgaatgactatcctaacgaaggtccattcacagttttgcactattggaaggttcttcatgatgaacccaagtggcatgctgttttggaggagcttgaaaagccacacaagcggagcttggatgatggaagtgacacactatcacaaaaagatatcggagaaaaggagcgtccaatggggaggaatgaagctaagaaacaacgcaatggcaaaggcaaaggtaaaggcaaggatgatgatgacagtttacatgaagatatgaagaagtacatggatgttcaagctgcagctagcaaacgacatgaagagtttttagggactcagcaccgtatttcagatgcaaaagttgaagtagcaaggcttaggagagaggctgtcttgacggaatcatatcaaaaattgatgagcatggacactagtcaaatgactaatgagatgaaagctgagcacgtgatgggtctcaagatgttgagggagaaacttcttggcgatataatataaggtattttctgtcaatcaccatgcactttatttttagtcaatgttcaacaaatgaccatgtattgtaatatgtattcttagtcaatgtaccacaaataaccatgcattgtaatctgtattattagtcaatgtaccacaaataaccatgcattgtaatatgtattcttaatcaatgtaccacaaataaccatacattgtaatctgtattcttagttaatgcaccacaaataaccataaattataatttgtattcttagtcaatataccacaaattaatctgtaccatgtgactatatattgctctgttatattcagcctagcaaaacaatccagcactgtcctcctctgttccttctatccagtactattcttcctattctattctgcctcatttgttccttccatctagtccaacactgcctcatctgttccttccatccagtaaaacatgtcggatgagtttgacaattccatagacccagccgagatttacactacagatatgttcatggcagagcatagtgtccttaactcttttgccgggcggatcgacaaaaggattaaggccagattggaaggaggtacatctaggcgtacaagtggtccaaggaagtacatcaataggaaccatgaaggagcccatgatcaactatttgctgattattttgctgaagatcctctctactctgctgcaacatttcgtagaaggttccggatgagaaggcatgtgttcctacacattgtggatgaactaggcaagtggtcttcctattttacacatagagtagattgtactggacgccttgggcactcaccattgcagaagtgcactgcagcgatccgtatgcttgcatatgggactgctgctgacgctcttgatgagtacttgaaggttccccagagtactgctctagagtgcttagaaaattttgtggaaggtgtcgtcgaggtatttagtagtaggtacctgcgtcgccccacggctgaggatctcgagcgtttgctccaagttggagagtctcgtggattccctgggatgttgggaagcattgactgcatgcactggcgatggaaaaattgcccaaacgcatggaagggacaatatacccgaggtgaccaaaagtatccaactattatccttgaggctatagcttcatatgaccttcatatttggcatgcattctttggtattcctgggtccaacaatgacattaatgtgctcaatcagtcccctctgtttattgaagcaataaaaggtgaagctccccaaatccaatttgctgtcaatgggacataatacaacacgggatattatcttgctgatggaatttatccggaatgggcaacctttgtaaagtctataagatctcctcaactagagaagcacaagctgtttgcaagggaacaagaagggaaacagaaagatattgagtgtgcttttggggtgttgcaagctcgcttcaacatcgtgcatcgtccagcacgatcatggagccaaaaagttcttcgaaaaatcatgcaagcttgtgtaattctccacaacatgatagtggaagacgagggagaaatggcagaagatcctattgacttgaatgctgccccaggaacatcaattgttcttccaccagaagttcatgcagggagtaatgatcacccaagcttcagcgatgtgcggcgaagaaatgcttatatccgagccaaaccaatccatagtcagcttaaaaatgacttaattgagtatatttggcaacggtttcaaactaggcaaaataattagtcactgttatttcagtataatgtaagctctagtgtacaatttcattgtaattttatcttagactgactgtatttatcactttcacttactgtacatgtttttctctctaccggggcgaacagattcgatgtcttttacttgtttttgtggctgcggtccagcttttggtgatcttgttcaaggaatgggataagcacttatggttgctgtccagcttttggtgtttgtcgaactcttctatcacttctgtgacgtgatgcagtcttttttttcccttcagtttgctcttttccgcattgtactaaagtgccatgatatggctatgatgttatctggttgctgtagtggaccgtgagttggaagaattgcacttcattgttatatactctaagtcgatgttgtgctatttatctatattcacactatgctgagatgttcatttttaatcgacagatcttttgaatagcatcacatgaaggaccatagagatattgtgtagtttatcaccatgtcatttactacccatgctgccataaaagcaagaagagataaccttagagacagttgtcacgcccagaaatttagcccaaatttccagactattttgtgtattaaatccctgtccaggaccagccagggtacacaaaacgacaagtaatatacagttccaaacgtaaataaagcgtaaaatacttacagaagaggcacttagtcctcacaccgaaacaaaagcagcagcagcggaaaaaggcgatcctagcgggcttcagctccactccacaggcaaaactcaactgaggtctgagccttggtcttccaacttcgtcttcagctcagaagcactacacttctgaaaagggggaataatagcaaggctgagtacaaccaccgtactcagcaagccacaccaatgatgcagacgtgcaaagggatacaaggacggtttgtggctatttgcataaaggcggttgtaaaacattttattgagcaaaacagtaaaactgttgagtaattaaagtaacattaaatctccactgatcaacgctacaccacgttgaacaggcccaaccaacccacctaaactacagtgtattgggtcgatttattaagtgtgagactaatcacggtgaatctggtcgatcgcccataaccgcgggcacggctattcgaatagttttactctggccagaggtgcacaactgtacccacaagacacaacccaccgacatgtcaccgcgtcatcatgtgcccatgatgcacacgtcaccgtgtcgagtgattgtgacgagacccttcgcataaccctcccctaaccatccacaccacgctaaggtttcacccccacccctcaaaaggcagtgggcggtcccctcttgcgccgcggtgaatccggcagctggacaaccggacaccccggccgacccaactccatcacgcccaccctcgccaccggtgcctaggaaaggggcgagctatacttcagatcaagcagttacccactcccgcttgtggcaagcgctgtaagtcttccagggtttcccgtgaaccggtccttaattgccatgggtgcgactcacaaaaccacgcacccacagcccaccattcagtcgcattttagttggataattacgaccataaaacatggccagatgtctcgagcacgcggctcaacaagatactagaatgtctaatactgcaattatcccatcgactgagctagtggtaattaagcatggctaagcatatagttctagctaggtcacataagtaacacaagctagtcgatttattacccagggttgacaaaggatagataccaagtaaacatggcacaagcgagcagataggtaaaccctgatcccatgtaattagcaaaacatgcatatttatttgtaaacggtaaaacatttataaattgggatcaacatgctcaaggggaatgtgtgacttgccttgcttcttcacttggattttctgaactcttttcctcgcgaccgcggacttccaaaacgacggattctacacgctggcacgcaaaacgaggaaaaactctaataaaaaccaaggaaacagtacataaaaagtaaacaaacatgtagagctcaattttagatgaattttgcaagttgaacggctcaattcggagttcgaatgaattagatatgaattttagaagttttgagccatttaaatgaatttctagaattaaactcgatttattgcgcaattatcatttatttttacaaaggaaatggacctcgctgacgtcatcaagggggaggggcggcgccggcaagcgggccccaccggtcagcggcacatgggcgccggtccaccgtggaccgggaccaccgaggctgtccaccgccggtccacgggaaccgacggctcggatcggcacaaagccgatcggacggtcacgaggcggcgcggctggggcacgggcacggcatgagaccggctcggccgagccaaggcgcggcggcggcatgcggccaccggcggcagcagccggcgacgaggaacggcggtgggcggccggaggacagcggcgcgcatggggacggcgacgcaccccaagaggcggaggtcggcaagaaaggggaacgggaaaaaaaggaagggaggagaggtcctcaccgaaagcggcggccggcgcggaggaagatgatggcgacgacgattgcccgatggcggcttgcgaggacggagggcggacggggtcgcccttgaccttcagaaagagatgagggagttagggaggggaggaccgatgcggggtgaccggtaacgacggccgaccgcgacgatgtgagaaggatctcaccgatgaccgaggaaggaggagctccggcggattttcggcgaagaggggcggcggccgaggttctcctcgtccttgcgaagctgagggaggcaatggcgcgggtcggcgtcgaccgaagcggcggcgcgacgcggctggagtcggcagcaagcggcggagagaggttacacggtggggaggtggttccgatggcggttgaaggaaaccgagtggcgaccggcgtgcggcgcgggatggcgaagctggcggtggcggcggctcggcgcggcaacggctgtggcggcgggaaacggcgactggagttcgccggagtgtggcagcgcgtgggtgcggcgtggggagagcgagggagagtatgccgggctcgggaaaaatggggaaacggacgaggggagcacggggatgctttttatgggctcgggaaggcgggatcgaggccggacgtggcggaatcggccggcgaagtggggcgccgacgtggggtggtggaggggttaaccggcgccgattttcgcggggagagtgggggaaatggtggaggacgtggaggggatcgtgcccacgtcgttggatgcgagctcgggtgcgggagggcgccggattttgcggcgacgtgaacggcaatggcggttggggtcggccggcgagaggtaggaggaggagctgacgggtgggaccgccggtcccacctgtcggcgaagggagagaaggagggacgcaaaacagacttttgcgagcgggccaagtgagaggggagccggcccgagagagggagaaggcgcgcgggccgcgggagaggaaggaagacttgggccgaaagaggcccaaagagaggagagaggattttaattgttttctttttattttaattgattaaatgaactttgtgactttaaaactatttctcgagctccgaaaattcgcggaaaattccggagagtattttagggcacaaagaatattgcaaagtattcccggccaatgatttttaagggaaaattttaattctcccattatttcacttgattaaattgatttaacttttatttaatttctagaaaatgtattattaattgatttttaaacccgaacgaaaatcggggcgttacaaatctaccccccttacaggaatctcgtcccgagattctgggatggctagaaagaaagctggtgctggtcggcggtctgactgatctgcacattgaactgccacatcctgcttcgaactgattgattgactggttgatcaaacctgcacgattgaactggctggattcgacctttctgttcctttgctttgccaaaactggaccgactggttctgcttgaactgacccagactaggactgcggatgctcctgaaacttacttatcttggactgaactgttgaggttggcaattttggtaacctgagaattcaccacgctggctataagaggatgaaaattgaatctggcatttgtaaatcatttaccctatgtccgcttcgactggtcccaactcaaatgacaagtaattccaggaaacctgcttgacctgtcttttgtctgaactgcaaccgtccctgatgctgcttctcaaagctgaactattgacctggcctcaccggtgtacctcagaattcaatcagataacttgagatcggtgtaactctgctgacaccttgcaactggcttcttcaagtactacccggattgttgcactgggttgaaccttcaactaaaacagcgatgaggtgagccaaaactcatctccgagacctatccaccttacagggagtagtcttactttcgcctgactgggaacaattagactattgtccttgaaaaataaccaacacttctcttgcttacaaggaccctcactttgaaaactgaaacttcaccgattcatcaaaatagagcaatgacgacgcactttcatcccagcaagatttggaacttaatcctcagttgctgatgggagattccacataaagaaattctcgtttagctcctgattggtacaactttcttgcttctgacttgatttttggtgtcataagcctaaacagattgcatagttaacattccttgaaacaagcactgatcacccaacagatccaactcaagaggtcctttccatggcatgacatttcacttctttgaccatcctttgctaactcttcctgggttaacagactatagatcctgtaatagcttttcgaaaaatactgcaatctgatcaactatcggaaactgactttgatgctgccgagagtttctgcactttgatcataacaacttcgctttcatatgttcggtaaagatggtttgttgaaaagagattctatgccatataccttgttgactacacatttctatttctggaccaaactctcgtatcttcctgactcatgtatggaacaatttctttttcaacttctgggaaacattgagagttttttttttctggaacttatagcggttgccttgaactatggaaaccattcttgtttcataatcacaccactagggtgtaattgccgcttaccattctctaacagtttccaaggatagagattccttgtatgatgttacttccgaatatatatttttttttccgttactccttacacttgaatacccttggtactgcctttggagagatttcatagtgtcgagcaccatggatccaaccattgtcactttcaaatattccatcactcttttcatttgagtaccactgatgctgcctttagaaagacctcatcatgtcgaggtgttgagggtctaaccattttcactccgttggttaaccattcctctattggctcgcaaacaggttttggagctcaacagaattgcgatgagttagaagagaaactcttggtttcttgagacaccgacagatacacattttgatttacttttgcatgctgaagatgaatcttaaaaggagaggaactggctgactcatattttattcaatatttccttttcattacatggctgccataaacatatacgtacaatgagaagtactacaaaatcaaacaattgtagactgctgctgattagaactgcccttttcacgactgaacttgaaaaatagaagtcttgtctagaattgctattgcttccattattcaaacctgactgacttgttcctttagttcctactaccagaagtctcaccgggaacgttgctctgcttgttgatcttcgatggtggaggggcaactgtcttgtcagctgtaacgggtaggatcttcttgcccgtggggttaccgagcggtgatttgtcgatgggcctccagattggagcaataccaggtgcattgctagaactgacaacagttggacgacctggtgctgacaacacttgccgcgggtgctgacgaaggagcgtaccacctctttgtagctgtagcgagctgttgttctcctggcattgcttaccctgctggcgttggtgctgtaggcttgaaacggttgccggtggaacaatgcgacctttgacggtgcccttgacgataatccgttgaggcggaggttgcacattcaggtgtcgattggtgtcatgggcaatgctggtaacttgtgaatcacgacgaactgcctttgctgctcttggaagaggacaatcactgaaacgatgtcctggcttacgacagttacggcagaatcgacttgcttggtcccgaggtgcaggcttctgattatgcactttggcagctgaaacgggaacaagcagagacttatgaacatccttggtgacgttgcttcttccatggttggcttccactggagctggagttggaggaagagcagaaggattgtgaccgctgttgtcgattgtcattggttgacgaatgggttgcacggttgtcccttgttctttcttggtcttagctatgaccgcgttcaactgacagtccttaggcacatgatctgttccttcacacaagaaacatgttaccttccttaaagggcatgcatctgagtaatgggtatattcaccacagcggcaggtggggaggcataaactagcagtgtgtccgactatcccacatctagcacatgctttgaactccaatcctctttccatgaaactgttaagggtcgtatcatcatcgtcatcagtatcatcatcatcgtcatcagcagcaaaccgctctcctgattcatcatcttcgggtctgggcggaccgtactttatgagatgtcgggttagctggcgtgctccacggaaggtatttcttcctctctgacgcttgggtatccttgctgcgtcttcaggagtaaattctgaactggtgatgatcatggtcctgccattatccatcttccatatcaccttcctgttcgctccaaagttgtgctgcagagtaccatctttcttgttagtagactgacttggagcttggttacttcctgggcactgcttctcgtccttttcaggtgacctggcgaacaccttccatggacagttccttatataatgaccttgctcaccacaatcataacaggtagcacttactttcctttggtctgacattgacttggctgtcgttatcttcggggatctggaccgcattttgacaggggtcttcggtgccgatattgggaactcctgactctgactcggattcgggtcccgggctggcatctgatctcgcacctgtggtgggtgacattgacgtgactcctgacattgtcgttgcatctgttgcatctggtatatttggtatcgacgtcgcatctgttgtaacaactcttccactgtctgagtttgattagccatgacttggggttgaggctgatcttcaagaggctgacgtggaatattattagaattgcactgagttgccccatgaaactgacggggtcttgatccggcgaaattgtccctcttgcagaccatctgctgcaggcaccagagagagggggaaacgggaggggttactagagatgaggtactaaaccacttgcctattgatctgttgtgaatggattttatgattcaagttgtttaagcaaacaacctagtatggtcgcatccccaccaatgacgcaaaccatacccctacacacaagcaaacaacacacgatctagaagctaacgaaactactcttctgggacagattgggtttaggtcaacttcgggaaaactcttcatgatcttcgcggaacgacgactctgaactgatcttctcgctccttgcacgaagcttgaggctcgacttggcttgacttccgaacagacatgaagctgacggctggtcatctaggtgtgacaactaaaagaattggagagactgggaggagaattttgaaaaaccgtttcgcaaagaaaagccgaagggcgaggggagacattttgcaaatagggttttcagaaagcttgtccttagggtttgcccatttggctcaacctacagtcgagttggctctgataccactttgtcacgcccagaaatttagcccaaatttccagactattttgtgtattaaatccctgtccaggaccagccagggtacacaaaacgacaagtaatatacagttccaaacgtaaataaagcgtaaaatacttacagaagaggcacttagtcctcacaccgaaacaaaagcagcagcagcggaaaaaggcgatcctagcgggcttcagctccactccacaggcaaaactcaactgaggtctgagccttggtcttccaacttcgtcttcagctcagaagcactacacttctgaaaagggggaataatagcaaggctgagtacaaccaccgtactcagcaagccacaccaatgatgcagacgtgcaaagggatacaaggacggtttgtggctatttgcataaaggcggttgtaaaacattttattgagcaaaacagtaaaactgttgagtaattaaagtaacattaaatctccactgatcaacgctacaccacgttgaacaggcccaaccaacccacctaaactacagtgtattgggtcgatttattaagtgtgagactaatcacggtgaatctggtcgatcgcccataaccgcgggcacggctattcgaatagttttactctggccagaggtgcacaactgtacccacaagacacaacccaccgacatgtcaccgcgtcatcatgtgcccatgatgcacacgtcaccgtgtcgagtgattgtgacgagacccttcgcataaccctcccctaaccatccacaccacgctaaggtttcacccccacccctcaaaaggcagtgggcggtcccctcttgcgccgcggtgaatccggcagctggacaaccggacaccccggccgacccaactccatcacgcccaccctcgccaccggtgcctaggaaaggggcgagctatacttcagatcaagcagttacccactcccgcttgtggcaagcgctgtaagtcttccagggtttcccgtgaaccggtccttaattgccatgggtgcgactcacaaaaccacgcacccacagcccaccattcagtcgcattttagttggataattacgaccataaaacatggccagatgtctcgagcacgcggctcaacaagatactagaatgtctaatactgcaattatcccatcgactgagctagtggtaattaagcatggctaagcatatagttctagctaggtcacataagtaacacaagctagtcgatttattacccagggttgacaaaggatagataccaagtaaacatggcacaagcgagcagataggtaaaccctgatcccatgtaattagcaaaacatgcatatttatttgtaaacggtaaaacatttataaattgggatcaacatgctcaaggggaatgtgtgacttgccttgcttcttcacttggattttctgaactcttttcctcgcgaccgcggacttccaaaacgacggattctacacgctggcacgcaaaacgaggaaaaactctaataaaaaccaaggaaacagtacataaaaagtaaacaaacatgtagagctcaattttagatgaattttgcaagttgaacggctcaattcggagttcgaatgaattagatatgaattttagaagttttgagccatttaaatgaatttctagaattaaactcgatttattgcgcaattatcatttatttttacaaaggaaatggacctcgctgacgtcatcaagggggaggggcggcgccggcaagcgggccccaccagtcagcggcacatgggcgccggtccaccgtggaccgggaccaccgaggctgtccaccgccggtccacgggaaccgacggctcggatcggcacaaagccgatcggacggtcacgaggcggcgcggctggggcacgggcacggcatgagaccggctcggccgagccaaggcgcggcggcggcatgcggccaccggcggcagcagccggcgacgaggaacggcggcgggcggcgggcggccggaggacagcggcgcgcacggggacggcgacgcaccccaagaggcggaggtcggcaagaaaggggaacgggaaaaaaaggaagggaggagaggtcctcaccgaaagcggcggccggcgcggaggaagatgacggcgacgacgattgcccgatggcggcttgcgaggacggagggcggacggggtcgcccttgaccttcagaaagagaagagggagttagggaggggaggaccgatgcggggtgaccggtaacgacggccgaccgcgacgatgtgagaaggatctcaccgatgaccgaggaaggaggagctccggcggattttcggcgaagaggggcggcggccgaggttctcctcgtccttgcgaagctgagggaggcaatggcgcgggtcggcgtcgaccgaagcggcggcgcgacgcggctggagtcggcagcaagcggcggagagaggttacacggtggggaggtggttccgatggcggttgaaggaaaccgagtggcgaccggcgtgcggcgcgggatggcgaagctggcggtggcggcggctcggcgcggcaacggctgtggcggcgggaaacggcgactggagttcgccggagtgtggcagcgcgtgggtgcggcgtggggagagcgagggagagtatgccgggctcgggaaaaatggggaaacggacgaggggagcacggggatgctttttatgggctcgggaaggcgggatcgaggccggacgtggcggaatcggccggcgaagtggggcgccgacgtggggtggtggaggggttaaccggcgccgattttcgcggggagagtgggggaaatggtggaggacgtggaggggatcgtgcccacgtcgttggatgcgagctcgggtgcgggagggcgccggattttgcggcgacgtgaacggcaatggcggttggggtcggccggcgagaggtaggaggaggagctgacgggtgggaccgccggttccacctgtcggcgaagggagagaaggagggacgcaaaacagacttttgcgagcgggccaagtgagaggggagccggcccgagagagggagaaggcgcgcgggccgcgggagaggaaggaagacttgggccgaaagaggcccaaagagaggagagaggattttaattgttttctttttattttaattgattaaatgaactttgtgactttaaaactatttctcgagctccgaaaattcgcggaaaattccggagagtattttagggcacaaagaatattgcaaaatattcccggccaatgatttttaagggaaaattttaattctcccattatttcacttgattaaattgatttaacttttatttaatttctagaaaatgtattattaattgatttttaaacccgaacgaaaatcggagcgttacaacaattcattagagaaactatctcttgttctatctcttagatgatgtgtacgatttatgagctagcagttgtcttcaaaggacctttgaaggaggcctaacatggggaagactagggagtagtcttgtctagtcagtgacaatccgataatatcaaatgcgtaacaacagcatgccgcatgcgtggctgtctacatccccgggccgccggccgcaccacagcgtttcatctgtgcggtgtttgggcttcgatcttgaatactagcggcataccatgcctcaatggaacgaatcacgctgcctatatgtcccatccaattaaaagttgctatattttaatatggagggagtagaatggaggaagtgtcaagtgtcaaccagcttttcaaactaatcggggtagtcgttttcgttgaggactagcacaaacaactagagtggaaaataacggcgcatgagacaagctattactgggccgttttcgagaaaggctgctgatacttgtgctcaaatcggcccatcaggaatagtgcgtttggccgatgatgattcgacagttcttaaaaataaggaagatgatgtgagactttttttttaaccaataaagatgatgtgagtgagacagttgccagttgccacggatgaagcttgggattgggagtttccgaatttggtatcaataccgagctcacatacgtacgtggcgagggaccacagtgttgatacatacgtgcagtcattgctagtgctaacacaactcgcgatccacgagtcaacacacccatacatgcacgaactcaaccacaatcccatacatgcacgaactcaaccacaatgattaaatttcctagctaattaagccagacagctactgtgacgaccggctgcctgctcgtcctggtacgtacgttcacgtccaaccggtcggcctgatgtcacagtccagtacagatgtcggcctgatggaacgtcctctcgtacaatgcaacacaattgcaaatgtacagtgttgcattgcacgagagttcgttccatgcactggtaattcttaaatttgtaccatatatgcgtacgatcaatcgatcgatcctctcatcgacgacgtcccagcagtctcccatgcactcgtgtcgcgcgtgtaccgcggccacaccgtgtccgcgatccgcgccgcgacgatgcgctgcacgtcgccgtcgtcaccgatcaacacacggtgatccgctgctgctgccgccccgaacgttgactgatcgtactggccgaaacagtagtccatgtcggccatctgcgccgccgccgcctcgtccgccacgctctcgtccgcggcgctcggcgagtgtcccgccgcggacgccacgaacgccgcctctggggccgatgtcggccagatcaacggcggcggagcggctgcggcgcctcctccgctgatgaccgccgcgaggcacgtgacgatggcggcctcctcttcggcggcgctgccgccgccgccgacggcgtggggtaaaagaagacggctaaagaggccggcgccgttcatcgtcaggtccaacatttccgccggcggggaggaggacgactgtcgttgccggctcgtcgtcgtcggcgagctacctgcagtgttgggcgtgccgggaacagcttgcggctgctggcacgtgtgctcgttgaggtaggtgacaaggaacatgggcggctcgccggcgtcccgctgctgcacttgcttcttcgccgcgcaactccgctcgcggctgaacgtgcacttgaagtacaacctgcatgcgttaggtgacacgacgggatgagagtcctctatcataaatgttattatcaggatgtggattttcatctctcgaggaatattacctcgttgtctgcatgtcatctaaatagttatcaaatttttttaaaaaaaatagtaaatatattaatacgaaatatatcactccacaaacatataaaatcaaatttaacctatacatgttgcaacaaaaataacaagttagactaaaaatagttattgcacattcgcaactatattttttttatctttgttacaacttataacagttgaatttaaacttgcatgtttgtgaagtgatatattttatattaatctatgctgctatttttttatattttttatgaccatttaggtgacatgcactaaatgaggggttatcccttcaagggatgaaatcactttttcttattattttacacacatgtgtaatatcattgttacagaggacgtgaaccggcacgacgaagcataggtcaagttaaagaattaattcaagtgatttgttttggcaagtgtatggctaaaacatgccgcctaagtttttgtctagactttgaattatttgatcgaggagtacgtgtgtatgtacgtgtatgacgattgacgacgaaggttaaggttgaccatgttgacggcaaagtcaagtcactggactggacattgatatgctgcatgcatggatgcatttctgtaatattgaacttccagaaagcatgttctgatctgatgctagctatcaactgactcagtctgtagtccaatggactaaaacagctaggttaattactctgaaattgacttggacattgtgtgtgttgcagtgtatattggttaatgcttaccaaatctggaggttgacataacagttcttggtagtactttaggaatcatgtggtttaagttgtggttagttaaaattggtaaagtaccatgcatattctagcgaaacaagtagaaagtagaaactacactctacccaccttagataattgctgtcctgaatgttcttttgcccgtattttctccactggtagccatccttgtacggggaaggtgtaataatctccgtcctcgtaaccacctcttctctgccatttctgacaagaacctcttcactcctacagtagtattccatatatatcaatttgtcatcaacaaaagcaattatcgattcagaacatattgtaaacatcgataagaactcttctgtttacctaacgcgtttaaccctcgccggagtgtgcaagcaaatgctatcgtcagtcctcgtctccggcgccgtcctggtcactccttccggtcgtctgctgctgttgctgcaaggcttcagcatgtagagagacaccatgaacactcgcccgagctctctgctaacatcgacggcctccttctggccgcggctatcgagggggccttcgagcagcgcctggagcttggcgctgaggcggcggccgccggcgagctcccggtacagctgctctatggtatcttgaccaaatgccatcttaatttgagctgaaacttgaggcaccctagctagagcttttgacaaagtgagaaactgagaatcctttcaatttgcaacgcagaggagttgagcttgagtagctgcagtaggcagctttgaagctagctgctactccagtatttatagacaggccgacagtctgcatgcagtggtcatcagccttgcaattgtcagttttcttcagggatgctccaccagtttcagcatatataatttgggtctgactagctcaaaccctgttcattaattaatgttgatcattgatgtcaacggctgggcgattgatttattctggtcttctgaccgatggatcaatcgatagattatcttagatgggttgactggttaggctaagcttgtgctctctctcacggtacatacatattgaactggaaatttcggtctcttcatctggacgtcagttaagtatagttgacatatgaaatggtagtagtaatataaactacaatcctgtttattttattagtctactttgagcttgcaataaagtatgtggcgagcgatgcaatttttttcaaacgctcgtgtcagttgattttccaacttcactcccagaagagacgtcggacagtgactcccctgtgccataaaaactggacagcaacattgcgatgtcgaatgcatagtagaattcatagaaaaacaaggagtaggtccaaaggagaccggccttaattatgtgcctcaaaatctacagaaacatggtacatgtcaagtgatgtccatgtgcctatgaggatgtgtttagttcacgtcaaaattgaaagtttgattgaaattggaacgatgtgatggaaaagttaaaagtttgtatatgtagaaaagttttgatgtgatgtaaaagttgaaagttcaaagaaaaagttggacactaaaccatacctgaattctgaacatacagaaggtcaagtgatgctcagaaggagttaatttttcaccaacttgccgatcgatcgtctgatggtcaaggagagtgatctgtgcccttgaattgtagacctggagtcaactacagtgcctcaatttagaaatagtagagataatttaattcaatctccactcgcaattagaaacttctaacgactcgatctcaactgatctaagctcaaaggttaaatctgactgatctagcttctaaagttatatatgtgagatgctcctaatcgtacctaccagagtcaatgtccagttattttctttagcacaagtcaatgccccaatcataagacagaactgtgtcctagtttgctactatgattacgattccttgttttaagtatgtacgatccgtgtacatactccctccgtcctaaaaaaaaaagataaaccctgattttcatgtccaacatttgactgtcagtcttatttaaaaaaattatgaaaaaaattaaaaagacaagtcacgcataaaatatttatcatgttttatcatctaacaacaataaaaatacgaattataaaaaaaatttatataagacgaacagtcaaaattggacacggaaacccagggtttgccttttttttttggacggagggagtacaatacattattgattttggctgcagtagctcaagattcaagagtcaagatcatatggtgtagtgacctctaataagatagcctttttttttctttacgagacccacaccaatcaaaggactggtcctaccctaacatatttgggtgtattccggagagaacgttaagaacttctcccctcacacataaaactaggtgacttacatgattaactaagtattagcttaaatacttgaaaatggaatgatatgaatttttaaagcaacttttcaatagtttttatttttgcaaaaccatatcgtttagcactccggaaagcgtgagaacatgtagtataacacacccttaaaatatcaaatttgttcatccgctttcggagtgacttgctaagggcatgtacaaggtgagagagcatagcactagtttctttttaactcgtcgccgcataagggggtgctaagtgtctacagtggtggggaccgactgaaagtgaagtgtggcctgtaataagtgccaagtaaatatacaatgataagaaatcagaaaacaattttctctgaatgccaaatatatatttttaaacgaactataccaaacaatgagagttttatattaatataataggaaaaaagaatacaacactactatagcactagaataatcaggaaaacaaaaacaaaaaccaccactatactatacgctgacagcacctacacatcctgaagacctagcacataccgcaccaactgccgctaagtaggatcgagcaccgcggaaccaagacaaggaaccaccacttaactaccgaccaacacacctccaaccagttaaaacaactagaccatctggacaaagcgataaggactacagaaggaaagcgcaatagagaagaaagactcactcgtccctcgtacacacccgtcgccgtccaaaatgttggtagggtcctgccatcgtcaacctccacaagccacggtccctcgtaagggccttcatccctccaccaaacagctgaactcctcctgggggagcgagcaataaccacaaaagctgccacacttggtgactgatgtagccatattccttcatgtccctatagcactagtagaaccctaagatgcgccaccaccctccagccagtgatctccttctaccacgcacacgtcgtggtcatcgctgcattgcactggtatattgcacgatgtgctccccggtcttgtgcacgttgtcttgtgctgctaatgtgcacaagacatttaaatgggtgttgttgctttccaacttcagcagcaacccctgagatgggaccccaagtgcacatcagcggcataagaggggaaacaattttggagcttaggaaatgggcatagccccatttagcttccggtcttaaaatggggactatttattgaagatgctataaaggagacaaaaaaaataaatcatgagcacttcatttcctttttcagcacggggagcgtaagcaccttttgtcattttggatctaaacactagggtggaaaaatggcaactttgtatttggcatttggcagtctggactagcaaatttcgccaaaaagtgcatagggacacggaccacccctcacggacgcgcaatacccccactcgctctctctctcttccgtcgcaccctctctctctctcgcccccaaaaaaatccccatccgcttgctccgcctcctccgccgatctcccccgcggctccgcctctttctcccttgctccgcctcctccttcgccgatctcccccgccgcaggcgctcacgcccgctccgcctcagccgtcgctcacgctcgcttccgactcccttgctccgccgttgatttcgcccgccgcaccaggtcacggcagcctcgacctctgccgatctcccccgccgcaccagtccggggtggagatggacggcgacggatacggcgatggctccggcacaagggacttcatgtcgcagtccgattcacacgccgaccacgacgagctcgacccctacaccgactccctgtactacactggatcccgcagcggcagtgcctccaggataggcatggccgccctcgacctcaactccggcggggatgggtggccggatttggggagctacgagggtcttctttgatccggctcgcaaggaggcgtcatcagcggaggagggggccacctttggggcggcgcacatggacgcggcgtcggcggatctgggagccaccatcgctccgcctcgcaaggaggcggctctgctgatctccctcccgtgcgtgctgtgagtcggacactgggcttacgctcggcccgccctgctccatgtggccgaggcgccacggcagctcgcgccaattcctcaccgtatggaggtggccgttcggcgcccgcggccggagccaggggccgtggtggtggtcgaggcacgcaggcgaccggagccaggggccgtggtggtcgtcgatccacatccacggctgccaccgtctctgaagtcaacttggacgtcgactccgacaacgtcgaagatgccgccgagctccaagaaattttccaaaatcatgggaaggtatgccgaccaaccatttcatcttcgtggctgtgctgctgtgatgtcctgtgattccctttgcttcaattttaccatttccatttcataaacctgtgctgtgctgtggtgtagtacgatgtagttgtgtgctgttgtgtggtgccctttgcttcatctgtgaccatatcataaagatgtgctgtggtgtgattaggtgtgattagtttggagattttaggagttatgttgccttgtgatttatataaccgagcaaaaaatttgtgattcaaaagtttatataggtgtgatatgtttatgtcttgcactctgattcctgtgatccagaagctatgttgcattgtggtttatgtctcctggactgtgatatgtttaggtttaatatacttgtgctttgtgatttgctctattaagttgtcataactgaagatgtatttgtttcccttaaatcgtgttaaatattttttgcttaccgttatgggtgggtttaggttaaacctgacagggccaattggacagaggacaataccagcttgctgtgtgaaatttgggttgaccagatcaataagggaaactgcgtgaatggactcatgcagaagactgggatgagggagattatcgctgcttatcatgcagcaaccaacctgcggcatggtagatcccaaattactaataggattaggcaactgaagggattgtggcaattcattcaaaccctacgcacaaacactggattcaatagaatatgactactgtagtgttgtaatatttgtgttgtatggacttttaaaattgtgcactgggacttttaatatgtatgtggacattttaatgtttctatgctatggacttttaataattatttggacatttttttgttgatatgctacgtacaattttgcgagctattgatacatttgaactatctggaaatggtcatttgggaactgttgatacatctgtgcactgtcaaattgtggcttgtaccagtaagagatgaatctcttgttttcaacttagcagcagcagcatcatcatttgcactaccctcacggccgcagcgcgcatcagcaatagcggcagcaacgacaagcagcagcagcggcaagcaacaagcagtacaagcatgagagagagagagagctacatgttttgtggggggggggggggggggaagcaattaatatgggcaaatatgtctttatggaagaatggtaaaacttttgtatgcctctaaacaccaacttgcaaaaatgcaatgccaaaacttttgctaccaaaactttgccatttgccatttgctattccaaatgcctctaaacatggccttaattattccctgctcaattagtgagcaagtaaccattacgtctcccgcaaagaattaatatgtattccccgtactactcaattcctgatcaaataatggtcacggttaattttaaggtcgtgaccgtacgtgaatttgcactcggtccgttacatcagtaattatcatcaccaccattacagtcatcagggagataaacatggttaccaaggtgcccgtggtcatagtccaaaccatacctgagcgcgtcccacgtcgagaacaggtcgcctccgtcgttcatcgtcgtcgtgagcggcggcgccgccaacgcctcggctgccgtgaacgacgacggcgacgcggccgcggccgtggccggcagctggccgtcgggagggaacgcgtgcggctgctcgtgcagctgatggctgctactagaatcgaagctcagcatcatgaatggccttcttctcgctgtattttgctgctgtcgttctcgctcggtctgctgctgatgagcgccgccgccgccgccgccagcggaggagccgaacctgaggaggtacgcgtcgccggcggcgcccggcggcggctgctcggccacgacgtcgggggtcgggacgggcgtggtgttgcaggtgtgctcgtacgtgtaggtgaccctgtacagtggcgggtcgtcgtcgttctcctgctgcaccagcttggaggcaaggcactgtctgtcctcacggtaagagcatctgtaatataacctgcgattccatttacagtacagatgcataagatttaaatgcatcttaagattaggatctcgccgcgcggttttaccacaaattaggttgattttgaactctgaacttttttaagtactagtacagttactattgttaatagtttgttgtagccaagtagcctactgctgaccatgcataatatttcaatggaaatcccaatatgcaagaaataaattgactaaaagctacttttagatgggattgctacattcacaacacacatatttttttcccaaaaacttttgtatgagaacttttagaaaaacgtctaccaggaaaacattcatccagaaagcttttattttgaaactttcatcaagaaaactttcatatgaaaactatcatctgaaaatgtgtgtgctaaattaaccataactttgctagatagtaatttcgagtttttgttgtttgactcctggtagcttaatattcccatctgtcaattttactcttcacttttttatagtaattcacagcaaatgaaacattctaaaatattataacaatttatttctataatatattctcatagtaaacaataaaagaacaacctagatgattgaaaccaacaagagcacatattatatcatttcttaatatgtcatttctcaatatgaacagaatgcatgacttaaaactttttacagctgatagtcaacagataaataatttaggttctatttagataatgactaatttaattacctagggaaagcagagtccttgatgttcttctggccatacttcctccacaaatgaccatcaaaatgaggtgtgaacgtatgtttcaccaatgatggtctatccttcctgcagcaatactccgtgtatacagttcaaatagaaaaagttagcaagtaattttacaatgttatgaaaataataaaacctgctatattaattaggatacatcaaaagtgacaatatatacttcctcggatcataaatatttatttcatgcaattgatttgcccataaaatttaaccattcatcttattcagaattttagtacaaatatataaaaatatatgttacgtttaaagtaactttaataataaaacaagtcacaagaaaataaaatataatatatattttttaaataagacaaatgattaatgtcaaatgtgtcaaatatttatgatcggaggaggtaatatagaaaaaaatgttccaatatacatgaataatatgcaaagaatcgcacatgactgataatatacaagaaaaagatacctcgagtacagaaatagttctacaggactaaattaataatgaacgatcgatgtttacatgaagttaaaaacaagcaccattacatatataattgctggcctaattaattatgtggccagatattgcaacatgcacgcttatatatatttgaaaaacataaccttgtcagttagttgttgtacaacactaatgactacttgcaaacaaagtcgcattataagtacaacatataacaaattaattatgtgtactatatatgtatatatatgtatgtagtatccagggtgtatttaccacgtactatatctgaacttagcgagattgaagtactgtgttagttgtttcgtgttagcatggcctctatatcaaaatcgactcagtgcaatcttatgacgcaacggtagtactaccaccgtttcacaatgtaagtcattctagcatttcccgcattcatattgatgttaatgaatttagatagatatatatgtctagattcattaacattaatatgaatgcatttcccgtattcatattgatgttaatgaatctagatagatatatatgtctagattcattaacattaatatgaatgttggaaatgctaaaatgacttacgttgtgaaacgaatggagtaagttcgaagcttagtcttttagtttttttttctcttgtttcttagttatgagatttaaaatttaagtattctttatcctttaagtactgtgtatatccccgattttttatccattgttaaaaagaagcatgcatatgggtgagttggatggcctccatcagagtaggacatgtacacgagacatgcatgttgaagggggcctagctagtagtagttgcttgatctccgttatttgcatgcatgcttatgtcaatgtctgggtcattagcttatttaaagggaaatggatctgaatctgttgataagttggtaaattaaatacgtaccccttctaaatgggttaccacctcccccgaacgcatgccatatgagacatgaagaatctagaataattaaagattcttttttcatcagacagattcagaaatgcttctctagcttttcatgtgatccatagtactgtggatctatggaaactagctggaatgtgagtatatatattagtggtgcccactttttattgacatgttgagaatagtggatgagccaggaccacaaaaataatctaataagaaggggcgcaaagcagtgctaattaacactgttcttaacattcctaacagtacacaaatttatatgattttaagatagaataatttcagccaaattcatgacttgtataataatggagcctagacacgaccgaggaacaatgaaatacatgctctcccaacctttttatcaacagttaagttgatattcgaacttgaatttgtttggacaataggttaattagctagatcagctgaaaatacacttatatatgcatggtagttttactgacgctctcgattcttttataaggatgaaaggcaacggtttcaagtgtactgtcaaaacgttcaaataatggggtataacttgtgaaaaatagcgactaatcttttgatgttgtcctttagaaatttttggtcggttttactatgcaatggcatggctatatatatcaccctttctttctttattttaatctcaacaaattcatcacattgatcttgatattgcatgttgcaagcatcattttttttgtgggagttgctacaataagctgggcggtttgttgtttgaatagaaattttgtgatccttaatatggaagcaaattaattaattcattatttcttacttacatatgattttcaaggcaacatatatatactaggcaaaatataggttgcaactgcttagaaattaaaagagaggggccgagagctgaggaactgcttagaaggtaatcatgcttttcccctacatattcatgtgttggcgaaaggtggtcatggtgtagccatgtagtgatcttggaattgcagctatggagttgtttgcaggttcgtcggatggaattttagaaaaaagaattgtagcttggtgttaagtttggtgtttgagaatctgaacttttgttaattatgtttaatgcttcctcgtgtgagggctagagtctagaactcgtttttattttgttgccgatgtacatccttctttgaaggatgtagagaccgggttgatatattcattaattatctgaaaatataagagtatggttcctgtgtgtgtgtgtgtgtatgctctgatcttctgacaaatgtcactgatatcttgctgtactaatatctagatttcaatctatatatcaagatcaaaatttaattgttggtgtgaatatatagtggctaaacactattcatgaatctttgtgaaataatgtgtgtgcaacgtacgcacttcagattgtcacatgcaaaaatattatgatcaatgaagcaatgccgtcagaaatgcccttttctcattcttaaaatgaaaaatggccagaattgaataagctctagtgttcacttacaaataggtgtagttcgagacaggattaatctgagtggatagagaaagagttaaacgtctcccgtaaataataaatggcttagtgttccacataactgatcaatatgtccttatctaatactatgagttaatttgatcaagtctacgcactagttcatacgtatgcgcttggtctctgaccgtgtacactcccccctggaagacttgtagtcaactcacactatgaagggtcctaattcccgattaataatgttcatgtccaaaaaagaaagaagtttaccagcataggaatatatatataaatgaaggatcaaaacattttgtttagaactaaggagtttcaatttgccattgcattaattgaggttgaggcttgaggacaacagaagaaaaactgtatcaaggatacataggtcaatagtaagaataagtcaaaacactaacacacaatactacacaagttgatcaggataacactgtatagttagggggatgggagtgtatgagaatgagaatcacaagtatgaataagttcatggatatatcttaaacttaactaggaaggagaaatggttagtggaactttatggatgctgcatgcatgaagtgatgaagatggactgccgacatgcatgtgcttgttactttcttgtttcctttaatttttacctcttttagaagaaaagtatatgcttgtgagtcataaaatactactaattgtggactattactgctaaggaaagaaacaaaggttggttcgatcagttggtaattcgatatatatatataacaaagaagattcgagacttctctatgtgcattctttgttttcttgttataagctagcatgcttaaaatgtgcaggaagagctccaatctagaactagtagtaaggtagggttctcaagcaattaatggagccctccactatggcaaagatgcatggacatatgttaagaaaatggaacaacatatgatcacttcgggttcctaagtgtcaaaaagaaatggtcttcattcaaaggaggagaatatgcatcttcttggtgaattatgaagaatgctgaaaatggctattagcatatatgtgatgtttgatgattttaatttattaatggcatgtccttttactgtagtgcagaatctcaatccaaacttgagcaaaacattatgccccccccccaaaaaaaaaaagcgtattaattttccgctttcacctcagctcatgaaatatagctagctcactcaaaagtaggacaactcaaaggaagaaattaagatcgatggaggaaagaaaaaccttgatagttggggtagtatgcatccatttaattggtttaatttttcaatctgtttgttttaatagtgcagacgagctagcgttatcaccctcaatcgtacaaggtttcgtcattctttttagtagtaattaaaccattaaattcaagttgcaatatagtacatactatctaccaaccccacatatagatcctaacattgcctgtttatgaccatgttaatgtttcttcctcctccttaatttccccaaaaatttccccatattggcataccacacagaagccagaaactataattcccattctccttaattttggcagactcaagaaacgaagaaaaagaaagggcaaacaggtacacacaactcaaatcagcaaagcgcagttaggatcagcggctccagaaattaatccattcaagacagcaagagaggtaaacaagaagtggttggagagaggcaaaatatatgaacgaatcgacgaaattaaacacgaagcaatcaaggagatacaggtactaattaacaaattaacatctgtgtgtgctagcttagctagctcgtgtagtatagtaccttctcttccggccgtcgcgcggcgaggactccggcggcgagatgccaaagacgccgccgcccccgggagggctgtacgacgccgacgcggatcccacggcttcctgcgcgctcgcctcctcgaagtcgaacgactgctccctcttcagccgcggcgacgccattgattcttcaggccagctctctctctctctctctctctctctctctctctcgtcagctagaacaagagctaatgccttgcaagctagctagaagctgcaggcaaggggagtgggaaatggaggaggcagctgcgtcgctttcgagctgctcgccggagactttaactttgggaggggagcagggctatgcctacgcttaattagccacggcgtgcggtacaagcacggtcaatagtttatggtttggttttgttgtcaagtcaagaggcgttgctgggtcttttgatatgtttaatgtttacagatatacattagattcgagaggatgaatctgctgccccctcaaacaattaatcatgtgccctattatatgggcctcaagcattggccccctcttgatgacttctttttccccttaaattaacttaatttcttggtcagtatgcaattaggttgtgtgtatgtatgtatacatatatgtacatatatatgtatatgtatatgtatatgtatatatatgtatatatacatatatatatgtatgtatatgtatgtacatatatgtatatgtgtatatatatgtatatgtgtatatatatatgtatatgtatatgtatatatatgtatatgtatatgtatatatatgtatatgtatatatatatatgtatatatatatatatatgtatatatatatatatatagcagatgctagctagcttgctctcaatgcatgcacaatttctcatatcgttttttttttagttttgaggatagtttctctagtactactatgagtgtattatatatgttttgcctcttgtttattgcgaccttggtgaggctcttgaactgacgtaagcgtccgggtgcgatgcgggcatgcttttttactggcaaattgcagcaacggacacaaacaatgggtggcagtggattagatgtatttgcaagttgggattacaatactggggaacgccatcgttagccaggatggtggaggctaccaatcccgagccactctcacgtttcggtgcagcctgcatgcagctaagcattttgctgcaaggtgctgaaagaaggctattttatcaggagaatttgtgaggaagacgattgtatatgatacatttatatcttgagggtttgctgatcttgtttaacacggtttagttgcattgccagcggaagtcactaccacagaacacctaataggtgccggttgggaatcccacaaaggtgccggatttcccaaccggcaccacgaaggcggcactgatgtgaagagaaacaggtgccggttcctaaaccggcacctttgtggttccacgagtaaaaaaaagccggctcgatgcatcgagcatgcaccttctccatccatagcaagaaaaaatcatcatccatccattccatatccatccacagcaagaacaaatcgttattcaattcaatccacaacacaaattacacgaactatttgcatgcatcagaggtaaagcaaaagaaaaaaaaaaacaaatcaagcacagcgcctcgcctgatccgaccacccccgagcaccggtgggagtggcggcgccggatccagccaccctcgagcgccggtggccggtgggaagcaccgaatctggaggagggcggcctgccccacgtcgtcatcgccccccagcttggatgtttcggtgaccgccgccgctaggtagcacgcgtcggcctccccttccctcggatctgatggaggggagggtgctgccgccgtgaggaggtgctgccgaggggaggtgagggcgtgcccacaggagaagactccgccgccgccgccaactcaggaaaggaggaggaggaggaggaagggaggagaggaggatggcggagaggggaggaggagggggacgatggaaagtggaggagagggagtcgacggagagggtgcgagagagagagagagaggtatgggagagaagagagacgagtggaggagaggataagggtcacgcactcgcgcacaatcttatccgagaggtcggcttgccagctcggctccgtttgatataggtgttaatttttaaataaaccgacacctataatattttatagtcggtttttaattaaccgatacctatagtgtattaaaggttcttatttttttgaaaaaccgacacctatagtatatataggtggcggttttattgtagaaccaacacatatattttggtaaaggtgttggtttttttattttcagtctatgggtggtggaaaaaacactataggtgccggttttagctgttccggcacctatagtgccgacttgtatgtgactttttgtattagtgatagtcttttctaacgaaatacaagtgtgagatctcatattgatataccaggaaaaaaacaagaccatagtattagctagaaggctatgatcgggaaaggaaacaaaaataacagtcacaccacacacctgcgacaaaattaattctttgagaaacaaacgtgagcacaacgccccaactacaccagactgtctccgtccatgcctttgggtttgagagggagagaacgagagacaagatggatccattctcccccacgcagacccgccaacataggcatcttgtggcagtcagaagcaccactgcaagataaacaaaagtctgaagaagagattggcttgggaatggtccttcgaaaacgagcctctaggaaggtcgcgacatcaagaacgttcccgtcgcccactccggtaaaccaggatgtggttttcacctgaaggaaaacaccatgcgagagcaaggagccacaacaatgcccccaagaggtttacggtgcccaaaagcgtcgccgctgtcgacctcgatttaggccagtatttcgcctataaacatcctttccttgcatgtcgttttatccttgttgattctgtcaactgccaccaaatgaacaccttcagcgcatggttatcgtattggcgccccaccgcgagccaacccttgggaggatctatgacccacccgttgtctaactctggcgagtctttgacaagtcggccaccaggacctcacccgcacatcatcggagcaaaagacccatgagctctactgctgccaacccacaccactgccccgtgccatcccaccgtctccacgtcaccaccatctcacgccagtcgtcgttgtgaggctggatccaccgggtacagtctcctcgtcaaccttcatcgcacgcgcctcgctccaactgtcttcgtcgcctccactgttgccttccctcttccctattgtcaggccgccaccctcccttgctggcatgtgcccgccgtcgtcgcctcgccggatccgagcagtggcggtctggatctaggtggcacagagccaccaccacttgagacgccctggtgtcccactcacgccagccagcgtcttcgggtttctgatcgacggccgctggaggctggacgctagaggccgccggaccgagcgggcgcaccacggtagatctgatcgacggctagttaattactggtgtggcgtgcgtgcacgctccattcggtagtgatcagcggagaaaccgagtgagagagttgcgcgcgcgcggtggaaatcaatcaacgtcgtacgccaccggtgcgccgtgcagatgtagtagtagctagcccagcgtacgtactatataccagccacatacgtcgcacgacacggcaggaagcgcgcccgtgggccaggtgcggtgcctggggaatttagggggttaattggaggagcctacgcgtcgggcgcccgattggagaggggaaaaatcgggcgctaacatcagcatgacatatgcgtgcaaaaccactttaaactattttttctcttaaattatttatccaaatcatgatccgattgcatcattaaattcattgcaattaatctttaaaacaagaccacacatggatatattccgatgaattttttttagcttattcttgaattatttttaaatgttgcacaatgttttaacaagtataccggaattgtttcactaagtagatcgaaaatgtttcaatcgtttaaatcgggtgttatttcgccttatatcaaaacaatgtttcagcaaatagcgaaatgatatttcggttcactgcaacatttgatccatacatagtgaaacattataagtacactaggtgaaacatttttggtggaacaaaaaataaaacgaattcccttaatagagggtttccaaaatatgtggatgatttgttgcaaaaaaatgtttcaattcattgcaacattagatctatacatagtgaaacattgtgagtacactaggtaaaatatttttgatggaacaaataatgaaacggattttctttatagagggtttctaaaatatgtggatgatttgttgcataagaatgtttcaattcactgcaacattagatctatacatagtgaaacattatgagtacactagatgaaacattttttgtagaacaaggggagggatatgtgggtgggcccgggggtgcacgcgtgggagggaggggaagcgaccgattttctccctccccccagttgaccgattctaagcattatcggggttaattagttagggatgatcgatgcgggcatggcgcagccggggttggccgtgtacataccacggccgatgcatcacaggcgtacggacttttttgaggatttaattggtctctctggcagagttgcatggtggtgcgcggctatggtatcgatcgatcaatgatcaatctatatccccgattgacaggacacgatcacacgattggtcggaacgtacgtggctagctgttttagtttagtgtcctaccaaattaccaataatatactacctttgtattttaatatataacgttgtcgacgttcgatgtcgcgattccggtatttgcatagtatggggatcgttggtactagaatatacgcgagactgaggtaaaagagatgagacagtgatttttatacaggttcggacccctgaattgtcaggtaataaccctacatcctgttggctgaagccggtattgctcttattcaccataatcacaccagtacaatatttggggtagcctatctaactgttgtcgatatggcggtctgaagttctgactcgtagtcgacaacagggtagtcttcctcctcgagttcgtgcccggcgagatcaaagataacgctttcgtctctcctgacagtatccggagacaccgtaggggactagccgtgcttatccctaaagtcgatatccagcgtcttgtcttggcgtatgttggcttgtattggcttgtggcgtctatgttgtctgtgtcccctctcctcctagggggccttatatttatacccataggtgtccccttatctaagtagaactaggaaaaccaatatggatacaatccgagtagtacttgtcgtttctatgtagaactctggttgtctttccttatccggaactcctcctatatccgcaggttgttttcgtataggacatggtatgtggtgggtcctgccgagatttagtcaactactattaggtatgtggtatccataaccctgacaaacgtcgttgaatttttaataaatgtgtttgaccattcgtcttatttaattttattttgtaaatgtaaaaaaaattaagtcatgcttaaggaatatttgataataaatcaaatcacactaaaataaatggtaattacatttttttaataagatgaatggtcaaacgtattttaaaaaattaaccgcgtcatatattaaacaacggcgagaatacgtctttgataaattttaacactaccaatactcttaatcgtgtacgagcaaatgttttggttttggtaaatactattgtcaatccaaacatctagggtatatggtattttttaagttgttaaatatttatttagtaggtttattaggacatgttttgacataaaaaacagattaagacttaagttgattttttttaaggaatcgtctcctaagtagtacgagtatcttcctataaccaagcgaggaccgaacgacccggccatatatacattgatcagtttgtaataataaaagtgtatagtcatcgattgatgcacttgacccttatataaaacataggcaaaacgtatctgcagttctgtatacaagcgtacaattatatattcaaggaaattaatccaacttattgtcaaaggtgtgcgcatgcccgcgaaaggacccaggcgtttagttcacaccaaacttcccctaaactcttaactttccatcgtatcacatcacatctaaaatttttctactcacataaactcttaacttttttttcaaactaccaactttccccaaacttcttcccaatttcaaaaactaaacacagccctaattaattaagattaaatctgaagagtggacctagattaaaatagtacggctgctgcagattttaatatattggcacgcggttgcacgatcgatgtacttacttatgtacgttggctgttagccagctgcttagctgtcctgctagaaaatcattttccgaagataattttgcttatacggaacacatcctaggtgagaggcaagaaatactaacataacatgtggattcattgaatatagagtactcttgaatatataatgaatgctcatttttcagttgacaaatgcaaacctgcgacctgccgtattaggagagttgggttaacataagcaccttgtcagggcaatcactcgtcttatgctcacgtcatgctgatgtgtaagacccagctcgcgatcacctggccacttgattaacacactgcctgatggaatcaatcaggtggccataacccatgagctagcagagtatcatttggagaacatgtacagttcctaaggaatgtcaaatctattgcgaccatcgattgttcaattgttttaccgtatatatttcaaaatataaacaaacttttgtacgtgaatctaaacgtagtacatgtctaaatttatgtaaacgaatctatgaatatacaaaagttaagataaagcgaatacttagaccacatcgaatatgctttggattaagattaactacgagtatacaaaatgagaaacctattagtttatgattaattgaactttaattattttaaacttaaaaaaggttttatatgatattttagagcaacttctatataaaaagttttcgcacaaaatatatatatttagaaatttaaaaaatgtgctaacgaaaaccgaggtgaaatatgtatctcagcgaagaaagaacgggaccttatttatttaccattcgcttttgattgtttttttattttattttctaaccgatggccggataggagctccaaaactaattataagtcggcataccggatttacataactcatctgcttacataccggatcatactccaacctctcagccataaaaaatttagaacttttttagataatgaacttaaataaaaccccggcatctacattccaagagattcagaactaataagacatactgttgttaggccctcgcgtcaccctccccctcgggcgacacgggaggtgactaggccgccgtcgccggcctctccctccctcctccgcctcgctgccgcccgagcggccgcaaggacggcggtagcggggcttcgctctcaccacgcaagggcaggggggctactcggcgtttgggacggcggaaccgtccagatccgtgccgtccggccggatctagcggggaggatgtcggcggcatcggcgtggtagtgcggtgtggcggcgacgtttggcaaaggtggcaccggcgcttggaagtgatgacagtggtagaagtgaccaccagatccgcgcctggatctggcaggtaagtggccggtggcggggtcttctgctggcgacggacggtggcgcccggtggcgcggtggcgggtgaggtccgactctgcgacggctggatctggccggacgacgagcatccagccgtcgctattggcgacggaggcagtggctggcggcgacggtgcgacggcgcggaggctggtgaaggcacgtgcgatggtgcggaggccccggaaaccgtgacggtggcggaggggcaagaggccgcgctcgcagaggaggtggcaacatgcgcgggcgacggcgtgcggaggcgcagcaactggtggttgcggttggccggtgaggtcggctcggccggcagcccgcgacggcggaggtggtgtcggctcgctgaaggagttgcggccggcaactgtccaacgcgtgtaggcttggccggcgacgtcgaggacggccggtgcgtgatggctgcgcagcgagaggtgatgtcggtggaggcagagcccggtgaggtggctgcatgcggagactggccggcgggggcgccggtgcagtgtacccacacaccggcagaggttttgatggcggtggagcaatggagctgtggtagattggtaggtggtggacggtgggtgaaaacccaacccgaccccggccggaccgacaaccgatgaccgatgatgctcaagtgtcattcccctcctgagggtgttgtcgtgccgtcttaccccttaagggtggttgctgggcgaaagcttagtctcggctctcttgagaccttggcggacggcgacggtggtgtttccgtcgttctctccttggagacgttgtctagacatccccttatcaaaaccacctgaacttttggcgcaaacgtgctctagatttcttcctcttgtggcggcatcctagtttctacaagttggccatggcagatggcctaggggggagaggtgttccatcttctctctcaccctctctctctctctctaaatcctgaagacgtggatagagttgagctttgtgttgtttgtaagggtaaggttttgagcgatctcggttgtttccgttgttggcttagcggcagtcggtctcacttagcggcggccggtctggtgctagtcttctccaatacttgtggttgaacgctatcgatatgtgagtggtggtatatttatttttcctggtgtgtaatcttgttttttttcctgttctattaatagaatttcgcaccgagtcgttcaaaaaataagacagactggcaacacttgccggggagcaatgctgagagcttggctgctgggatggggccaagaggttggagacacatctagtgacgactgacgagtacaagcatctactagtactttatttgatccaagttgctaagctaatctgattgctaacttagcttatcgactgggggctgcagaaaaagagcaaatatgattaaagctcaagtggcaaggtgtcgatgccgacgaggattagttaatggtcagtgtgacagcgcattggcaggtgctactttaaatctaattaagggaaaaccgcacgtgattttgggagcagggacaggttcccctggagaaaacgccagtggcaagtggcagcacgcataaacaaaatttgttgccctttctccaaatcctgccaaggatagttcaggcgcggatctagcggccattgcatcactggcctttgtgaccaggacaaagtcatggcggctcaaaaaccaagacagctaacaaaaaagaaatatagtaatgctcacttcttccctttaaaaaaatattatacaaaatatataatctaatatgaaatgtgatacattctaacattataaatctgaacagattctaggactatgaatctaggtagacctcttatcaaattcgtaataataggatgtcacatcccgtattatatttattttttatgagacgaagggagttcttgatattcctttgtcttcaaatataacattgttactccctctgttttacggatgaaaatggagcggatacggacggataatgctcgtatcatattcgttttcatattttttgtcggatacggaaaagaatacggatagctcgaatacggaaacaaatatggactatctcgaatacgaataagaatcgaatatgatcggacacgaatacggaaacaaatttttctcggaacacgaaaaccagttcaacttctaatagaaacaaatatcaacatatataattagctcattttatataaaatatagtataatttataaatatttttaaaattttaaataatattaataatgtggactagtgttaagagatgaactactattaaaatctaaaaaggtacattgaaggtcatagagttataaagaaatagggtatgtcttgtggcttctgtgcatatccgaatagcactgttcaccggatatctgaattattatccgtatccgacggaaaccctgataccatattcgtattcatatccgagagaaaatatccgtattcgtatccatactatccgagaattatccgatccgaaaggtatccgtatttgtttttatccgaagcggacggaaactatccgctccgttttcatccctactctatttcaatataaacaaatccatacaagatttgtttattttaaatcggagtgagtagatattatgtttaattatttattttattttaaaacttaatataaatatatgtaaaaatacaagtcaggtttaaaataccttaagtaataaaataacaagaaatgatacttagtttgtttagtaagacgaatactcgaatgccatacatacgatacttagtttgtttagtattcactccatttatatccattttatattataagtcgttttgatttttttttaatcaaactttttttaagtttgatcaagctcatagaaatatttgccaacatttataactctattagttttattaaaactaatagttaatatattttaataatatatatttctatttttttctataaacttagtaaaactaaaaaaaaagttgactagaaaaaatcaaaatcaaggtgatttatagtatgatgaaacggagggagtaagacgaatgctcaaatttcatatctagaagttaaccgcatcatatattactttacaatactgctcataataaatgctgattgtggcaccataattttttttactgaagattaacaagtatggtaatcaggaatcttaaatcaaagagcgattttaggagtataagagaaaactaaatcaaaacgttgctgcatatatgcagctatgcttaaagcttactgcacataccctcctttatcattcatatggtatatatagtatattaaatttagctaaaaaaagagctgtgcatatatacactagatcgacatgtatattttctgcaaaagtggatataatatactttcttttatgaaaagctagaccaaaagcaaagaccctttttagtatgccaatgaattaattccactcaaccagtgtgcgtggattctttgagccaagccaaatccagaggctcgacccagtggggatccagtactgaatccagcatgaagtccagtgtcaggtcgtcggacgccggcaacaattcaggcgaaatcgcatagctgcagctgtaatggtcgcttctggccaccgccggcggcggcctgtttaccggcaaagcagcggcgctattattaccagctgattctgcaatgtgacagcctctgatgacggtgagcagcgaggagacgatcacatccttctcttctttcatcgccatgttgtagccgccgctgcagcgaggaggaggagaatgcatcaggcgaggtgtttccacctctgcctttctcagtctttccgccgcctgtgcctttctcaaggaggcgtcggcaatctgctggatttgcatggaggaagccatgtaatcggaggcagaattgctggtgccgcatgtgtgctcgttggtgtagatcacccggaacaaaggcgggtcctccgagttgtgctgctccacgtgcttgctcgctggacagccatggtcctgatggtacgtgcacctgtagtagcacctgcatttgcaagcaataatatatgatgcttaattagtattacagttgtttagtgctcacttttgcattccttgaaggaagaatgctaagaaaagagggccgtcgacatgcatgtggtagccagaaactttgacacatgacaatatttggcattgtacaacacttatctcgtaattgtttaaccatgccgacatgcattattagccccaaaggagtattcccatgcaagcatgctttgggatagcacaatgtgggggatggtatccccaggtatgggatcgatacatacaccacatgcccccaacaccaaggggtctagtatatatcctcatcaaattgtatatatagtagttccagttaattaatgatggactatttacgtcttagtacatcatattatgaatcaaaacgtttagcctcaattagtgtatacaatataccgtggtctacattacataatcggcagggagcctgagacatgcaaatctagtttagttatcttgtcagacgggaaactgttttaacagttcgagtggacgtccacccgtttactgtatgtcatctaaatggctatgaaaaaattgaaaaaatatgaataagatagatcaatatgtaatatatcaattcacaaacatgcaagttaaaattcaacttctacaaattgtaacaaaaataacaaacaaaactcaaattactatatgtatatttacaattaaatttgttatttttgttacaacttgtagaagttaaatttgaacttgcatgtttgtggagtgatatattacatattgatctatcttgtcaatttttttgaaaatttttcgtaaccatctatttgacatgcaataaacgggtagatgtccactcgacctactagaatccatctcccaaaccgtgcagtttgcccttcattgcacaccgtgtagagcatacaatgctctagaaataaaaaaaactaaaaaagaatgagatttggaaggagagatgtccctccaaatattttttttaagaataaattgtgagcatgttagagattgaacacgaggctttagagttgaatcaacacaccccttgccactacactatcaagtgtatctctaaaataaaaaaaaactaataaaggaacaattattgtctgatggtaagtgcatagcgcgcctgtgaattgatatttgcgttgggagcattccttcatttctctcagttcaagaggtttcagttaaaattatattgaataatatccccaaatcaaaatgtgatttgaaatatcatgcaaaaagctgaattaatcccatgataaaacccaagtcttccccaaaaaaagatgaattaatcccatgcaaaaagtgacccctatcagaaattgcggcagggtgtaaacaaattaagctgcttcccataaatgagtaataggcatctattataaaggaaaagaaatttaaactaatattcagacaacatggtctacggggtaggcaccgttatccagtaacaacttgaggattattcggagcaagaaattatatataaatttgattgtgtcgggtttaaattaaaatcataatatgattttcgccaagattgaattacttaggttctgatcgtttgtgctaactacggaagcacagccgtagttcatttttttttagtgtggatatatactgttgctgcagctgtaacgcagccacaagtagaacaaacatgttccttatacaacattgcaggtacaatgaaaccttcaactatccctgaaaattcccatggcatatattgctagtacatggatgttgcaccaattccttgttcgattcataagtatggtacgttagaaaatctatcatagcaaacaaaacaaatcaaaagcttggtgtaatcaaaggcaagttgagttggatcatttaaatatctaatcctcagttcgtgcatgttaattattaggaaactaataggcatcttttggactactaaacaacccccagtggagcacaggagagcatgtaccatgacaattctgtcgacgtattatagttcttggttctatttttccctatttggattattgtgcttcttagaagttgctcccattcaagcatgtgatttttggatacacgacagcctaaaggcaaacaatacaatgtgatgcgagggtagctactgggaagatggacggcacaatttaataaactgcacatgaacaagatatctttttgcttgaaacacacttcccattaaactatatatatgaatgcaaccagaaagccagctttccggatagacacaattattaagttccttaagccttcaaacgggattaatcacatgcacttaactaatatggaaaccttgcaatgagatcaatccaatgaacttaactgataagggaagcaccctatttacatacagtgtgtgtttcaatattattttgtattggtatacatgtgggtatgagttcgatcagttaagagttaaacaacaacctttataataattaaacaccctcatcatgcttataattaaggagcttatattatgtgaaatcctgaaccagagtgtaaattaaggagcttatatattatgtgaaatcctgaaccagagtgtagcccagctgggtcatctacatggattagttctactgagcctacaaatatctttttactacatttcacctttcattcttgcaatatagagagttcagtacaagctggttttccaacccatttgaattccttgcaagtgcataagcttacaattcgtctttgccatcaagtctgacactgtataaattacactagtggcatctactaccccattatccaacattttgattgttcaaaatttggccaattattccccataacagacaaatgttgattaaagaactacaggtaattgagtagtgcatgtaccttgggaaggagttgccccggatcatcttttgcccgtattttctccactggtacccatcatgatatggtgcatatgtgtactcagttcttgttccgatgcaaacctttctatttgaggaaattaacgctaattacttaaacatttaaataaatgcaccaaaagatcgaagaggaatattacatgcaataggaactaactacaaacatcgtttgcagcaagcaccaacgaccagacgaattcattagctccatcaatcgcaactcaattacaatttcatcgaaatacgcaacaattaagaattaactcagtttaagcgcgtgcaaaaccagtgaaatgaatggctagctattgttatacatatatatatgcatggattaacttacttcatagcgttctcctggtcatagctcctactgtcctgcagaagccttttatgggctcctctagaacattcactggagctgtccatgttgtcgctcctcttaaccatggtggtctcttgcaaccttctgaaacaggtcgacgtgatatgcaagttggtgcttgcaagataccttgaagttgctgaacgtcgatcagtcggattcccacagtaagtgctgaactcctcgccggcctgaaattaatggggatgatgagtttattctccttgtctagtgctgcggagaagtgtgcgactgtgcgctcatataaatcctctgcacaacctggagtaggtgcgtgctttgcttccagaattttaaattttaactcacacaacgcggtatctgcacttgcaaacttcactgacctatgcaacgtgatacgcatggacaatgttcaagtctcctgaggtgacaaatccagtcaaagaaacgatagccctacctgtcagtgataccagtatcaaggtttagccatgttccggagattctgatatatatcggtttatatgtgcacacatatagggggaaagaacactatatgtgtttatatattggattgatggatttgatatccaaacagtaacctgtcagtctgctgcaaacttatatatgaaaatgcctccagattggtttgattcaaaatttcaatttcaggtttgagaacaaacaggacctgaaaggttgagatgcaattagattagagacatgaacaggatctaattctaactttatatccaaaatttatatgtaggagtactacaaaatctaagtttaaccttctcggtttcttggttctcatcattgtttcgggaatatggttctcatcattgtggggacaacttattcttcctttttgcttttgaatagttaggtgtttgtttgtttaaaaaaaatagttaggtgtttgctttccttgtaggtacacaaataattaacacctatgtatatgtgtgcatatgaccacgtgaacacagggccccaaatactgggaatgtttagttacaaaagtagttcattaatacggagggagcaaagcttcaggcttaaggaaaacaattggtgatctacacaacttcagtggactagtagtattatgtctcctacaaatcaaggccgaatggttattattataagttaatagtccaatttattctaaaatataacaacttcaccaccaacattctcttcccaactaatcataatcctctaccattcaatttccccgcacacctccatttctcatcggatcataactctccctcatttaattctacctactttcttaataattgtgtacacccctaaaaatccttatattgggacagaggtagtatatatatattatctaggcaaaagtaatttactaatgcaaatggagctagcttcaggtgaaaaagaatggtactgtgtacatacaactacgatgaagtagtagtcctgtcctgtctcctaccaataaatcaaggctgaatggctattattatcagttatcagtttattgcataaaaacccgttttagctagcatgattcaatctaaataagtagaaggataatacaatattgttgtcgatagcattgatcatatagttaatactccaataaataaaacgaatcatattttagacacgacagctatcacaatactagatttcaattttataatggaactacactgtctgaactcttagatcttccttctcatacgttaggtttcatcacccaaaatgacattacaatatttagtattaacggtagtaagtacttcctccgtttcatattataagactttctagcattgttcacattcatatagatgctaatgaatctagacatatatgtgtatagattcattaacatctatatgaatgtgggcaatgctagaaagtcttataatatgaaatcgagggagtatttaacatcacatgggaaaaatgttaccaacacccaaaggtgaaatttgcaacagtgaaaagtaaagtggcaaattatttattttgatatttatctacataagtgcactgatgagcatgagctgattatcaattaaaaacagtgagcccacccatattgttcgttaactaaaaatgtatatattaagtgaaatgtgattcatattgtatggctggtgtgtggaaatttcttgatgtgggatctatgaccttttgaaaacagtatgcaaaggtaccactaatgaaacatatcctgggtagctgtcttcttcaatgtaccagtcatagtcaactatactctatttgaccatcttttgatcaatcaacagttagtgtgaagctcaagtaaaggattactcatttgtattgtcagcctttcgcttaaatcaatcataataacacggttcacactatttcaattatgtttgaatcccgagtcaaaaatgcaaagtagttaaaaattgtcctttcagggatcaggtgttcattgtatacaataaataggtccattcggatctcaattgatattacaatcagaatttttaatttttaaaaatgcaaaagcagaacagagggtgacagcatccttacatgtttcaggtgatgtgagcacggtgatgaagctaatacgagagtccatttcgaataagtcaaaagttgtacatcctgatcatgctttcagatagcttttctgaaaagagagccccaggaagtgggattgctgaattttgccgtacaactttcattgatgaccaacacggtatctccaaagtccagattgctactccacaatcaaaatacgagaaacttcccagcaagcagtacggagtaatcctctagcacaagtgacaaaccgacagttagaaactttcatggcacagggcaatcacacgatttgaaatacagtcaagtgacacatcattccacgagctcattggtaaatcgtcattgtttataccatgacagtatttgagatgatagcgattccatatatgattttcttaatttgagaagaaagtgattctatgattttctaaagaaaagaggtacagaagacgcaccattcctaaaataagctccacagtgcaacgcagaccatgactaactagatcagctccagggtgcagcatcttgcgggctaatctacatctgtttggacattgaaggcatacttcatcaagaagtttttgacaaagcgacaatattctgagttctgagcatcgtaaagtagtacaactgtaaactgtttgcagtacaactgtttggacatcatgaatttgtatgactagtaaagatttccattaaaaatgcagaaatttcacaagaaatttcagagaaacagttgaattcccacggagagatgaacattttcgcacctccaaaaacccctcaccacggacgaagcagtaataaaacacatagttcgttatcctcgatctcctgtttcctggtggcataagcatgacatggaaattccatctaggttttcagcatcaaccatcgatgctggctaacaacaatctctgggctaaaattttgggaatcgaagttgctaaagcggggcaagctttgggccagaaccggcaaggtcagtgctgggctaggctaaacagaactggaaccgagacggaggagtaagaacctgcaacaaggaaccccccccccccctcctgcggcggctgcattggccggtgcgccgcgcctgaacgatccccctcgtcgccggcgccgcatggattcccctcctccagccgcgtcctcgccatcgccttcctcccgacgaccccgtcggcgccccgccgcctcgccgtcttgcccgcgtagcgtatgtgggaaggattcgatggttggagatctcgtgggctctccttgcgctttattttggcccaccccgacgtgtgccacgccacgtcgcttatgatccagatgggctgaatctacttaaccggttggaccgtgagcccatatttagttggcatgggctatatgtttcttcttggtcatcgggcagtaacgtgtgccacgtcataaaaacgccatgtttttttttaaaaaaaaggagtagatttgtaaaggacgtaactatacagctagtgttagctaaaccagctaccactccatctaagaggcaccatccacctatacttcaaatacaattttctcttaaactactcatccgatctacgatcgattacaccgttgtgttcgtaacaattaaatctttacaacaagatctcacatgattatattttgatgaaaaatcacaaattacttttatgatatgtctaaattacttttagatttcactaagttactttttagatatataaaagtaaattcagtaaaacctaaaagtaatttacatatattatagaagtaacttagaacaaaacgaaggtaactttaacatgtcatttgaagtaaatccgttgtagagataaaaacatgactctatctataaattaaaataatcaacacaaattatggaattaactaaaataataataaaagtaatcacctcagagcattatgaatgtataggaagtatttgaaaaagtaactcatatatatatatgataatttgttcaatgaaaaaagaca

SEQ ID NO: 5486 - DNA, 51923 bp, Oryza sativa
ttcatacatggagtgaggagatatatgggttcgggatctcagaatcttacacaacgctgagtgcccaagttttttatattccagatccatctaagttaagggtgaaaaagggtcgacgccaaactagacgcatcagaaatgatatggatgagtcagaagcaggtgggaggactttacgctgcagcaagtgtgatctgcgcggccatacttacaagaaatgcccgaagaatgcagaagttccaagcggcgcagatgctagtccatctggacaggcaagtgatggtaggcgaccacatggtgaaggaacaacaagcaggcgcgcaaggccaaggcgtcgtcgcgcagcaggcgattccatggtgtaacaatgctatcgatttaggaaataaaacgctgttgtgatgtgatgtgtgttcggactaaatacttatatcgtgtaatttcaattgaatgttgttgtaatgagtacctccgactattgttgtactagtagtattgcgaactattcggtgttgtatcataatgttatcgtgatgagtgttcggactagtaactgcagctattgttgtaatcagaaatattccgtatggtgacacttttgtttgtttgtactcttgtttaatatgtgttagtaattcgcttatgaacatttattacttatgttgactaattatttatatgtttctgaccaatctatttgatgcaggtatggcgtacgacacaccggcgctgttgaaccgtgggattgacaggaaccaccgctcgttcctgtcagcagtcgagggtgcacagctcgacaccttccgtccacgcacgtcgcgcgagtggttgcgtgtcgacccccgtcacgttccttggtacgcgtatgttcacatttcaactcaactttgctttgtgttgtacttatgtttgaagtttgctctatacaggttgcgtgcggcaggccttctaccactttgtaggcttgttgaggcggcggcggacgaccgtgacccagcgaagcggtgggatgcagaccggtcactccttgccgctcaggtagaccgctggagacctgagacgcacacgttccaccttccctgtggggagatggctccgacactgcaggacgtgtcgtacctgctcgggctaccgctggcgggagcaccagttggtcccgtggacggtgttgttgggtggaaggaggatatcactgcgcgcttcgagccacgctgtggacttccggctggtccactacgcacggtccatcgcggatgctcagccacaggacgtgccgcagtggagctggggttctgccgtgctagcagccacgtaccgtgccctctgtgaggcgtgcacgaagactgacgcgggagcgatcatcgctggctgccctatgttgcttcagctttgggcagccgagaggtttgccataggtcgaccagtggtggacagcgcaccctacggggttggtcgcagcgcgcagtggccagaggacggtcccacgatggggacttactggtgtcgacgtggggttagtgcaacttcgctgcgttataagtttatcagtcgtcttcttttttttcttcacataacatgtctaattccgatcatgtttattgcagcgtcgttacgctcacgtccaggtgagacgaggttacccggacttcgtgttcgagtttgaccgtctccagccgagcgacgtcatctgggagccgtacacagaagaggccgtcgctacgagagcaccgctaggactttcgtccttgtgcacacgcgaccaggcttactggctcaccatcctgccgatggtgttcgacattttcgttgagcctcactgcccgcagcgtgtgatgagacagttcggacttaggcaggtgtttccgggcaacgtgcagccgaccgtcctccctgccgaccactcgtgagttcggattgttcatttctaaatttttatgatacttacttcatcgagccatataatttacctcggttgactcgacggggacagctagcaggcgcactttgggctccacgtgtacagcagtacgttgacgactgggtgttagctacagaggaggtgatcaacgagctcttcccacacacggaggagaactaccgtgactaccttcgctggtaccttcctcgcactcgtgcgcgtgtgaccttcactccagacgccccagagccgcacgttgccgctgtcacggacgcgtatcccacgcaccgtgaccgagactacttcgtgggggtacgtcgaatttgtattagttcttacaattatttcatttatcttgcataatataggacaactactgaattttttatttccatcttgcataggctgatgccgcacgggatatcagtgccgatatcaccgcagtccaagtgaggttgaacagaggtttgcacttgactgacgttgagcagagggtgaccttcgaccggatgcaggagaagatgcgtgcggtcatgcgcgtcttctcctgtcgcagcgccgtggacgtcgtacctccagctggtccggtacaaccacggcctcgcgcgcctaccgtcggagcaggacctcgacctacggcacctgtttcgcacggtactgctcagcccagaggtttcttaagttttgtttatgtttttgtacgaaaacatcaccccgtcgtaacttgatgttccatcctcgcaggacctcgtttgccttcgagcgcccctagcttcggagcagtgcgacctacagcaccggtttcgcacggtacagttcagcccagagattagttcatttttgtttcagcttttgcacgaatatgtcaccatgttttaactgcacgtttcctcatcgcaggacctcgtctgccttcgagcgcgttcgcaggcacgaccggcgcttccgcgagctccgcaggggcgttcgccacctcttcgggcgcgttcgccagctcttcctctcacggagcgtcgatccctcgcccacaaggtactttactttttattaatactattaaatacatgtatgaaactgatggtccttgtccagtaggatttgcagccgggatcttcggtactggggcctcttcgtctcacgccggtaggactggtcctactagccagttctacgacgacgacttgcacggtgcacatcaccacgacgtactaggctcctctcagcttggaggagctccagaggcgcacactcaggagcagccagaggtcacacctgtacaggcaggacgggttggccgtgccgtacccccggaccgactcacgtactcccaggggcacattagggcgcagggtaggagggacaggggtaagaggcctcgtcagtagtgttctacctcttcagtccttatgtgaccgtttcttttggcttacaaacttgtaaagcagtactacttttgctattactactgcagtactacttgtgtttgtctcctctacatagttcttttcattcatatggtgctagaacaacttatgctcacgacaacacactttcgtacaatggattgacacagtcagagttacttcaagtggcgggccgataacgcaacctgaaccgaccatacagttcattcatacttggatggagtacgaacgtcgggtggaaattgcaagcttagactggaggaacaatccattagggttacataaatggtccgagcgtccaaagtgtgggtgcagggatcgctggcaggtggctacatcctttgctgaacaaacatttcgaaggagatattttgtctgccccaatgtagacaacgatttcgttgtatgtctaaccatttacaaaatccgctatgatttgcacaaaattactacccaaactgaataacattactatttttacagggcaatccaaggatgggtggatttactcgatggatcgacaatgtcactccatcatatcatggccagaagataacagagtcagaaacacaagtagagtatcaacgattgaaggaccacgagaatgcaatgcattctgaccgacctagaaggggccgataggttaccgcatgcttgattcgtcgggatcgacaaatttgtaccgtgtatcgatggcacttcttatctatcttatcattacaatgtttaattatggtggtgattttttgtatgcgtaagactaagggcctatttggattgctaccaaaaacatgccctaccaatattttggtaatttgaatagtacttgtgtttgatttcgattgaagcctattcattggtaatacgtaatctagatttaagattatgtagaacattcttcactacaattttacattttggcagcaaaccaaatatgatcaaatgcaattttaccttaccaaatatttggtagtgccaaaacttgcttatattttggcactaacaaaatatttgtacggtaacattccaaatagaccctaaaaaataataaaattgtattttaccagtcttggagattttaatcttgtataattttcaatataaaaaaaattgataactattgatatttataaaaaatataaagcacagtataaaatcgccctcccccagggcggcaagggggccgcctgcaaaattccaggccccccgccgcccatttgcaggcggccccccgcacagtacaaaatcgccctagcggagggcggcaagggggccgcctgcaaatttcgttgacggccgtcgcccgagagcgaacggccgtctgccacgtcactttcgccgccctctgggatggcgatttttaaaaatcgccctcccagagggcggtaggcgaccacttctgtcaattttcaaaatgaaaaattatttttgtaaaacttttaataaaaaaaattaaaaataaaaaaaattcccgcgttgcggcgttggcacgaaagatttgtactccagacctccagttccttcgcaaatgtagcacccgtaacgacagttgatcaaacattccgtcgatcaattttgacgtgtttggagctgaggtatactagctaacccaagctggtgattggtatgtttcgcagcagcagtgaacgcgaccacgtttggcgccctcaattggtagtcccctaaccttttcatttcccggtctttcaagtctctttcgtatggaaaatatgctgctctgaactccaaccatgagttgtaaaaaaaaaaaaaaaagtccaattgagaactacaccggccggctaccagtctccatcctcgcttcgtgacattccacattaacctcagtgcacgtgcaccgtgcccacgactactgtatgcgactgcaacccactgcacaaaattagtacttttagtctggcgatagatctcaacaaatgcatttacgaaagatttactacgaagagatcgattggtcgaaacagcggatattttaatttgcagatgggcagatggtctgttgtattgtcctttttttttttctggagtccgtacatatcgcaacgtgcagccggactcttttccatttcattggattattgcagcggccgattaatggctccgagcttttacggtgtttataaggtacttcgaaatactaagagataggataatgtataccgttgattaagagagatgcaagatataaaataaaattatcgtaaacgatagcagtggggaaataactagtcaaatatggtattttctgtgagtcgagaatagttagctccatgtgattagtatcgttcattaggaagcaaactaaatcttcaaagatttagtggattgtattgtttgatagaaataaagtaaattttccgcaaatttagtggattgaattgatctgcatggggaaaaaaaacaagattgatgtatcatttgttctcctccaccgcttcgttcttgtccatggtcatgcttccatcctgccatcaagctccaatgcttccaaccactcccgcaccactttcgtcaataagttcaggaaaacggaatccctatcagttgggacgcgtggtgatgcgcttaggtgcccgcaaataccaactgaagcttgctacatgccattctttctttccctgactcatgcccttaggttgtcctttgtgcctgccttcacttcccgggggtgcgttgtgccacgggacatgtcttaccgccatcaccatcatcatacaaccaccaccagaacctcaacgcccttagcctcctcctcccatttgcccaagcttggacgagaagaagaagatgaacagtgttagggcactgtttcttctcggttgggtccaaccaactcccaaggactcccatgttattagataccaaatatatatcacaaaaaacacgtaaatgacacaataaaggatcatagaagataaaataccaatgcggtacctatgtaactagagctaatatttagacaattatacccttctccatttcaaaaaaaaaatatttttacccttcctacctaaataactataagttataacaatactcaaatactttttaagtggtatctttcattgtggagcgttggatgtttatcctttttaatacaaacacagtatgttttctcaagattttatttatcgtctattgtactgcttggatcaattggattttatttatcgtctattgtactgtttggatcaattgttctatgtagattatttttaaaaaatatttaatttcccccctacgatgaacaacaaaatctgcccgtcatcgtgtaaataatttaactcaccatgaaatcgtgagactggatcacatgcggcgtactttacttgtgttaaccgatggagaatccttgtttactccgtgttactactactccacccgtccagcgtcgtggacctcgtggtacgtaggagtacacgcagttaccgttcagtacttaaccccgtacgctgatctgcactgctccgcgctgcgctgtgcaactgttgcgacacatggcatggggcagagctactcgaaacgcgacgagtcttcccatttggcgacgggtatagccccgatgtgacgcgaccagaagggctcgatccgtcacttccacgagtagttccattcacggcgaagctgatgttcccgcggtgggttggtcttggccgacgaccggccggtggccagcctcacgtttcgatcacctgggcgcgacagatcggttcttgccgcatgctgatgtaacggtactgggtggtacgcgtacgggcggagtttctgtcaccgtccgtcggtccgtgccagagatctcgcgacgcgcgacgcgcgcgtgcacgggccgaccaggcgtcgccgcgctctgttgcttgacacgatcgggactgcgtccgcatgcgcgccgagcgtgacgccacggcgaccggcacgggacgagtggacgacaggtacgcagcattgcagcgttcgaacgaaacccagccgggataacaaagagatcgcctgacttacctggagagcacgcgctatccgaacgattgagaccaattttaggtagtgtttggttgctgggatgaggtgggatgggttggtccctagagaggaatatttctctcagatccgggaccaactcatccggccaaaactggcggactgggacgagcgaacggcgtgacgacgctgctcgcgcacttgccctgctcgccctcaggagacggcggcgggctcatcgacggcggcggcaacaggctcggcagcagcggtggcgacaggctcaggtgacagcggcaggctccacggcggcggtaagccacaggctcggcaacaccggatcttgtggtggggaaatcggcggcgctggatctaacgatggggagggctcgggcggcggaagatggctcgggcgacggcggaaggctccacggcggcggatccaacgatggggagggctgcgccgacggaagacggctcgggcgacggcggcaggctcggcggcgacggtggagacaagctcggcagcggcggcgttgaggggctcggcggcaccggatcctgtggtggggaaggcggcggcggcggatccgacgatagggagggctgcgccgacggatccggcggcggcccgaccgtccgtcatcgtccccgaagctcttggcgtcatcgtcccatagcttcacgtcccttcgtcggcccgaaggtcgacgccatcacccgccgcatcgcgtcccttcgcgaccgcagctcggtggcggagatggaggtgagggcagaggcggcggcggccatagttgttgccaacggcgtcttcagtggtggcaaacggcgtccatcaaatccctccctcatcccttcaaccaaataaaaaactgcgatcgtcctattctataaaccaaacacgtaagtagaatcatcccaacctcaaaataatggatggtttcatcccatcctatctagttttagaaccaaacactaccttattttcggaacaactgaatatggatatggaccgtgtacgcgcccgccgcacacttgcactccccgccgttgaacagtcggagtgtaaactttaaagagcgttgagcgagctgtaaaaattagcaagtgacggggaagtaaagtacccacggtacggtagctgaggagacacaaaatgtcttcggatgcctgaaccttacagcagtgcgcagttgtgcttgtgcaccaactcgtgtgagtccttttggtgcctgaccacgagtaaggtgttttagtttttcttaatttaagggagtagctatatttgtgacgtcatatttttcatcaaaaaataattagcatgtatttacattgtaagtccctaaattacatatgtaaatttagtgtatttataatgtaagtttcaaaattacatatgtaagtctaaaaattacacagtaattatatgtgtaagtggtgtgtaagtgggatttaagtggggtgtaaatttgtataaagtatagtatgcatgcgtgtaaaaccttgaactaatgaagacgttaagctttaattaatcaattaatcatgttgacagcctcaacgttagcctgccatagcaatatgcacggacaggatcgcattgacacgggataaaggaaatcggacgcttcaaaacgccgactgtgatggaggagaaaatgtgtcgatacaattctagcaatttcgtaatttaatcagtataagatccggtaccaacaggcattagctgatggcctggtgtcgatatggtgccaacataggatagaaatatgacaccttatagtactatttaacaaatatagtaaggccctgtttatccagggatgaaaagtttcgacgtgtcacataggatatagaccgcctgtattaaacgtagactaataatataacagattaataatatccagggatatacagatacacatttaaagtattaaacgtagactaataatataacaaattacagattccacctgtaaactacgagatgaatttattaagtccaattaatctgtcattaacaattgtttattgtagcaccacattgtcaaatcatgtagcaattaggcttaaatgattcgtctcgtaatttacacgtaatttgtgtaattagttattttttatttatatttaatactccatgcatgtgtctacacattcgatgtggcaggatgaaacttttgccaggagatctaaacaggccctaaatatttctggtttgtatacatgcttttatattgtattaacagtacctaagtagtcgagatactctgtattcctgttgaattgtcttaaaacaatgagaaaatctatcctgtatcactgactttgccctggaaccacaatctgccactgactttgttcagttccatactatgccatcgctttttgtttaacttctataatttaccatcgccgtcaagttagcctccgttagtaccatacaattttgttctaatgacaaaaatacccctaagatgaaaactttcagaatttggttgaaaattcacaaatatcatactgtaacatgttacagaggttgcccggctcattttcttctatgatgatacatgattatctaagcatacatatgattgttttagcaacttgtttgacggaatgttgcacttacaaaaagtatatctctgtgtatgtgtgtaggttcaaagcaggttaattaggtacatgattcccatgcatacatgtacgagtgcgagcacctgccggacttttggtcgtcgcatccctgtgtacacttaattagaattctatcaatacgtacgtatgtatgcggtcgccacgggcttgtgtaccacggacacagcctgcagtgcacgtgtacttctggccgtaattgaggcgggcatgaaaatgaaaatagattgggttaattttaggatttttgttcaggggtattttggtcattagtataaaattgtacagtgctaatggagacttaactaacggcgatggtaaatcatagaagttaaacaaaaagtgatgatatattatggaattaaacaaagtcagtggcagattgttgaactagactaaagtcagtggtgtatagtagattctctctacaatcccgttgaatttctgagaaaaaaaatgtttcgctccaaataaagccgggctccttatggtttgtggagatgatccgctctctgtttaagcatcttcgtacaatgaagagggattagaacccaattgaaaacatgatcaaacatcaattgacgggtgattgatcaattcaattccaagagtccaaacagataattcgagtgctgagctataattgcaaacatacttttccgatgtgcagacgataattaagtcacactgtgcactcaaactgtactccctccatttaaaaaaacgaatctattattatatgacaccacataatacaacagatttaaacaaatatatattacatatattattaggttgattttttttagagttaattgtatattggaccactaatatttaccttggttgcacattggactagaggtaaatctatcttttcacattgggcctgctaaatctacaatagttatatattgaaccggtattcttctccaactctcttctccgttgagttgaattgtacccaatttgtaaagtctccatacctgtcatctagctcaaggtcgctaccacaaatgagcaaggctctgggagaccaggaccttgagtgagctgctgccggctggcgatcaagcccctgccctacgctgcatcaagctcgaccttgcactggagctacattgagcgttgcctcgtactcgagctcactattggcggtgagcagaccatccagatcgcgccaccaatctagcttgacctcctccgatccctgcctgcgcactggagctcaagtttgagctcgaccttcgtcagctctggccactcggtcgatctcgctcgcacccatccctgcatcaagctcaaccctcctggtcctgcaatctctcaagctaaacctccatccaacaagctgttgcaagggagaagttgatggtgagtagctacgattaggttgagtaagcgttgcctgagctccttcgtagatatccgtcccaaaaagactcaattcttgggtttccgtgttcaatgtttgaccgtccgtcttatatgaactttttttatgattagtattttcattattgttagatgataaaatatgaataataatttatgcatgacctacctatttaaatttcttcaaataagacgaacggtcaaatgttaaatactagaacccagaaattgagttttttttttgggacgaagggagtatccgttaattgttggccaccagtgttcgagagagataagggatactgacactgactgacatgtgggccactagtgttaagtgaatttttggtaataatacctagcccaaaatgaaaagttgtgctaccacccagttcatcatgcaacaaaggtaataaaaactagtccattataaaatttactcttttttataggacagagtgagtggagtacctagagggagtacctagtactcccttcatctacttttaattgtcatatttccaaatctgaaaattttatttttgataggtatatttcaattcaagaacttatcatcttaataactttctcggatttaatacgtgactctccattcttccatacaagattagctacatgggcatcgagacatgtaaatattaatgaatcgtttgtttacgaggagtagaattacttatccttcatctgtgtgtcaggataaaatataacaatcaaaaatagatggagggagtagcatcttgcaagaaaacagatcagtgctacctatggacgcattgcagcactcctagacaggctaaacctcccgtacgtcatgcttcacacaaatcttcggtcgaatctactcctatatgactgcacatgtgctcgttagtctcacacttgacccgagaaagaccagctagatacagtactactagtcactgcccaaggcatgtctgcgtctccctcttggaccatgtactagctccccttggttggacccctcggtgctgtgtactcactccgtcaaaaaaaaaaaaaaaaagacaaatcctactttccgtatccaatgtttgaccgtccgtcttatttaaaaaaattatgaaaaaaattaaaaaaataagtcacgcataaagtattaatcatgttttatcatataacaacaataaaaatactaattataaaaaattttcatataagacggacaatcaaacattggcacgaaaacccacggtttgtctttttttaggacggagggagtaacttctggcaagtatcacagccttttcggggttgcacatgcgagcctttacgactatccctacttctccatgggcaggaataactttagggcttattaggatcacggtactgcaaaaacgtaggagtagaaaaatcgtaagaatatgatagaaatatatgtgtaaaacagaggattgaaaaacacaaaaattctgtagataggattggtaaatatgtgttcggataggcagaggaaaaacataggaaatggaaaaaataagatacgagtggatggaaattttcctttgtttctctattgattccacatgaaaggaatttttcctcttattttcctttgggttgattcctatggactgaatgtcaggaaaggaaatatttcctatatatagtattcccttgaaaatccttaaaaaatccttccatccgaagaggccctcaggaggttttggcgctggaccaactgacgtactagtactagtcacgtagtagttccccgcttcccactgagcaatcacaattcacacacgagtgaagtgaagtgacgaagggaggactcaggcgaggatgcaaagatatggtaaatagagggagtacgttgctagtgccactgttctttctcgctgatgtattaaacccgatcgatcgatgcatgcagtggtggcctttgcctggattcggagagagatctgacgccgctacagtggccagtgggagggctacaagacagctgtgaagccgaaccgtcccttcgcgtcgcggcaccggccggcttcgactgaccctgccttccagcttcctaaatctggccggctgatcagcctccgctctacagctgctgccgcggcgtgcggcttgaaaaggagctggtttttgggggaggcgccaatggcgagctcgggggggaggtggaggcggagcggcagttccatgctaaagctggtggtggccttgtgcttcttcgctgtggccatctccctgtgttgcgtctgcctcagctcgggttgcggtggcagtggctgtggtggattcaggcggcgcgctgtgctgctccgtttaggtaatgaaattcagcgagctgcatccttctgcgcacttgtttactccattttggtattctccagttcactggctaattctggccacaacctgcttgttgggtgtttcatttcgtttggttctgtatgtttgtcgtcgtggttcatatgttcactgctcatgctgatgcgagttcttcgtttctgaaattcaatctggataagttcattgcaggctttaagttgaaaatactgctataatgtttttgtttcactgtattactcctatatcggtaccatatagtatatcggttgaaatgttcaaatcactctgtaataatccgtgttatcgtgttttctgcagatttccggacacgagcaacagcatattttggcgctaatcaggtgagttttgcatctcctcccccttgctatccactctacatgcccgctaccataagttcgcatcgatcaatgcagttcaacttcaaactgcaaaatgatgaaacgacgcgatttattgttgtttatctggccctcaatcatctttcatcagttgttgattcgcgatcgatgacaagtcgaaatcaacacagaacactaggcaacctcacagggtccgcaatggcagtccccattagcgcgcacagtcacggccatgaaagctggcgtccttctccgacagccgttcaacgccggcggtcccatcgccttttgaccatacgtctctgccgatcgatgcgtagtagtacatccaaacgtagcacgccggcacgccgcgcgtcacagcgatacgtgaaaacggtgaaaggttgaaggacggtgatacgtaaatccattgtgttttgtgttgtagcaggatcacagctcgagcgggcgtcgatggcggcggctgctggcggagggcccggggtcgtacccgccgcggtgcacggccaagtgcggcgcctgcgtcccgtgctacccggtgcacgtcgccgtgccgcccggcgtcccggtcaccaccgagtactacccggaggcgtggcggtgcaagtgcggcaaccggctctacatgccatgacgggcagagcgtgcacggcggggtgacgctccggtggcgaagcgatttgcgcgagggtggcgcgcggtggccggtgggcgtgccgggccgaggtactagcacagtacagcagtgcactgctgcccgatcgaagcggccgtcgcgcatggggccgtttcattattgcgatgcgggccgggagcacagtggcagtgtggactgttgccgcgcccgcgcgcgaatcgggtggaggcgcgcgtgatgatggcctactgggctgctgggctctggaatttgcgcggccctaccacgaggagcggtggcatggggttgtacggcgcgtgctgcaaagggaagcgagaaggggagcacgaggcagttgctcgctgcacgtgtccaggcaatctgttgatatgttttggttcttcctccttgtccatttggatttggatcttcgaaatcccatttgtatctttgtgagaaatgatagtcgttataggccatttatgttaaatttcagcattattcttaccgggcttcaacagcatacatgagtacatgacatgtgttggtttcttctagcagcatggaacagttggaagtgtttgtttagggtatgattgtgaagtgctcgacgttcaatcatgttagtgttttacgtttggagaacgaagaaatgagtgttgctgtttggtgtgtacttgtacgagaccctcacatttgaaggcccatcaatgttgctggtaccacccagcccaactattgatgataggaataagttcactggaaatcactacatctaaactatcacaaaccgtgccaaaaaaataaaaaaggtcccgagcagtattgacctaatttttctcctgttttgctgacgtggtatacatggaccccacatgtaagtgagaaggaaaaaatatggggtccgcatatccttttttctcttctctttctcttctctttctcagcgagctggaaggctgggaggccgccgctggctgagggcagagcggcggcgggtggcactttgttgcgattcgcatcattccatgcaacggcacggccttagcctccatcatcccaacaccatgcatcagcgtagccttggccttggcggtagcgggagccgcgctggtcatcgtcgttggtggtggttgcggggacgtcagggtgcgcgaagacgctgaggtagacaacggatgcgagttagctcacgacggtggagaactcatggtcgccgaggggccgctccctatcgctgcagaggagcaggccgcaacatcggcacgccctcggcctcggcggcgggttcttcgtcgacctcctccgtcccatcccaacgcaagccgaggcggcgctgctgtggctgcggacgatgtcaacgtagacctcgacatctttgtgagagagctcgcgaaggtcggtagagctgttgtcacagaggatggcggtggcagcgatagctcccccgacgccatcccacggtggcagctcgctcgccgcccctgaccgctatgcaccagtctccagcctcgcccaagaagagaagaaaggagaagaaagaaaaaagaagagaaaagagatgcggaccccacatatttccttctcacttacatatggggcccatatattccacgttagcgaaaccgaagaagaattggatcgatactgctcgggacttttttttttttgcacggtttgtgatagttgagggctatagataacccgacgcgaagttgagggacggctgttgaacttattcctgcggataaggattactttgatgggctaaatcctatcgcgtgcgatacacggatctgatgtccttgcattttcagcccatttactatctagaagaggttgatgccttgatggcctttctctccccatggccacgatccgacgaaccctgttttcctaccacaaataggtcggatggccacagacgaattgtgacgatggttcgtggtagcatactatacgagtacacacgacgcatcaaggtagtggctatagagaggcacacgacaaaacgtcacagctatacaacaagagatggcaacaagcaacgccaatagatggcagagccgttgcctgctttttttttttctggccttggtgggagatgatacattagatacgacgagggaaaaaaaaaacaacaaacaagccaaccaacgaaagcgtaggaggctaggagccgttccgccactgaaagagcacggatgacgcactaaccggcggcggggcagacgtgacgctcgtattagcgacccggcacgcggcgccctcttgtccgcccagcgcgacaccgccctctgccctctcgcgagttacgtgaaagcgcccgcgggcctctcgcggtcgtccgttgaggtggcgtggaagccacgaacggtggaacgcgcgacagctcgcgctcttctccccccatcgtcgtccgttcctcgtcagcgtcgagggtcgcgctttcgtttactcacgcattccgacgaaccagccgttaacgacctcggcctcgacccttgtattccggatgatttaccttgctgccatcgctctttttgcgacctgattggagtaatacccggaccccaacggcaagaattgatagtttgaacagcatacagcaacagtcattggccaaaacctctcatcttttttgcttcctcgtactccgtttccgttctgggagaagcccagcgaaaatctcacaattgggccatgggccaggcagccagcgatatttacctgtccaaagcctacgcatccgcagcacaaccacccccagaatcccgtggaatcagtcgagattaggggcaaaaacgtgagaaaagccacccgtttcctcaccgcgacagctagacggccgcgcactacctgcctgcctcctagtagtgggggagcgcgcggcgcgccgtcgtataacctcgcgctgagagcggagcggaatcggaagatcccgaggggtcaagccacaaaagttcggcgccaaccgtgaggaagaaatctgagagcgccgggcaggcggagcagcataaactagaacggaggaagctcccgcggcggagaggaagcggcgtccatttgctgtccgcgaggtcgtgcctgatcggttcagatgggttcgtctgcggttcgctgcccgtcttcgtccagttcctgatcaggtatggtccttctcccccccgaagagatctgcttgtcgtcagatttcgattccactgcgactgggtggaatttgtgcgatttagtgtttcctattgagtgtaggcaactgatgatctgtcagaacgtagtctctgttaacatcaagtaggaattcgccactacttttatttttcagaatccaaatggggacatttcgtcgcaatccaatcgttcaacgtgtactttgatcgccgatatgtgcttcccgcatttttaggttgattgacagcattagggcatccgtccgatagtctgtctgggttggtgctgaagtcatataatgaaattgggggtgacatacctgtgatgtttgccggtggctcttataacagtactaaattaccgtgtagcatttgagattttaacatccatttggatttggattacatttcctgtgtaggtgtactaaaattcagtttgttctttctaatgacagctcttaacaggcagaggacttgggaatgcagaaagatgtgcttgcacgacaggaagttaatatttcgtgcaaacaagatcccagcttggatcaagccgatgttgctggaccttcatgtgaatgtgctgcatagtgataccgtgctgcttttccgtgttttgaagcatagtagattgaaggactccaagtttgttgatcatcacattgacgacgacggataacatctgctgcattcattacctatactttgtagatacttctatagaagtggtgtggtggtgtttgctcattttgttgtgttccaataacttgatatgatggatgggaggtcaatcttgatgggccgttatgaggttgggaagcaattaggacaaggaacatttgcaaaggtgtattatgcacgaaatcttactaccggccaagctgttgccataaagatgatcaacaaggataaggtcatgaaagttgggctaatggagcaaataaagagggagatttcaattatgagattggtgaaacatccaaatgttcttcagttatttgaggttatggctagcaagagcaagatttattttgttctggagtatgctaaaggtggtgagcttttcaacaaaattgctaaggagggaaagctcagtgaggattctgcgaggagatatttccaccaattgatcaatgcagttgactattgccatagtcgaggtgtttatcatcgtgacttaaagcctgaaaatctgctcctggatgagaatgaaaaccttaaagtctcagattttggtttaagtgccctggctgagtccaagaggcaagatggtctcctgcatactacatgtggaactccagcttatgttgctcctgaagttcttagcaggaaaggctatgatggtgcaaaggcagatgtatggtcttgtggagtaattttgtttgtgcttgtggctggttaccttcctttccatgatccaaatttgatagagatgtacagaaagatttgcagagcagacttcagatgccctcgttacttttctgctgagctgaaggatcttatacataaaatccttgattcagatccaagtactaggatttctatcccaaggataaagagaagtacttggtacagaaaaccagttgaaataaatgctaaaaacagtgaggcagccacaacaaacagcatctcttcaggtgtagctacaacctcaggttctgcagagtgcagcacttctgaggaaaatcaagggtccttaagcctcccaaacctgaatgcatttgacataatttctctctcaacagggtttaatctatctgggttttttgaggatacgcatggtcaccaggaagaacggtttaccactaggcagcctgtgacaacagtacttggaaagctgaaggaattggccaaacgcctgaaactaaaagttaagaagaaggataatggagttttgagattggcagcaccaaaggaaggaaagaagggctttcttgaacttgatgcagagatttttgaggtcaccccttcattcctcttagttgagttgaaaaagaccaacggggatactatggagtatcgaaagctggtcaaagaagatataaggccagcactcaaggatattgtttgggtgtggcaaggtgatgagcacctgaactcacaatctatcctgcaaggagagcagcagcagtccccattgccaccagagctaccacaggatcagttgcaaccatcattgccacaacaggagaagcaggacatgcctgaaccaccgttgttgccacaagtaccacaagaagaagtgcaaacatctatccccgcagaacaaacaaagaattagttttaacagccaactggtaattcaaatgttcttgtcatccatgtttgtatccttcttttatgtctttgctgcttgtttctaattcctctggaattgcaaagctgtacctgtttgtacagaagtgcaatgcacttcaattttggaaactacaaaggaacacctccgagtgttactcctgaattttcgaaagagaaacaatcattgatgagaagtattgaaccgtagaagtttttggtgatggggacgtctttggatttttccctcttcactgtgaacagttttggagttttggtctttggttttaatgagcgtattttaggtttgttgaaaattttgttgactggtccctttatttcttccttggatagccgtctactcgcttatgtctgtcatggactgttttcaataagaaatcaattcaacatttttgcaagtgaatccacataactagctttctttcttattctaggtggctgttctttgcaaaggagaatcgacattatattatttctatacgtagaagtgattataaatccgaggaagaaaacatactagtaggttttactgaaaatatccatgctttttgattgtttgagaaaatctcatgtggttttttaagaggttctgaacatcatacattcgcagtttttttatgtagcagaaacctttattacctcatgaagaaatctctacaatggtcagaatttcaaatacattttctatttagcatctagatttccatcatctatgtgaagcaggtcaacgcctcaacggggaatcacaatgaccattggttggtccattggttgatgatgaaacctttcaggtttcctgtgagctttcggagaagaccctgctcaagtctccccacaacagactagcattgtagtcaacggggatcccaactcttagaaaagctccggtaagccattacacaagatcattttagtgcacccatagacccactctctccttgctggcatcgacgggcgcagaagaactgattcgatctatatttgcaacatgagcggggaagtcgaattaggacagccgttgcgggtaattaccttgacctctcttttaagttccattcttgttgctccagtaaggaatgcctaggctacggacaatttagagactagatttcctataacaatggatattgctaatcagtatgttgtgaggtacaatttccattacagcatatcaatttcaccatgtaaatgccatgttttttctttgacttcccctgttgtgcttaatttggtggggaataagactgagccgttgtatgtaaggattatgaatccctaattgttggcatctcctgtcgatttcttgcactgtccgcagttgcgcatcgtctcaactcgctagtctaatgccttgctgaagttggttgaagacttgaatggattgccctttgttgatgtgctgactttccatgcattcccgtactgtttgcagcccccagattctgtaccaagtacaggaagagacgaggaagaagggtcgtcgcaccatggaaatggctcaggcgcagccagagagaacccagagaacccattgccggacctggcgctggcgaaatccgagtcagaccggataaaagccttttaccagacggtcctctcggccattgtcgtgttcatcgtggcggcgctgtcaggatacaaggacatgaagccgctctactcgaccacaaatcacaagaaagttcacctcagcaacctccttgtcatcgaggggttctgcatgattgctaccttcatatgcgcggctgttttgatgatgtacgagttctacacgtaccaccatgagatcgcccgcgaggtcgtcgcaggtgcagggacctcaccgtcctcatcgcggtcgccggagcgatgctggttgcgacggacacgatcctcgtcgtcatcgccaacagggacaacgcggtgttcgccgttcttttcgtgccggtgctgctgttagtcggcatggctgtgtacaccggagcatcgatggaggagcagccgccgaactcgccgcacgacggcgggtacgatgaggcaaccaaaagcacctttgatctggccaccgttagtacaatggctgcattgggtttgcaggggaccatcgtcttcggctacctgaaaacgcccgagaagaagagcgaacatgatgaccctccactggacctcgccgtctgctacatcgcctcgacggtctgcctgaccgtcatggcggtttgcgccatccgctggctcttctccccgaagaaaagcggaaggctctggtcggaatcatcggcagcctcaggcacgtcctgctcgcctctctggcgctgatggcggtggttgtctccgtcgagttcttggacggcttcgtcgtgctctccgtctggccggaggccgtcgcgctggtgctgtactacgcggcacagctctgctcggggcggcagcccgggggaggagtcgggagccggccatggatcgaatttgtcttccggattgtcgccaccgccgggttcacgctcatggccgggctgtacgcggcgttcctcgggaccaaccactacagcgtgtacctcaaggccgccatgctcgtgctcctgatggcagttctctcgagcctcagccgtctggcgaacccggtttacatgcccgagatcgacggagctctccttgagttctgcgtcgccggcgtggcgctcgccttccccgccgtgtcgcttctggttgcttgtcccttggtgcttaaggtcttcgttgacctatatattcatcatagttctctttgaaccaaggaggtgggtggaaccatggtactccctccagcccataatataaaggattttgagtttttgtttgaactgtttgaccgctcgtcttattcaaaaaattttagatttattatttattttttgtgacttactttattatccagagtattttaagcacaatttttcgggttttatatttacataaattttttaaataagatgagtggtcaaagagtgcaataaaaaactcaaaatcattatattatgggacggagggattaggttactaggtttggtgaggccgtgaggtttcccatctgcttgctgttcggacatagagcaaggataacattagcaagacatactccctccgtctcaaaatataataacttttagctctccggatttgtcccaaaatataacaacttttctagcaatattctcttcccactcaatcacaacccttcaccattcacttttcccacctatcttcactactcattcaatcacaaccctccaccattcacttctatctacttttttaataaccgtgtctaactctaaaatttcttatattctgggatggaggaagcaactaaaaatgtagagcgttgttctcatgtaataacaatctacatttgctccgtgatacatacattttaaatctattaacttattaaaggaacagaaaaaggagcatccatgttcgctctcacggcctagaaattatcatattaattgaagaaatagaaaaacagagtccatgtagaaatacaatttttaaatagttgaaattcggaattaaaaaataaggaatattgaaagaggagactagactccatatagaaatacaatttataaataactgaaattcggaattaaaaaataaagaatattagaagaagggtatagagtccatatagaaatacaattaagaaataatagaaatttggaattaaaaataagaaatacttatagaaatacaattaaaaaataatataaattcggaattaaaaataaggaatattagaaatagagtatagagtccatataggaatttaaaactaactaaaattcgaaataaacataataaaattaaaagtagagaatccatataagaataccatttagatgtaactgtaattcgaaattaaaaattaaagaatattgaaagatgagtttagagtccacatagaaatacaattagaaataataaaaattcagaattaaaaataaataatataggaagaagagcctagagtctatatagtaatacaatttacaaacaatgaaatttccgaattaaaaataagaaatattggaagacgagtctagaatccatataggaatacaatttagaaataactaaaatttgatattaaaaataattaataactatcacgtatatacaatacggtatgaatattacacaatggtagtttggtaaagttagtaaaaaatttaaaattatgtcatcattttaatatattttaataataaattgagaaaacatatatgctattatataatagaaaatataatcatgccagccgcgtaatctatgtgggccaccatgctagttcatgcatagtaagaaaaagagggttggctgacctcagggtgtccgtgtcgctcccaccctagggcgacactgacagggggcgacatggacggcgaccaaagatccgccgccacccatccttcctcctccttcggccttgcagccgcccgaaaggccaccggcaaagccgactggctccaaggactacgacgacggggcttcgtatttcccccgagggtgccattctggcaggtggttctgaggcgacccaagtggaagaggtggtgccgtcgcccagatccatgctctcctcggccggatccggtgaggagcagtgacacgatttggagcagcggcagaggtggccgctcatgctgctggatccggcgacaatagtttgcgtgggtcgacgcgatggtggagggtgctggcggcggggaagagggagcgaagtggaggcggctcctttggccgggtcaggagaggagccatggcagggaagagggtgtggaggcgacaagcccggatatcggcatgaaggggcacgactggcggtgggaggctggcgaggtgcatggagaacgtgacacaaaggctcatggctggcaagcgcgacgtggaagcgacgaggtcggcgtggaggaggcgatgaggtcggcatggaggctggagtggtgtggagcgtgctaaggtgggagcaccgcaaggctgggacagtgtggcggcgaggcttccacggtgggaggacgaaggcgacggcggtgcgaccaggcggcccgttgaagagacacgggtagcttggttgaggcggtgacgatggtagcaccatgaggtaggcgttgaatgctgttacgagctcctttccaggcgtcagtcttgttgtggcgatggctagccacattggacgggctagtgggaggagagaggatccatttttctctctcaccctctccctctataacccacccacaaggatggatctggagcacgccggaggttgagatgctactttgatggccaaccggcggcgaggcatcggcgcggtggcaagttgaaagggattagctggtggtgactgttgaatttgacagatacttaatcaatcgttagatttgttttggacgaccgatatgtacaaccccccccccccccccccgcggggggtcccgcgcggcacagcgcccgcttctctggtctccgagtcttttacccctatgccgttaaaaagttgctgcttatctgtgtgccacaaaaaagtttagagtcacatgtatgccatgagcccaactttcgttgacccgtgtgccattttggatggatggagacataacgaggtgttaggggctgtgtaaagacagttttgtccttgtgtacaataacccatcggagccaccacttttcctcacccgggaaatcgccggcggcgagcccctcgtcctcctcctccggtgacccgcagcctcccgcgatgcgatccgtggcgaggctgctcgccgcgctccgtcgtgccccgccgcacccgatcctcctcctcctccccggccgtctcttctgcggcggcggcggcggagatccggcaatcccggtgctgccttccacgccgcgacgccccagcaacacatcgctaccatgccatcgccgtacaaaccgggggcgcatcgtggcacccccggagcaaacaccgccgccgccattttagccgccgccgttgcatagccgtcgtcgcccgccgctttgccgccgtctcccattgcttccaccgccgccgcacgacgccgtgccaccgcccgccgtcgtctctctctctctctctctctcttcctcccggccgcctccctcttttgcctccccggccgccgccgttccattcccggcgtcgacctccggccgctgtcaccgacaagcaccagccgccggggctcctccctctcctctgctcacgccctctctccttctccctgtgtgcaagaagaaagaagagatgaagaggaggattaaaggaggaatagagctgaaaatccttcaggggcaaattagtcattttccccacatgtcagagctatggaactgttaagttctaacagaaggtggacggaatggcacacgggtcaacgaaagtttttctcatgacatacaggtgactctaaacttttttgtggcacacatgtaagtagtaacttttttttaagttgcataggggtcttggttctccttctcctcgcgccgcctctactcactctggctcaccgcccccctggatctggttctcagaaggcagacgagagagcagacgagaggggggagagttgcggagcagcggaaaggggtcgccaatcacgaccctatcttcgatccgtacggcgacggtcatcgcgacccccgcgaattgctccgtcgcggcgtcatcccgtgaaccaggtgacactgaggtgaacttcccttctctctcttcctcccccgttgtccctctccctcccctcctgtctgccaacaacagaatcattggggttctgatccagggcattatcccgatatcaaggtgcatacctaggaaggatcatgatctaagtgggtttgttttacgcgtacttgatcagttcatatgatcgattgttattactagtagttcatgacttcacgagatcagatattctcgacatatcaactaattttataaacggcacacatattactgtattgttagggggactgctttatacatacagattattcattactttactggtctggtctagtctggtctggtctggtatatcatggtgctactgtttctgagcggggtctggtctggaaatgtgctagtacccgggactgataaattatgtcctagaacattaccagttgctgcaactgcatgaataactgccaatttgtagtgctcgtatattggcaaacaatgaacagaacgccgttaaactcgccagacaagagcgcaatacaatttgaatccatccaaaagtcagtctcacccaaactcctgggcatctcttgttagttgtttcttccattctgtttagccaagcttacttagtttctttcaattgtgcagatacatgctggtggggttgtgttgattgggtggattgcagtaaacatatcaccttagtatgtcagaaaagcaggagtccatggcaaagcttctgcctgacgatgtgcttacaatcatcctccgttgtcttgcgccacatgaccttgccatgtctcgctgtgtctgcaaactctggtgcaccatcatcgacactcatcgcatgctgcgtgtggacctcctcccacactcagtaggcggcatattcatcaactttcatgatctaggcttgtcagaattcttcgcccgcccctcgacaggccccacaatatctggcaacatcaactatttgcctctcacatccatagttaggggccactgcaatgggctcctcttgctttacagccatatcagtcgtcccggcatgaagcagttttatgtggttaacccggctacaagacagtgggtgcaattgcctccacctccaaggcctgatattgggatcatgcacttagacaatttgtaccttgcctttgaccccaccttgtcgtcacactttgaggtatttcaaatcccctatgttgatgtcttccgccatcgctctgagttgaatcctgcaatagagggaatagaatggccaccgtcaacatgcgttctgcatgttttctcaacaaggacaaggcaatgggaggagagatcatttgttcgagaaggggaggctgcaggatctttggctatcatacgacgagattttccaaattttctgcacaatgctgtctactgtcggggagtactttatgtacgctgtcaaaccaactttgtaatgaggtagtctcactgataagtattataatttatttctttattaacaaatagtatcactcaattttatcatgttttaatatttctaagttttccaatatttgcagaatatctttgtcagatggcaagtatcgaataattaaaccaccagtagagattgaacggtacgaggagtcaaatatttatatgggactatcacagaagagggtgtactgtacattctttgatgatccagacataatttatattcttgatgaatcgtacggaaaaatggagtgggtgcagaagaacgctattagctgtctggtcatacatgcatttcagcaaactgatgggccctggaccttacaagatataactatcatgaatatcctgatgcgtacggacatgacaacagtgaggcaatagaggaacaaaactttgattgggactctgacaatgataattttatcaacactacagacgaaagaaatttgcgctacggtagaattacttttctaggatttcacccttacaaggaagttgttttctcaagtcactcattgagccgaggactggcataccacttaaataccatgaagtttagaggctttggcaagattcaagacttgggcaatcttggcccaaaatattatggaggatgtatgggtatccaaccattcattgaagagtcttttctgtgcacaccttggatgggagagttcccaaaggacattaattaagatctcatcttgaagattactacacaatgaatatggcatattgccttactgtcattcaggacaagtatctcaagccatgaagtatcttttgatagcttgtatcgctgagcttctcgagttcttgtaatttatctgctgtcggaatattatgcaagttaagagtccattaattgacactgaacaaacatcaacactcagtaaggagtcattagatggtactaattacagagcacggtgcatggtgttacgatttgcaagagcttttgctgtgtgcaatgctatatgctttctgtaatgcaatgccagatgttccaaaccagttatgtttattttatgtgtgttactcccctgtcctaaaggagattaccctctacattaatgttaagtactgcaaatctagatggactggtaatatttgtctctctctctctctatgtgtgtgtgtgtgtgtgtgataggccatatactgtggagcggcatgcttgtggcagatgaatagctaatagagtaatctgtgtgaaaagttccaacctttgacattatatgaagaaggttttgtataactgtaagttgtccgcacgttataaaccatacttaatcccctccaatcaaaggcgattgaggggaatactagttcaatttctcccccgattcgaggtgattattttgccaaacaaccccttgaaaatggcttgagagcgaagggccttgtgacaattgaggattttgtataactaaagtcgtccacattttacgaacagacaatgtttgactttttgagagcaaaatgatccttttatcccttcgtcagtttaactggaaatggttcgccgcgtgtccatgttctcggctctccccaaggaaaggctgtcactgcagaacagagtgtataatagccggccccatacggggcatttttggacgattgcttcacattgactctagtaagggtgtgaggtgagtcattagcacatgattaattaagtattaattattttaaacttcaaaaatggattaatatgattttttaaagcaacttttctatagaaattttttttgcaaaaaacacaccatttagtagttcgggaagcgtacgcgtgaaaaacaaaactatctttctctctttctgctgcgctcaaacgcagcctaaatatagtttgttaatatagaaacgaagattacttacttatctaagcagcgtaggctgattataaactgtatggcttattaggaaaaataataatttgtgagtaactttcatatatatatgttcttaatgattaatggtaatgctgaaaacacttagattaaaaatacatcaacgtcaagttctaaatttaaattcgatgaaaatatatcaaaattaagttttaaaaatttaaatttagtgctgattgcggaccttgtcgattgtttggagtttcaactttcacggaaacacaacgaagaggctagcaggaaggggaagccatcaggcaatagaaattttgtactccatttcaggttataaaatattttaacttggatcaaagtcaaactgttttaaatttaactaagtttacagacaaatataataatatttataatactaaattagtttcatcaaatcaataattaaatatattttcataataaatttgtctttggttaaaaatattacttttttttacaaacttggttaaacttaaaacagtttaactttaaccaaagtcaaaacgtcttataacctgaaacggaggtagacggaggtagtagtacttaagaggtacgaataggtaccaattttttttattgcaaatttggtatatcctattattgaggtaataaattttatataaaaaatactctaaaaatactccctcagtcccgtaatataagggattttaagctttttacttgcattgtttaaccactcatcttattcaaaaaattttagaattattatttattttttacttactttattattcaaagtattttaagtacaacttttcgtttttttatatttgcacaatttttttaataagacgagtggtcaaacagtgcaagcaaaaactcaaaattccttatattaatattatgggacggaggggacgggaggagtatgatacaatacactgtagaatcactcataaggtaaagggcctttgtcatttgctaattgcttgcagatgttccaaaaactactactactaacatagaagcaaacttaaattgcggctgcttgttttatcctgtggtgaaaattagctccgtttgaataactgaaggcgtatgctactctaaaaagactaaaaatgaatctgcaccatcctcccattgcagggcagagctagaacgagatgaggggtgccacctatttaattgagtaaattacacgagcgatccttaaacttgtaacgaacttttacttaggtccacgaacttgcaaaacatgcatcaagatccttaaacttagtttaatgtatcatcacggtccaaactctgatttgaccatggtcttacctatatggtatgccacgtggacgatgacatggctaaattttctttttccctttctttcttcccatcttttctctccttcctcacctcgcgtggagaaaaatgcagcagaagagagaggaaggaggcaaagtggagaaaaaaaagagataagaagggagaaaaaaagaaggaagaagggagaaaaaaataaaaaaatttcatatcatcgtctacggagcatgccacataggcaaaaccacggtcaaacaaggctttggaccgggatgatacattaaaccaagtttaaggatcttgatacgcgttttgcaagttcgtggacctaagtgaaacttcgttacaagtttaaggaccactggtgtaatttactctgctttatatcaagtttaagctaatacaggtgtttaaatttgtattgagggggtgcacatcagtggtggatttaggccatttctgcggggtcggctaaccccacaactttttaaaaatgtcctataaatctcaatttttatgtataaatccaaaagaatttagagaaatgaccccacttaaatacaaaccactagtaattgaccccacaggtttaaattcctggctccgccactgatgcacatatgataaaattaggttaggtatagctacaaacttttcttgaacggattcctggccacccccctcagtactcctgcctctgtccccatggcatgttacacctaaagacactattaatatcatatctaccttcgacatttttcactctcgcactctccatgatgcatttttttatccgtatttttcaattttataacggtgtaatgataatattgattcctagtagtttatattactgatcaagctttaacgtatagactatgaaaaaggaaaagttaacacacgacaacgacccattgagaacttttaaaacgaaattgccaagaagattagtggcaattgtttttctatgttgactagagtccagagagagtttagtcgtcccctgcatttccccatctcctcctctgagcaactatatcgagtttcgactaccatctcagcttcggtctcgtattctcgtggatcatcggaaagatgatctctacggaagaggactctgattcttttcaggtaaagagaagagatctcttttatcttgcttcgtgcttgttttgtttgtagctttgtaccaatcttttcgtccaatttcatggatctagaccaaaattttcgtgttcctaattagtttcttttcatgattgttttatgatgcaaatctaactgccatgtcaattgttttatcgttagtaaatttcttattgttcgcgtccgtgcttttgaagctaacagcatgatttttttttcgaacgcagctaacagcatgatttggctagtcctttaaaacatgtgtataaaaatcatatgtacatatattttgaacaaagtcacctcttgttaagagagattctaatgatataaattattttaagttatttgcttattagactctgccgagatgctgaagtaacttgcataaagccgataagtagagaaaggagtacagaaaaaaaaatcaagatctaaactctgttagcatggatcatggacctgtttgaaatactgtacagacaactctgacaaaattagttaaccagtagtacagctttcttttcttaggaaaacaactttcttttcagagagtttcatgtcttgttaccaatttctgtttgattccatctctgacatatattcagtgtgttgggacttcgagaccacagcaaaatactacttgggcagctttctaatagtactagatttagctaataagagaccatttgtggatctaatcgccttctgaaggcgattagctagttttactcgggagataaaacatggaaataactgagaaacataaagcctccgccggccattcccgttaaccatttccgctctttcttcttaatctgcctgtgggcaggcacgatgtggtgttcagacatcttcaacgacttcttcgtcggtgtatcgatgatgctttcttatgggtttagcatttaaagtgctaagatagaattgtcctcatagcctggaaaaatattctattgttctctcccggccccaaaactctgctaatctgttatggcaaagctgttggtttatgcctgaactctgatagcctgtaacccgttactcacttttcaatggaaaattcaggtggagaaactcttaccctcgagtgatttactcccaaaaaaaaatggaaataactagtgataattttttttaacccttcccaggatgacagcgaggaactgcaaatgcaggtgacaaagaagacgttgaagcgtgtcatatcactagccgaaaccttcatcgccatagcaaccggcatcctcgcggcagctttctcggcaggcaaagatgtccacctgcaccgccacgtcctggccgccggcggctgcttcctcgtcgtgacatacctgtccgctctcctgctcatctacatgaagctgttcttgtcagatcacaggcggctgcgccgatggcacgtccggtccctgcagctcctgtgcgtgaccagcggcgcgtcgctcgtcgccacgaactccctgctcctcgtcctcatcggcgaaggcaatggcttgctgtcgctcaacctgctgcccgtgcagggcatcgtcggcgtgctcgcgtaccacgcgacgccgacggaggggagcgcgcgcgacgaggcgttcgaggcgcaggtcaagagcgcccgcaaggtcgcgctgttcgcggcggccacggccttcgccgtgcagaccacgctcgtgtttggcgcgttcagcaacgccgccctgcaggcgatgggcggacgccggctggacctctcggtgtcgttcctggcgtcggcgctcagcgtgttcttggtcgtggcgacgtgcatgccgctcgggttcaggaaccagggcgccagggacaaggtgctgtccatcgtgaggtacctcaagaaaggcgtcatggccgtgctcgcggtcaccgcggtgactctcggccaggagttcctcggtggcgccgcggcgctcgcgctcttcccggagatcaccgtcgccgccatgtactacgccgtgagcatgcccgccgacgaggcggccgcggccgctgaccgcaagatggaggtgcttccgaccgtcgtcgtggcgacgttcggcttcgggatgctcggggcggcgtacgcggcgctgttcggcacgccggagtacgacctgtacaccaaggccctggcgttcaccctgctcaccgccgtcgtgtccagcctgggccgcgtggcggggccgctctgcaacgcccagcgtgacaagagctcggcggcgtgggtgacattcctcagcagcatcctccccatcgtggagatgctggtcgccgtcccgctcgccgccaaggtaatggttgattttctcgccgttcctggtaatggctgattttctcgccgtgcactcactagcacttgatgtcttgatcacttgtacaaattcttcgaacacgatacgtgcatactctgacacgcaccatgttgttgttgtactttactgactttgtacaatgtcatgtacttatagtagtggacctctcttggacaccctgaagagcacatattttttgtgtgattttgtctgaaatagtactgctaggagtagtatttgccgcagcagcattgcggagttgccaacgcctcgaaggtattcatgggcttattagattgatgggctgttttgtacagacaatcacggccccggttggctgtcagcctataactccatcagattgtgtggttttggtttaaaagaagagcaattttacaattcgaggtaccatgaggtaccatttttttattgtaaatttgatatctcttgatacctaggtactgtgaggtatcatgagtgaccaatttttacactaaatttttagtacctcatggtacctcctcaagtaccgtagaattactctcagaaggactcattttgatcggttgcaaacacgtagtctcgcagttaaaaaaaaaaccacgtagtctcgtgaaataagcctagaattgatcgagtcgagtacagttcattcagaggggaaaaataaaaggaagattacgatcgtcgattgggaccgaaattccgaacggaattgcaattgctgaggtttgttgacaggcgactgaactcaattcttgtccggtgtttccggctttccccacttccttgaggcacaactcagcccgccgtcaattccgagaacttatcaaatccatgatgaacaattgcgacgttcgctttcgagcgggcaggtccatggagtgtaacaatgagagaataaaaatcgacagtgtaaggcaggaaggcgacgcgttactgtgcacgatgcggacctcgaaacgctctagtacacagcacacgcaacgggccggagttgtagtgaagctcttttttttttccttaacgaacatagcgaagcttgagtatcagaacaaggcattttatacgcatggggatcacatgatgatattaaactacttgaccgacacagcgttcatccgtgaaattatcgcccaaaacgcaatgcctcgtccagccagtagtacatcggctctgggtttcttcattatagttcagttggatcgtcggtttcatctagacaagtatccgaagtaataatctgtcgcatcggtcaatgactatctgctactggctgatgcagggagcagagcatactctgctctcgcaacgtaccgattgacgtacatggcactcacagcaatgcagcatcgtgcagtggtcgatcgacatggtgaattggcgatcgggttggctcggctcggccgtgaagcaagcaagcgtacgtgagcacgacaagtgacagccaaccaccgaacacgatccgctatataagacgctgcatagtgcgcacaccttcaagctcgtacatgtacgcaccgcgacactgcgagtcctgcaagaagccaagccaagcacacgagcgcagcagcagcagcagcagcagctaagctagctagcttggagagatcatcggagatgcctcccaacgcggcggaggtggcgcggccgaagagcccgctccggggcatcctgccgcagagcccactccggatcaagcaggacggcaagttctacgagcggctcctcgccaaggagaggtcggcggcgagccgctccttccgccactactgggccgccgagcccggctcggtgccgttcgtctgggagtcgcagcctggcacgcccaaggtcgacgtgtcccggatggtcgccggcgcagtcccggccatcaccccgccgccgtcgtacctgctccggcacggcggcaaggctggcgcggcggcgccggcggcgccacgccgtcgtccgcaggggaagggcaaggcgaagacaggcggcaagacgcggtacaggttcaagcggatcaagatcggcttcctcgccggcatcttccggaggatcgccctcggccacgtgtggcggcggtcggcggcgtcggtccaggtctcgtcgttgtcaagccggtggctcttctcctcggcggccacggcgccggagaaggccgaacacctcgaccacgacacgcccgcgccaccgccaccgccaaggccgaacaccgagctgtccacccgggcgcgcgcgcgtccgagcctttggatgctgcgatttcgcggattccgaagctggagccgcgacgacggttgggcgtaggtcgctctcgacttctcgagtgtatacgtgcgtcatcatgggggattagaacgtgacaaatgaaatgtttatggttgcgagagatgttaacggttgtttgtatgcatgctgttgttgcctagcgtttcatggaaatcatcattaattacgcgttgattatgtttacggatgaaacccgacgtgttcggaacagttgatcatcttttgtcactagtttaacagggtgattaaaaggatcatacacaataatctgattagtacgcttggtattttctgtgataaattaattttattttcccatatggtctcagatatgtttggagatgtagcaaaggaaatgtttgatgtgttcgcttcggtttatcggagatgtgatcagtacggtacggttaaagattcttaattagctacaggccctagattgaaagaccaagaacggctatagagggggtgaatatagcaattcaaaattcacccttgaaaatactcatcaaaacgattttctcaaaattcttactagaatcgcagctattagaaaagccggacctagaaaagaagagagaaggaattcccgaaactagaagagagatgagaggaagatagcaaatctcatcattgcaaagttcaaatcgcaagcagaatttaaattgtagaatttaaatggacaaggcaaaaataaaatctttcaaatcatctcattcataggtgttgcaaaataaccgctcaattaggagcaaacatacaccttcatagaaacattaattcaaacttaaaaacctctcgggcaaacacactccaaactcacaccgaaactctctcaccgagcatcttaaaaggattacaaaaggagcaacctccacccttacatccatctctctatttatagcctaataccccctaagacattgtctcaaatacctcatacctctagggcgaaacccaccctggactcaatctcagccacttgcttttccttctcctcaaaggaatagctccagatcgctgccacgtagtcaatccgaactcctccacgctgcactcccttgcacgatccgcgtgctcctgctccaggccagtaacacgccgccacgtcgcgcctcagcacgcgagagcgcgcgctccaccgcgtgaatcccgcgctcatctgcacgcatccagtccgaagcctccacgcgtcccaccgagccgctcccacgcgcgctcgctaaatcgcacgtgggtcccacgcgtacggctcctgcctccgagccgtgcaaaacagcgtggaccccgtgcctgcgcgcgccgaattgcttgtcgccgcgtgtccgcgcatggtgccgatgccgtgggccgtcgtcttctcttgggcctgctcggcctggcctccctgccagccaagcactcgggcctagagctagggatgaaaacggagcggatacggatggataatgctcataccatattcgttttcatatttttttaccggatacgaaaacgaatacggatagctcgaatacggaaacaaatacggattatctcgaatacgaataagaatcgaatatgatcggacatgaatacggaaacaattttttctcagaacacgaaaaccaactcaacttctaatagaaacaaatatcaacatatataattagctcattttatataaaatgaggtataatttataaatattttttaaaatttaaataatattaatagtatggactagtgttaagagataaactactattaaaatctataaagatatattgaaggttatagagttagaaagatatggggtatgtctcatgggtcctgcggatatccgaatagcactgttcaccggatatccgaattattatccgtatccgatggaaaccctggtaccatattcgtattcatatccgggagaaaatatccgtattcgtatccatatccgaactatccgagaattatctgatccgaaaggtatccgtatccgtttttgtccagaacggacggaaactatccgcttagttttcatccctacctggagccaatcaggcgttggcttggcttccgtcccaacagagcccatgtgcaagctagctagccaatcagctagctgcacttgccatctcatgcacacgccagcgcatgcctgcatgctacagtacttagtactgtagctcctcttctattctccattttcttcgtgaacccggcacttgcacacttgaccttgtgaagcccgttgtgaagtcttcccgacacggtgttcgtccaccgtgcgtcaccttgatctcaaccttgtcacacggattcgtcgatcgttctggacctcaactccccctgagtctagtcccaatccgccgtctacccaggctgaccatcagggatcatgacgtcagtcccaccttgtcacatggcctcttgaccgtgctagacctctgctcctccctgagtatagtcccggtcctcgccattgaccgcggttgacttcgatcacctgcacacacgtaaatcaaatatccgattctgggcacagatatcgtaacctgacctacgttagtcataagcattgtcgcctaaaatcgccaacaatccaaaccaaatttcttactcaaaccaactcatggttaaatatttcgttgccaattttccatcacgaataaaccaaaatcacacttggttttacatagatcatgcatacgtcattagtccatgatacgtggttttgtcaggcttaaacgggcattatcaggttcgtgcgaacagaactaattccatcatgtaccataatccatttcgttatcttctgatggtaggtgattgctactagtagtactattttctagtactcctgctcgagatatcaatcaatagaaattaggtgcaagcctttagtgcaagactagtacatctctgaattctaatgcaccgataatagccatgcataggtgcagaccataccgtcctcttctcccaacccaaccgattgatctgacagtgctcttgcaacaaactcaaaatgttcagggtagttaacaacatgatctcctggctgtcagtatgcaggggatggtcctttttgctgacatgctctccatatgaccaaatcaacaagtataattcaagtctgcatattactagccagtaacttttgctgatggagtagtttatatgtagttatgtatagtactgatcagtattcagtactagtacagtagtaaagtttctatgatccgcctgtaagacacatcaaagagatcagaaaagagtacagattgaacaacctgctactctgctagtagtgctgcactctgctctgcaccgtcgccgacgtcgttctccagtccgctgttcactggatccaaaatgacgagtttcgctattgcattggtgcgagctgcgaactgcaacaccagacttatataaatggaaggccaacggcaaaatcactcgtgctgcgtgtaactgtgccgcctccaactgatcgtctggtagctgcccgtgggccgtggccaagtcgtgggaggccgtcgcgacgtcgccgtggggcattttcaaggtgagccgctacgcgttgaattatctagatcgatcggcacgacgcccgtacgggccaccgacggataatcggataggcaacggaagcaggatgatataatatggtatcttgaggtcagaaatatgattcctggtcagattaagttctccaagtaaggaattgaatatgtttgctcatgtatcgcaaatcagctagctggaatattatactggcatttgcttctcaactaaaggtttcaatattgaactaaatctctagattccacattttgtaaagctgtatcgatcaagaaccagatcaggtgctgatcacactagtttggtttatgggctgatcaggtgctgagttgccatcctgaaactagcctaacagtgaagtatagcatagggttataagtgtggccgcctctgtttcggcatttggttgttgagcttaattcgtgtaggtaccttgagactgtgtagaagttcaggcgaacagtacagggagggggccgtttggactgagtagggagttgcaagtctgcatgagcaatggcagcatggacacatgcatcgtccatgcgtggcggcgccgacgcccacgtacattttgtttggtggattggaacagcgacagcttcagaattacgtttcgctcaattgtacacagttcgtttcgatatatcttacactgtcaattagccggcttaaatacataattaaggaacgtgtccttcgcgtcaatgtactgagcagtgagcacgtacgcatcttgcaccttaaagtagaaccactagttagcaccttgcaccttacccccagtaaagaattacattttaatcacataaaagaaaaacaatgcttcctccgtttcacaatgtaaatcattctagcatttcccacatacatatctatctatattcattaacatcaatatatatatgggaaatattaaaatgacttacattgtgaaacggaggaagtacctactttgagaataatgtgggagaattactcggactcgaacaagactcaaccaaagactgttaagaacagaatacaggagaacctagggtataaaggcctagcaccagaaggaagatggaggaggaactgaacagaacaacaatctactcaaaccttgatgctcacaaatcccaccgcgatatccagccttcgatccatcaagagccaccggagccgagttttcatatgtccgaccaacatctcgttaaaattcctagcaagactagcacataggcttaggataggcacatatatcaataaaagtaataggcctacccaaaccaataggacgtagggttattatttcgagtaggccctaaacttgtataaaaatgccacgcgtcggactaccatacctcacacaagaaataagacacacaaacaagattcaggtcttataagtttctattgtcaggatttttatcaacaacagcttgagccacggtcaagctaggtttgcacaacataatctagcttagttagcatttgtttctccaaccaagcctagcaacttagtttgcaaaagtttaactaggtgtgctttttaaccatcgattcatctgttggcctacatcatgatgctatagctagtcataaaaaaatgtataaatcatctcctctttcctcctcatcgctccctcccgagctcagctgatgtggcagcgacggcagagttggcgctagagaagagaggagaggaggcagcggcaccaaatctagtgcagtgttggcgctcatgacttggcaggagacaagggctaccaggtgcagcctttggggaggaaatgagagacgacggagttgcattggggttcaagttcgacatggggagacccaacaagaagttggcaacccatggtgctcttcttctagaggatgaatacgtgattgtatggtggcttcttccgaaccgcgttggttggcaagaaggatgaagtagcaagcgacttttggcccgatacctatatatggccagcgtggttgggcgagacacaagtgctacaatgacgaggagctggataccagttgcattagagatagttatgtggctttgcctcttcaaattttacattttggagtgagatgcaagtccattgaagattgcctatgaatgcaattgacataatcaacctactgcagtaaaaagacactgctctattaatttgagaggcaaaataagcatcaacctatcgtcgtcctggctactatctagatctatatataaattgcacagtgaaagtttgttcgaagtataaaggtctacgaagctacttcctccatccaaaataaaaacatttctgaagttagacataggcatgaagaaagtatgtgtaaatgattaaaataaggttataattagttgagaaataaaaataagtgaggaaaataaatggagaatagttatggttggttgagatgaggggtgtagatggagaaatagttttattttgaaacaaattaaacttgagtggtagaaatatgttcattttgagactttgggcacctttgtatacatttatacgcctcaccataaaccattcatggctgggaatggtttatgaaccgatctcctgtagacgctaatgttatcagatctccgcatggatcatgaactactcgcacttataattaattttttttgcggggaattaattaattcgttcttgcccccgtcttctgtgtcaagaaatcaagatggtgaccatgacgggccctttaatttgccatgtgagcccgcgactgtgaccatctgattctgaatcaatttttgttggtctaatgccagtcgtatcccgtatccgtttgtaaatcactttcgacggaaatacaaatactactcaaaattcttcgacatttatattgcatttctagctggtatctaataggaaattagagaaaaaatcttacaaattttgaaccatcgatttaacttatgattcatacactaggccggctcctttaattaactcagacaactcgaccaactcacgtgaccctccgatagtaaagacaaagcgacgactctggttagggatttagatcaggctagggagggaggtagtgggtttagaaaagccaagtgatggaggctataggagagccgagagtggtgacatgttgatggcaccaccaaagccataaaatgaaagagggtggtggatagtaaaggtagtggggtagtcaagaaggcaatagtaggccacgagtacaaacggtacagccagtgacatccttgaggtcacatgctcgtgtgctgctagccgctactgcaagcaccaccacgacgtccctccagcatcgagctcaccagatccaggatgagcaacgatagagctaaggaggtggctacgagctcaaggaaggaggagcagtgagtgtcgccgatagtgtgggctctgaagaggacgacagtctcctcggtgaagaagccattggcgacgaagtggcggagcatgtcatcgagggaggagaagcgtgcgaaaaggtcaacctcccatgcgttggactagagtcgcggcagccaagcacaacatcataagcggcgcaacaagggacaacaacagagtcctacaccatgagcgacagcatgtcggtgcaggagatgacggcggggtaggcagtcttgacggcaccatgaatccctaataggcgccagggccaggatgaatcgactcggcatgagggccgtgacatcaccatcaaccccggccaccaaaactatggacacacctctacctccccaacctcgacagctgcggctgcaagaggaagttgatccccatcatcctgtacctccataacggtaggctcgtcattggctcggttgaggatgcgctcgagcacgagctcgccaaccgcctctacaccctggcacgcgtcctcgtgttgtccttcaattactgcctcgcgctagagcaccccatccctgcctgctacgatgacgcgtggtctacaccgcagtcgccgtttgccatcagagccacgagcgccgacccgaggtggtgggccttcgtcctcggtacaatgctgttgagaaagatggaaaagaggagtgaggagggggaagagaaagagtctctgattatgtgggtcccaccagtcatgtcagcaaataatgcttcccacaccatcaaaaaagttgattttttgcacccattttcgaagatgggagagacattatacccggttttgcggttgagggatgcgattcaatcaggaggaagaacgagggaggtaaatagacttattccttcaacccccagctcaaaattaagcggcctagcattggcacgacccagaaggccttcaacctgcactgagaaacaaaagagaagtactcatatagacaaaattaggcccagttcctatcgcaagaaacataccgaaaacatagcccaatacacatatcaagtctcaatgtgtactacctccatcccataataaattcatttttagtccctctaagttctcgcaaataagtttatttttaaataattattgtatcggagtttgtaaaagtatgaaataattacatcagaaatagataaagttgtattagaaataaataaagtgtagaataattacattgtgatttgataaggtagggtattttagtttttaaacttattttgggacagatggagtaaatgaatttgtatatatggttttgaaaacctctagaaataagaacgtgcatgtacgctcacctgaaaattttgtgcgctcacaccatgtgctacatttgtcttttctttcaagttatttattccacccatatatactggcaatactctctccgtacaaaaatataaacttattattaaataagatattttctagtacagtaaatctgaatagatactgggaaatattccatttaatattatgttgggttatttcggaagggagggagtacttgtcatcccgaaattggcagccaaactggtgagaaaatagcctggaattggacaaacattgctgtatgtctttcatccatccaaaaattacgtacgtgtgtaaagaaccattaagcactagctggcatcctgggtggcactgaaaaccgaagacgctagctgtaattttgtactccaggttgcgtagcagtaaggtagtcacacacaagagttaaaaatgcattggtccagtggttgcggcaggcttcgttttcaacagcatttcattcccttgacatgagcagaaacacccgcaggaacacgaggggagggctacagggcgccgagggccaggccaaccgatcgagtcaacctttcaacactcgccaacatttcttcccctcctgcccatttactcgctaccaattgtacaagctgcccatccccctcattactcccttgccttttaagcactctttccttccttacaattccaaactttacacttctataccctcttctctcctccggccctatctacaactctacatctcctcctcctttctttttgttcttgttgtccatctccatctcgtcatacacctcccaagcacgggagtatgcctcaatgtccacagagaggtaagtggccacctagaaatgatttcagttgaattctttaccttttgtcccctttttgtctcttggttctttttgaaattatgcttctctctttctgtttcttgatttttttctctaaagaatcggagaggttttctgttccttttgcttggaaggatagcatgtaccttttgtagttcgtggttaaaacttgaaatcttgcattgtggtttgcatctggtccctctcctgaatccatgcaagaaaccctaaaaaccttcttcggccctttccaatttccgccagggaaagactcgatgagatcggcaagaagatcaagcgagagccggacaccgccggcgtcgtagtcgccgccgtcgcaggcaccggcaccggtacagccacgccgatcgagcaccgcgtcccccatcgcctcggcctcggcggcgccgtgaacaccgtgaccccgtgcgccgcgtgcaagctcctccgccggcgctgcgcgcaggagtgccccttcgccccctacttctcgccgcacgagccccacaagttcgccgccgtccacaaggtcttcggcgccagcaacgtctccaagatgctcctggtacgataccattacaggtcaaagcattccttaaattgtacctttcgctagcttgtgcattaatggcttcgtcggtgcaatgcggtttcaggaggtcggcgaggcggagagagccgacgcggcgagcagcctggtgtacgaggcgaatctgcggctgcgcgaccccgtgtacggctgcatgggcgccatctcgatgctgcagcagcaggtgaacgcgctggaggccgagctggaagcggtcagggccgagatcttcaagcgcaggtaccggcaggccggcgccgccaccggcctcatggacgacgtccaagtccatatcaccgccggcttcgccgctcctcctcctcctccatcgatgcacgcgagggacgtggtgtcagtggcggacgccggcgggcaagggcaagagttggccggagcgccggtgatctcgtcggcgtctccgccggtgtatcctgccgggcagccatcaacaagtactactgactacagctccctcaacacaagtgagcatgctgcatactttggttgacttgcatggatttatctaacattttggtgtgatcacaattaagccggggaaaataagatctgtgtgcgagattagttatatatatgtttctctagaaatagatatagttgtggataccttgggtgaagaaaagaatttgtccaatggatgtatcaatccttaattttattgtattgtccattgtgattgggcggttgatttaattaattgagtgcgtgctaaatgatcgaattagctcaaggaagttttcttcggttccggaatgaagtagtggttgtagtaagtgaaattgaactaaaaaacacatctgcgtgtatatatgtacatatatagtccaagtgcaggttaatttcagagttagttatgcgtgtactgaataagatagatcgttttcgtcctacgtattttttcacgaattttacaatgattgatatgaatttgcgtgcaggctagaatgatctggtaccagagtacctgcagagcatgcgtgatccttgaactgattattactactagattggtgacgagacctaaaagaataggtcattcgctgatgtacacgtatatatagtgacatctccttggatattatttgcttgaatgcatcaactaattgattggttcttactattcgaaaaataagtcagcttgatacttacatagtcacgtcattgtcatttctcaacgttctagccttgttcacataatttggcaattgatcattgttctgaaataggttacactgtacaaatacatgcacagaacttatatgaaggaaacaggacaatgaaactactgtaggtcgatcatatatgcatgtccacattatataactgttactctcgcttgtgcaatgtagtatatcattcgatgtgctctgcacaatatccttttgtgtaagttcgtgtattttttttaaccagcagatcgtcgaaagatttctttttacatatccgtctcgtttaaacgaagcatttctttggtgcaaaccccctctctctctctctctctctctctctctctctctctctaagatgatgttgattggtgcattttttttaaatctggaaaagtgttttttgtcctcggatgccatctcatttctttcatgtcatctaaataattacaaaaagttttgaattttgttacaacatatattaaaacctactagatcggtccacaaatatacaagtttaaatcaacttttacaagttattaacaataataacatatataactacgaatatgtgtatatatactagttagagtttataattttgttgtttttttaacttgttgaaattgaatttgacattgcatgtttatggaatgatatatatcgtattaatatttcttgtcaatttgttttaaaacaatttgatagttatttatgtgacatgcaagggtattctcccgagggataaaaatccatctccttttagtagttttagtagttgtacgtgccatgttacactaccttttaactatttcatctaaaatttatcatttgcatataggacgcatgaatcatttgaagaaatctagtgggcgtgttttaaaatcttatgcacagtacaaagtgatagtacaaaacaaggctctgtatgggccgacatatcatttcttcacgtgctcttattttagtatttccctcaataatactatgaccctgttccgaagtctgaataccagggtattggtcatgtagaaatgataggacatttcctatgtaggccagattacttgttcttaatttgtagctcaatacttcttcagatgcatatgagttattctagttttgtattaaattaaactcatccaactcggcagagtttataaaaaaaataaaccaacatcaaatcagttttattaaatatactattaaagatatcttgatagtgcatttttttaagatattagcagaattttttactacataaactcggttaaagttaaaagaaagtttgtatagtacgtacaaaactaaaacaaacaaaaatgaggaatgcaaccttgttgcatgaaaattagtgattctttagtttttctgccctttaattgtatgccagaaagttgttgttgttttcatattttcttttgttattcctgcatatattagttgtgggttgatcggtagtctggtataacatggttcagacttccgatggacgaggaagctaccagtccatacacattacttcatgcacatactttcgagaccatttaatatcgttaatttgcctacatatattgtcctggtacgtagaaagcaatgtgggtgtgtgcaggcatatgctgaagtgatgtgagtcggctgttctatgcatagctatgccagcttctactagctaattgcattatattactaaaacccctgtaggactaggggcctttccttgacgtgcagtgtttgcagctagctcagctcgatcgtacttggttgagttccaagcaggcaaagtagacacacacccggcctcgtattaaaaactggagcaaccagcacggcctctccttccagcgtccatgtgtgcgagcgagagagagagagagacagagagagagagtcgttaatttgtttatttccaagctaaaatgggttgggttgggggagcttggcgtgtgggatgtgattgtgatggggatttggtccagcgtcgtgcttgcttgaggtggcgggcatccttgcttgcttgcttgtccgcactcaacaccaacgccgatgcttaaaagtcttcgctaacctcgaaaacccagcacgggatgcctactactcatgcatctccactgttcctgctcgtactactaccacatttgttgcactacatgttttttcatgtatacagtagagtatatggcctgttgcaacccaacacagtagttaggttgatcagtgttcaggctttcagattctggacctggaatttcagctgtgagctgaaaccggacagattacgcactgcgtgttaggtttaggtgtatgttcgcggctcactgcacatgcttcgacgactggcggtcggtcggcgccgcgacggtgcgtacaccgcaccgtttttttgtttgtataagagtgacgacggaataatgtaggagtactagcatagccgctccattgactagaggagttttgcatgccgactgcacaaatcttgaggtttagcacgtggtggtggcagcaatacgcgaccttgtcgatcgtaccactgtctggtgactgtgccggtgggagaaaaatgaccgagattgaaaaaccggactgctttttccagaccgatacataagtgatggagaccgattttttaaactaattcggtcaagcttttcgtgctacctgagttcaggtggtgtttggatcagggatttaactttagtctctgtatttagacattaatttagagtattaaatatagactacttacaaaactaattacataaataaaagctaatttgcgagacaaattttttaagcctaattaatcaataattagagaatatttattgtagcatcgcatatgctaattatggattaattaggctcaatagattcgtctcgtaaattagtccaaaattatagatgagttttattaatagtttacgtttaatattaataattagtgtctaaatattcgatgtgataaagacttaaaagttttagtcccatctaaacagggtcttattcggccataccttggttaaccaagatgactgaattgctattttatttgtcctaatatataacaacttagtattaaagtattaagtattagataacctagcattacttcattcatagtgctagatggtgtacaatctagtgtagctggttgcttctcccctgtcacaaaatataagaatttaggaccaaatgacgtattcttagtgctacaaatctagataaatacaagagtctagaataggatgatgcattcttaatactatgaatctggatgaaataagttcttgtattttgagacggagggaattctgaataagattcgtagtattaggttgtgactaatttagtatatatgttgccatattttatgatggatgaagtatattaatattggttactattatcttgtgctatttaatgggtggctaatgggcgggtgatcgctgtgggcgatcacccgcccattagccacccattaaatagcacaagataatagtaaccaatattaatatacttcatccatcataaaatatggcaacatatatactaaattagtcacaacctaatactacgaatcttattcagaattccctccgtctcaaaatacaagaacttatttcatccagattcatagtattaagaatgcatcatcctattctagactcttgtatttatctagatttgtagcactaagaata

SEQ ID NO: 5487 - DNA, 42045 bp, Oryza sativa
aaacgactccccccaagtcccaactccacttgatattcgccgtttgcgaaatttagtggtcgtctgatcagccggtcaattcttcgattctcctatgtgcaagggaagagaatactacccgcccgtagcttcaaatgtactaggctgcttgttatatgattatatccttctggatcagtcctgctgtcctggtctattatgcagaatcgcagatcgactcggagcattccaacttcttccaggtgactaatctgaacttttcacaagtctctcctgatccagaaaaccagaaacaaaagataccacaatagcattacattgcctaattgcagtctcagtttcacaccgcacaatcggtgtgaaccatctggtaattgcctcgccacggacagatggaatcgtggaaaacttgctgtaaattactagattattagtactattagttaatgattacacgagtaggccagccatttgaacacctgtaatgcagagtgtccgagtagtgaggcgatcacctaatccgagttccagttcaaagttttcgtctgattttctttttgacagttaggttttgctgcctgctgaacccaaaggaccagggtttgaaccttggacaagtttggtcgatctgtgcgtgtttatcttacatcttatcatcaaagtactaccactattttgtttgtggctgtggtcttctgttctggttcagtatctattactgctaatttacatatgtgaaacctttcatgaaaacgtggtggcagctcactggcctgcaagcacgtcaaactaccacagttgcgtactactgttgaaattctgatctccggtttttgtcgtcgtcgtattctctgacaaaaaaacaagcagcagcgttttgttttgttttctgtcagagaataagtgcagccataaatatacgtgcacagctttttgaccatccgtcttatttaaaaaatttataaaaaatatttaaaaaattagtcacacataaagtactattcaagttttatcatctaataacaataaaaatattaatcataatctttttttaaataagacaaacggttaaacgttggacatgaatagtgctaaaactacacttatttttggaacggagggagtacaggctacaggctaggggacgtctcagcatggggagttgggaatttggggttgttttctgcagatgcaaacagtcgtcaggccttttccttcggagagaatcgtcacagaaaattggtctaatttttgtgtgccattgaaaattgtttttttcctatattccattgttctaaatttgtgcactctctcatgtcactcccgtgtgttgatcgttatataatcagaatgataaatacgtcttttttatttgagagttaacggtcaacacacggtcaacagatgtgagtgtcatgagagggtgcacaaatttgaaacaatggcatataagaaaaaagtcaattttgagtggcatataaggaatcagactaattttcaatagtatataagaaattctctcttttcgattccttggttgatacaaggccacgaccgcgaaacaatcagacacaatagaatgcaaaatggatgtaagaaaaaaaatgaacttgtggtagtggttctcctataccaagtagaaacataaatgagagcaacaagacgtgtactgtatgatagaacgagagaaagtgaccctattggaatgttactggaggtctggagcacggacgaaaacgatcgtggcaatcaaagttaccttacgggaattttccaaggcataagccacagaggtagtagtaaatactactcccccgtagaaggaatgattcaacgggggtggcgagccatgaaatcagttagcgagcactcccccttctctttagttttaactatctatattagttaatatacttaacattaatgatagtaattagacaagattctgacgatttttttgggagatttttttactaatagattaaaaaaaatttaagttagatttgaaaactttcgatttaagttttaaattttaaagtcaaatttaaaaaactttcaactcagatttgaaaactttcaacccagatttaaaaactttcaactcagatttgaaaactttcaacccgagatttgaaaactttcaacttagaatcgaaactttcaactcgagaatcgagattcgaaaactttcaagtccagatttgaaaaatttgaaaactttcaatttgagattcgaaaactttcaaatcaagattcgaaaactttcaaatcgagattcgaaaactttcaaatcaagatttgaaaaaaaataaaaaattttaaatctgaacttaaaagtttttaaatcgtcaagttcaaatttgaaaattttcaactcaaaatttaaaaactttcaaactcaaaatatgctaaaagattaaaaaaataatcagaaaaaagtgtgaaaaaaaacgaaaaaatcggaaaaaaaagaaaaaaaaaaggtaagaggacgcgcgcgcgcattagcttttccgaataggggggtggctagcacgcgcgtgcgcgccaggaaagcagttggcgagcacttccccttctctttagtcttaactacttatattagttaatatacttaacactaatggtagtaattagaaaagattctgtctatttttttgggagatttttttacttacagaataaaaaaaattaagttagatttgaaaactttcgatttaagttttaaaatttaaaaactttcaactcagatttgaaaactttcaacccagatttgaaaactttcaacttaagatttgaaaactttcaactcagaatcgaaattttcaactcaagaatcgagattcaaaaactttcaagtccatatttgaaaattttgaaaactttcaatatgagatttgaaaactttcaactcaagattcgaaaactttcaaatcgagattcgaaaacttttaaatcaagatttgaaaaaaataaaaattttcaaatctgaacttaaaagtttttaaatcaagaatttaaaaactttcaaactcaaaatatgataaaagattaaaaaaataaacagaaaaaagtgtgaacaaaaacgaaaaaattggaaaaaaaaggaaaaaaaaagtcagaggacgcgcgcgccggggctgggccctctgggccgaaacgcgcgcgcattatcttttctgtgattcaacgggcaatactgacaagaaggtagtcatgtgcaggtgctgtcagtctatcagcatcgacatctatgcctgattacgagaacaacgtgctgctaatcccgggccttggtataagattctgaaaagtccatcttgatttagctttgttcgaatagtaatatttctcaaaatactctaaaaacgagctactactatgtacgagcggcacccttcgaatctcaaaaataatactatacagtacgacattacggctcatcctactcgggtttcgacgtattagcgtcatcacgccgtaacatcgatcttttgaaattgggcatagaccatcaaccaccgtcgtctgaccacgaattccacgaaacatgtgaagcacacgctctcgcttgatcatactgcaaaaacgtgaaacgatgtatatggcgtcgcggccagggcactcgcgtaagcccgagagcgatatggatcgatggtggcgagctgatagctccactgagcgcgccggagaagaactctctcgtctcgtcccgaccgcccggccgcccctgctcaccgaccggtcgtcacgcaacgcagcagccaccggcggcgaatccgtttccgggcttctttggtttagtgccctactaaagtattaaagtattggtagtgcgaaaacttaggtatgttttggcactatcaatattttggtagggtagcattttagatgaatggatttgtattgataccaattggagaccaaattttatattatagttaagaaagttctagaattatgccggcagacagcgacggcgaaagcgatccggagaaaccgctggcaaaagatactgttatcactgtaaccgtcaacgacgatgacgacgcattccccctcctccctcccggctcctgctgcccgcaggctcgcctcgcgacctcagagcaagtttaatagctaactactgtctctaaatcatctataacaaatcaaatagtccacttataaaataggtaactataaaaatatactacaccattaatacccggtctcacttgtcatacacacataacgttttggagtccgtgttgcagctgactataaatttgtagcccgctttcttctctcttcttttagaaaatgaaaatgggttatatctccggcttctctcataagacacacaatcataaatttaatagtaataaaaatgtaagataaaagtaaatcaagatgagaaataaggaggtgggataattctctcccttaatttttttcttgatatgtggttatagctgacttatagtgctattgtactgctctcgcgccgccgcttctgctccatccttccagcgaaatcccatgcgaaaaccgaagacggcaaagcgtctagctagcttgtcgcggggcagcaggtgggggaggggaagtaggagagcgtgtgaaaccaagcaccgcacgggcaggagcgcgacgacgcttgatagccaggtagctcgtgaaccaagcccaagtagggatggcaatgggtcaggtcgggtacgggtagagcaaaaccatgcccgatccaatgcctaacattgcccacccgaaccctacccactagagttagcgggcaaaattccgtgcttgtacccatgcccgacgggtacccaatagatctcgcatgaataataacttgaaagatatgtaatttaacaaagagaaataaaatcaataatttaccaaattatcggttattgacaataatttgaattacatcacaacttagtatcagttagcatcacaaatgaaccaaaagaaatggtataagaattaagaaatgagtcaaaattagctaatacatatgtatcgggtcgggcatgtgttacctacgggtaaaaaatgaaacccgccagttgcccatgacgtcttcgggtctcgggcggacgtgcccatgggtaaaaagtcacacccacgtccatgtccatcgggtcgggtatccacagatacccgaactcatggataaaattgccatccctaagcccaagattccagcgttcaggccaaaattaaacggtgggggcgcctccatccacactccagagagagtgctaactaattgcatatgcgcactgcaaaacaaagatatggtcctgagccacgcctaaaacgacagatccgtgtgtagtgatgagtgtgtgaactgtgtgtaacatgcaatggagaaaagaggaggggaaggaattgtttttttgaccttaaactaatctggcatgaaattgacgtagtaccgttttgcttgagcatgaaagaggacatgcagtgtgtactagccctactggcttttgtcttaaaaaatgcgaaacaaatttcttgttacatagattttgtagtaggggctcatacgacgaacttagcatgtatttagtttagaaacaaagtgagatgggttggactcatccctatttttaggatggaatgatcctatctatctatttggcataagggatgggatgatctacttttgaaggaatgtccacaagttagtgagagaaaaaagtaggttcgattggtccgctagttttttaagggccactaacccgtatcctaggggatatattccttgtcggggaccatcatatcccacatgtgcctaaacaaaacactgaaaaatgggttcaacccaatctaatccatcccaaccctttaaccaaacaaattcttaggctgcatttgtttgagcatttcaggtgaaacagttcgtgacttataaatttagaaaataaatttgtttttggttttttctaaacaacttctatatgatttatttccacaaaatataatattaaaagttcagggagcattgctaatgaaaaacaagaaaataccatttcaagttggcgaaaagaacttagccttggtgatattttgtagaatcactaacagaaacagaggacattaccattcaaaaagttttgtgcttttttgcgaggattaagtaattttttttagatgaaaaatccatttagagaccttgaaatgccgttccatatctttcatcccttggcataaaatttttattctacctagccatataagttaaaaccaacaacaaaacaatgttaggatccctttgatttgtaggggaaacattggagtttgggaggatttcaatcctatagggaaaaaatcctatgaaaacatttgaaacaaaagattaaatcttattttattctttaaagttcctatggaatagataatcatataaaaattttggagaaaacttagcaagaatatatctctcatccgtttcctatgttttttttccgtggtcgaattaaatgagcttttttgtgtttgtagtccattgttttatatctgcattttcctggcataatcatgtgtttttttattccttcggattttttcatacaattaaaaagggcctttactagtatagcaagtttactgtgacgaaattggagacaatatgaattctttccatgtgaaagaataaacttttacgaagtattttaatttcaaagaagaaactcaatttcttctttttgccaagatgagctccctccaaaatcgatctaccggcatgaaccatccaaaccctccagtaggattacgcaccaaacagggagcctaccccaaccacatcctagagcagccactgtacagccgtcctggctcactgttcaaccgcctcgagattcgtgcactcttcccgtgaggcgacggacgatgattgcccaatcatggcccctccctccctcgggcagctccatcaatgctcgcgtgcgtggtcctcccccggagcttattactcccgaccgaccggcgggcccggcccggcgatgtgaggcgctggaccgatccgggccgtccgatgcaccaacggacggccgagatgctgaccagtccgatcccccgcttcgtccctttcccgtttgactccacccaccttacggcccggcccaccttggaaaactggacacacacacacgcaccccctctctctcgcggatttttttttctcgtctttgaccgggctgtcagcgtcggcggtgggccccactgccaccacaatgccatatctatgaccacgcttgcttgcttgcgcttggaatttgtggatattctcccttgcttggccattctctttgactaattttaagatcaagagagccttctagttctaacaaatcttgcacatttttgcatcccacaccctctaaaaatacttttattttctctggtcgtgtttgtacttgttcctcagggactttgttctgaaatttcttctccatgagctcagggagaagaagtgaagaactcgtgctggcgtgctgcataagtttctacgggaaatcttccactattcaacatgacttgtactaaccaaatttaactctggatttgcttctgctaactctttaatatagttcagttgcaatgtatttaggttaacttctctatggctgtgtttagttcagcgcaaagtttggattttgattaaaatttaagatgatgtgactgaaaagttgtgtgtgtatgacatgttgatgtgatagaaaaggactgaagtttggatccaaactttgaatctaaacacagcctatgtttggactcccaggaagccaatccataagggcaagctgcagaattgtcatctgctagtcgtctgaatctctttcagtctcagttgttcttttcatctaagcagtctacctctacggttagttgtcataatttagcaatgcagtatgtactactagtgcagaactaaccactagacagcttgtcaagctcaataattgtccctgaagctcactcttaatcaaactgcagcgtcaaatgtcggactggcgatctcgcatcgatgattcaaagactcagaacattgaacataggaatcaccgatctttgaataaactctttcatgttcttgccatgtagcaccagtattttccctatattttagtatggcaatggccaggtcattctggagctatttctagatgaaagagctgtgtgctccaaggaaaatttcttgttcaattcaacaatgagcaaaaagccaacacagtgacttcaaaacaagagatgccacatccttttcgcagatggcgaattaatctcttgcgttccatcgtcaatacttcaaactttcttactctcttcttcgattagaacaagaattaaaaacactgaaccgcagacggcaaggcaaataaactatgatccttcattgatgttttcgtttcgtccgggatcttcagacggcaggatagcgaataagcaagcagtggcaacttgtcaaacattcgaagccatcgcggtcgcattttattcgatctttctccctctgaaaagcaaaacaagaatggtagcgagagagaaaaacaactggagaacgatatgcccttttatcatgttagaattttgcacacgcagttcgtcatccttcttttcctgtcaagttgtattggtgaacaacctcgaccacgcatgcatcaaatcaatatgagcatcagaccataatcactcgaattgccttccagtttcccaattacacttttgcttatagtgatgatcaaagctgtagaacccaggctacatggttaaagttgatttcttcccaatggacgcttccacaaaactcttcgtgcttaactttgaacagaataattttgtgggcgagaaagggttacacaataaacatttttaaaagaaaaaccataaccagtggctataattaaccgtacaagcaatgtgttacccctatcaacacacagttgcgtcatcttgacacacgcactattcagaagaaaaaggaaaacctgaaacctgtttctgaaaatactggagcactgcagctgaatgttcatgagcaaaccacctttgtcggcttgtgaaggcaaaaaaaaaaaaaacaccatttgattttcaccgctttagaaaatcaccctgtgatgggtggtaccattaccaacacactctcatgtgcatcctgccccaccctcccattaccctacctttgcaaacgcatcgttagagcaagtttattagtatagccaactgtcgacttcaaattaactatagttaattttagagccaattcatataataagttacctataaacatatactatataattaatatattggctcgaaagctagcttatactagcctgctattgtacctgctcctaaaagtagttaattactgctaattacatggattagttgggtaaaagcggggttagcggggggcggaatataaaaatgccgcctgcctcggagcccctccaccggctttgaccagtgccgcgccctctcctctctgtcgcctcgccaccaccatagctaatcctcctcctccgtttattttacttttctcccctcttcgcctctcctcgctgctgttatatccgctttcctctcctcctcctcctatcccccctctcctcctgctcctcggcctcctcccctagatgccagccgcggcctgaccctcaccgctggggagcccccctcccattcttcgcttcccccgcggttgcgctcccggagcggcgttccagcggccacaggtgcggtctctttgcttcccctctgctgctgttgttgtgtgcggtttgcttggttataggtggattttttggggttatttcatgggtggttactgatgtttttttttccgttgctgcctggatctttctcatttggattatcatctgctgctttcccaaagcgcgctgctgtttttttttgtttttttaaatatttttgtttgtgtttgcgctcttgcatttataaattttcgccgaatggcaggctaggactttggatataaggtcgggggtttgaaaaccctcgaatttcataatttcccccaccaccgtttcagaagttcgtttggattctgtgaatgctcacaatgctgtatattagtaagaggtgagataatgccgtgaaggttttggaattctgctttcacggccatggaagctgcaaccgcgggttcatttatgatcgcggagcggtgaaaatttccagtaaatgttttgggggtggtgcagtgcttggttgttggggtcaatgacttagctgcaatagattgcttatttaagttggacttttgacccggaattgttaatttggtttggtttggtgagaattcgactactagattccgtctttggatatggaagtagttgcagacgcgcgcaatttctgtgaagttgcattggaaaccaaactaaatggagtggtgtgtttgaacgtccattgttgcgtctgcggaccaatgcatcacaccacctggctcctataagccttcgtctcagcttgtctcttgatagatcagtgaactgattgtgggaatgaggcagttttagtagtttagctgtctcttcttctccagtaatggtttggaagttcagaatacattgagaggtgttgtacttaaggagagatatcatagttatttttttttttttttttttttttgctgatgcaaggttcgacgccttttgcaccttctgttgtactgcatttagctttagcagatgcaatacatgacaactttttattgttgccgacgactaactgctatattgtgatggggcagctacttttgtgctatgtgctaactcaggatcctatttgaaattctgtagcagctttccctcattgtacacatgatgggttgcttcactgtcctgagatccaagaagaagaagcctcttgctctcaccaagaaatcggttgatgcaagggaaagcacgtcctcaagactcccagagccagaagcgcatgtgccatcgttacaatctgctcctcctagttttaggaacaaggctaaaatccaccaatcggaaaagaaagcttcttacagcagagcgcgcgtgctgtctgctccttccagcctaattgtggttgatcaggatggtcttccatatgccgaattcgatgatcaagatgactccaggggcaagggaggttctataaagggccaccgtttctctaatccactgccccttcctctcccatcaccagaaggaaaatcattgaggaactttggcagcttcaaagccatcaatgcaagtggaccactcgatgcttcaggccctctgccacttcctccaaagaagtgtgatgggcttaagaatttctcctatgaggaactttcatcagcttgccaatggttttctggtgaccagtgtgtttccgaaagtttgacatcaacatcatacaaggcgtcctttagggatgattttaccgacccaaagaccattgaagcaatagtatctcggttgctctcctccactcaggtactgttctccgtaatattgaattatgtgtttcatcttctttgttttcccctggaaggaagttgtattggatgtaaagcggtagctttgccattttgctttgttggtcagcttgtcaaacagatggttggcatgttatggcttacttttatttctctcttgctagtgagtagtgacttggcaaaatgcttgtacactgtaaggattatactcttttagggctttaaccattttgcagcatttcttctattaagaagctgaccttaggctagaggcacggactggttttgtaggcatgtgatctatgctcttaatgttacagctatgctgtctccagcagaaataactctttctatttttgtgaatgcaaaccaggaccacaccattggtggggttaggtaacatgctctggactttgaaggcagaccatgtgtttgatcttctttcttcactttactcctagatgctttctccactccttcctaatcatatccagtgactagcgagattttcttttgacgtttgtttgatactttgatatatgatatctcatgctttccactttatgtggtttattggcatggttctgatcttccctcacttgtattcagtattgaaggaatctaaaaaatcactgtagtgttattgtgtagttctgggaattcagtggttcactagactttgtattgtgtgtgtgtgtctaaatctgataccccctttggtgttacctaatgttgcagcaccgtttattggaccatcctgatctattatttacaatttaactggttatggtactgatgcaacacacattttattaatatgcagagtttgaaagagtttaaaacacaagtgaataccttggcatcacttcagcatcccaacttatgtaaactaatcggctttcacgcaagagaagaatctaatgaaaggatgttggtctatgagcgactccatcatggcagcttagataaactactctttggaagatcggatggtcgtttcatggactggtcagcacgtttgaaggttgctcttggtgctgctagaggcctggctttcctacatgatgaagggccttttcaggttactgcttctaaactttttctttttgacattaccaataagtgaatatttattttacctagttatatagtacattggttgatggtttttgaccttgtggtttaaactcttattcatatgttattttttttacaggccatgtacaatgacttctcaacctcaaacatccaaattgacaaagatttcactgcaaagctatcaggatatggatgtgttggattcaataccgaggaggaaatatcaaatgcatctgtggtaagttatgttttgaaaatattttagaagatatagttatcagagcccaactcatttgcctgatctctttctgtaaattcaagtagtgtgttttggcatggttaatactctgttcgtttgtatggattctgtgttgcacgccattgatattatttagtcccaaacatcctaatattttgatgtgtttttactttacttgtttgcattatatccatagtggtcaatgccattgtttaccgtggatgctattctttgttaggctgctgcaaacctctcagtggaaaccttggagaaaggtgtactgactcccaagagcaacgtatggtgctttggagttgtcctgctggagctaataacaggaaggaagaaccttgatgtccgttcctcaaaagaagaacgcaatattgtcaagtggagtaggcctttcctcaccgatgatagtcgcctatcgttaatcatggactcccgtataaaaggacgcttccctaccaaggctgctcggattgtagcagatatcatattgagatgccttaataaagatccatcagagaggcctaccatgagggccgttgtggagtccctagcaagcgtccaggacataaaggttccatgtcgatatcctttgcaagagccatctgctgccccaagaaaggtgatgttaaaatctacaagtctcaatggcatcattcatcaccatcctgtcgtaaccttctcaccgtcacctccttcgcgaaaccaacatttgctctcgccaaggtcatccacgtctgcactgcttcctccaaggaccagctgtgctctggatgaccctagagtaagctctatcaagaaatcgccttcccctattttacggagatctggtgttgagggtttttgattgtccatatttttttttctcttctcttcacttcgatttgtttgttgtttttgctagcctagtggttttagtgtaatctcatatattgcaagacaaatggccttatgaactcccttcagtagtactaagaagggaagggtgaactgtagatagaaccaggttgtagatacttttcgttttctaattggatggaagcagcgtgttgagtgcgccttgtaaactccattatgcaataataaacgtgtgtcactcagttcttttttggggagtcaaacatttcagctatttcggttgggtgccaactgccaaagtgccaagtggtgttgttgcttgtcggcacatagattgtccaatgttctaatccacgtgatgagatcatgtcgctgaagttgcaaggatccattgatgtaatatttgctgctgcctgtggcagttagagatgttgaatgactttgaatccctgcctgtggaaagttcatcccatcgttgcagttgttgactgcgacccagcctgcttttgcttctttgaccaaagtttgtcgatcgccggtcaaacttatctcaagcttaattagagtacgtaacaaacgttttataaacatgtgttttcaattggaacgtcagtgacgtctagttatgatgatgtaatggttggtggcatgaaactctactgcaacagtgcaacagcaaaagaaaattttgttgcatcatcattttgtactcagttcacatctgcaatctgctttttttgtgtatgagtttatagtactgaaatttctttcggcgactggaataggacaatgatcttcagacaagggtagtactactctgaagcattgatgacagctccaggtatcgttatgtttcttgaatcgtcagaagaattggtgcaccggacacggtttacttcagtttcttggtcgtcagtcctcgccatggtgcccggtggcggtgggtaagctgctctctttgaccggatcgcgagctaatcagctaactgtaactatctgaatctgatgttaccgtgagcgcgcggtggcctaatccaatgtaccggcagtgaatcatatgactcgattattcaaccgaaatctgcacagtttgttttgtccttggacactgtcacttttccctctctttttgctcgccatggctgtaaaggtatctatctgggcatgccaaggtccccgtccttagattgccatgattggatcggatggatccagcctaacctgatcggatattatcgatcaggaagatcagatcaggtaatacggatgattaagattttctaacttctctatgataaagttacaaatgttaagttagagaatttgcttccgatcatgaagaaagctacagaaactaaacactggtcacaagcaactatgcgacgcggattgtcacgttgcgtcgttgatcgatcaaaaattaaaatttcggtcgtcacggcaatttaacatgtctgctgttgactcacaaatcacacggctagttacatggcgtcaggtagtggaggtagtagtcaggtagtcgagaagctgcatcctcggcggcggcgccggcgggcacggcgcggccggctcctcgccccggcggcgccctccgccccacgcgccgccgatgccgagccagcagagcagccgcttcaacgcctccagcagccaggacctccgcgccggcgcacgtcccgctcccggtttctcctcctccttggcacgtcggccggcagcgcccggcggggcttcctgcttgtcctgcggcgcgacgacggcgagacgggacgggctcggctcggagtagctccggcgcaggacggcccggtcgagctgggcctcgatggccagccgctcgtactcgtcgagcagcgtgctggggcggaacgcgccgccgccgccaccgttcaggtcgaggctgaggctgagccgccccagcctggtggcgccggcgtcttcttcctcgactatctccatggcaatgccgccgccgtctagctgtcgcgccggctccattgacattgatcagtagtgttaggcagtggtgctataacgccattgttgccgttcgaaaagttgcgagttgtgggagtttgacgtggatagtgaggcaagcatcgccgcgtcgacgagctttatgagtttcgtttattgcactcaaaacattgttcaggtctggacctgtctcttttgttgaactttcatagtatatgttgtataaatcaatcttgcagtataaattgaagttcacacgctatttcgcacactgcttgtttggcaacgcagggaagaggattgggagtttagaattgatggtgagattaaaataggattgggagtttacacgagggaattgatggtgagattaaaatgagaatttgatttttaatcccagtatcttgtttggtagaggtagtggaaattgatagagagtttagttggagattagttcattaatgaaaatgaatggctgagatttgtttaggcaaagtaaaggaggaattccgtcccaattaccaccactacccaggtattgaaaaggagggagttcctccctcaattctctatccctatcccacaaaaattctcatgtatcccaactaaacaaaacaattaatagatgggactctaccaagaccatgacgatgacattgggctacattactagtccatgagaaagcccatgtaaagtaatgcatcctttcggaccaaattatgaagtccgggcctaacaagtgttacccaaagaaatttccccaaacacaaagaaatacggccccatcgtttcacatatgtgtgaataagccaaacggtatatttacaaataaaaaataatttgtgaataaaactttttatacatgttcatgttcttaatgatctaaaagcaaagtctgaaaaataaacctcaatgaaaaaaccccaaaaccaactccaaattaagagttgaaaattcaaaatttgtttgataagtaaaagcataaacgaaaagatgaggccaaataatcccaatccaaataacgccgccatcatctaaactttggggcctcatcttttcccttatgcttatgcttatacttatcagctaaaatttaaattttcaactttaaatttagaactgatttaatggttttttcatcgaagtttatttttcagccttacttttagatcactaagaacacatatacaaaattttattcataaattatttttcgtttgcaaatacgtcctttcatttattccggggcttttctctcccaatttccccgccgcccgaatcggccgatcggcaaggagttgagcgattctctacgcccccaacgattttctctcccccaaatcgatggcttctcgcaagtcgctacgacgatcggcgctgctccaactcccttgcggctgcttcgcggagacgagggttgtgctcgatgagaagacggagcacctccagctccctcccacgaggttggtccggatcacgtttttcgcagtctcgattggattcggcttgtctctgtcactagggtttaagggaagctttagggttttgatttttagtttcgatctcttcaggaaactgtattccgaaatacggcggagggcatggggaggagtggaggacacggctctccgccgccgtggcggccgtcgtccgcctatgcagctgaggcctgagggagatccccggctctgacatatcggtgcaggtgcgcgacaagccgcggggaagagttgttcgcctgatcgcctacggctaaccagaacgacggtaattgttcggaaaatcctaattgtctatgcaattgcttagttttgagtcgaatttgttaaggattgtgatgcagtcatagtatcagttatctgactctgttaccaaaattgccccggtttttaatttgtttttgctatacatttatcacacgcctgatttttttttctttcatatatactgatgctggccacactatgtattgaaaagaacagtggtccagaggtttatattttatagggagcgacaaatatattgactgataatctggatttatgctggtaacgaattggtttcatgagtctggaaaggtttgttttgctgttgagctacagttggatgagctttttttttccttccgtgcagaactaggtgccatgatgaaaattcggtttatgccaacttattatctaacataggcttcaacacaggactagaagtttgcaaggctgtaagaaggcatgcaaattagatcttactgagtttttttttcctgtcatttattcccttcttggagtgatgatgagaattttatcatgcccataaatctactcaagcaccatcattccatctatttcctcggtgtcttgtactcttgttacacacaagagctatactgtgagtttagcttatggaggtgcattgaagtcagactttgccatctgtggtatctggtttttgaaaatcaaatgtaagcttgaataaaatgatagtaccatggacaataggacctgtgttcgtaaaaaaaatgcacaataggattttgtcatatattggtgttagagggctatatctttcaaacagaacacgcaaccgaaattcactagtttgttcaatttgttaatccttttttgtgggtttgggcttgggctgtgaagcatgatccgattccaatgtctctgatcactgaatccaatatatgcatcacacatctttgttttcgtcatggttttgatgggaaatgtgcaagcctgtttcagtttttagagaagggatgatgcggtagtccaatatgcagctagagatgggagctcatgaccatatcgatggactgctaagatggcttggagggcataccggaacaggacaatatgtggtgataacagtgtgctgatcatcagacgtaacctgcccagggttttttagcaaatattctttctacatcgaactggctattactacatttcattttaggttggccagtcctacaattcactccagaattctgtacctatgtccaacaaggtctcttgcgaaatcctttaacattgatggtattataccagtcattatagcattgagctcattattgttatagttggtgttatatacatgttccccgagtcctatgtgctagataaggcttgagtctgcacatgatactgtcacttgagacttgagaggtgccgccctgctggccctcccactctataggtcaccacaggtccacatattccttttccctttttcttcctttatgtccttttcccctttgcatgattcctctcctcttgcttttggcctttttgttcacttaatgatataagcttgttagcatgacaaagatttatgcgatgccaaggttatttttaccttcaccaccttatgtccttgctttttgcacaagtcacaattttttttgatgcattatatgtatgtactcctaatattttctgagagagactttcacactttttgtcaaattttctgttttctgttgaatatttaagaactaagaactatttattgtcgctgagttctttcgtgtactattttgaagttttcctgtttgcattttcctagccatgctgccatttggaacactgtattaggcatgatcattgcgtgggtcggggacaaacaacaactgtaccgcaataatattttgggcatcaatttctccaggacgagctatatgcataatgcatctctgttgttatatttcccatgggcattttcgcatcgtcagtggtactgttgttgtgtcatttatggacaacttgagcatgcagagaatttgagagatgatttgattacgggcatatgatcccctttgtattgcatatagtgggtagtcttcttgttgttagcatgttcttctccagttaaagaaaagtgagttgtacggttatcaatgctctacatgctcatatggttgcctggcttgtagttcctgcattggcctgcttggtgttgattcacgacagcgaaaaatactccctagtccctacattagttcttcacagtgtgacttggaaaggtgataggatgtactccctccgtttcatattgtaagactttctagcatttcccatattcatatagatgctaatgaatctagacacatatatatacctagattcattaacatctatatgaatgtgggcaacgctagaaagtcttacattgtgaaacggagggagtatcaaacatttcagacgtttctgttacatgttttctgcaggacaagtacgagacctcttggcagaggcttggttaaaattcttgctttgctgaaggaagaagatgccaatggtccaacctgtgactgtcacgatgacaaaacgcattgccaggtggacttatactgtgatttgcttttattccttatctaatcatggtaacattggcaggaatggataatttttctatctaagctaccagaaatcattgtgttctacttttgtgtgtcatgtggaggaactttggggcaggtaaaccatgtgaccagaaagggaattcaacacttagttctagtggtaggaatgcagtcatatgttgatatttgccctggaactggaagcaaaatcataattaaatattttctgaggaacatcagatctttttttatttaattcatcctgattccttttctttgcagaactgccttcagatatatgcaattatccatatactttttgtttctattgcttctgctctcttctgcttactctctcttatactgtatagaaacatatactagctgaattccgcaacacaatacctttattttgtagcaaagcgcaaccttttcagagctttgcatagctgtggttgaattctttgtgaaaagaaagcaaaagatgataactgttccctttagaaacacatttcctgaaacatttgttgactgggtctaccacattcgagcagacgctatcagttcaatcaacaaactgcccaaacatatttgtatacaacatctcatatcctcacagaaagcagctacagtgagtgatctgtaaagtcaattggtagaaaatctgctgggtggcattaagaataacattcattgtttatgcaagggtgcagattatactaatgcaaaatatgattgtttggagcaaagctacaggcatctgcatgtggacgtggatctcagaaggtaacttgtgcagaaagactaattgagattgcattatgaaagacagcagtaacactagcagcctgtgggggacaccatcagcaagacagcaaaagcctgcatgattcatttcttcccccaccacaaagcattgaggtttgctctcctgcctcacttattaaatctcacttttccgcttaaactgttatagcgcagcaccctcgtcgctgtgtctgggatccacggcagtaaaataacattggcacatgcttactatacactggctgtctgttaattaagtgtcattggcttaagcaacactgcatttagaaaatgtttactactgggaattcacaatgacagtgacgtgaatgagctgacaaggaatctggggtggtctgatctcacttgcgtatttttaaaccgcgattaaaaaaagtcaatttgattggatctttaggttttgtacattctctcgcctaactctatctgtccttttatctttaacttccctcttattgttcacaatgtaatcttgtactgaatatacaaaatagtagagctggctctacatttttccgtaaaaaagagaagaaaaactttaggtgcttaatgaggtagataacgagccaaaccttggtaattaaccttaatgagttataaaagtcaggctcggcttgactcttgaaatggctcgttagaacatgtacaataacaaactataaatcagctataagcacatgtgaatagtgagtagagaaaagagaagcggacaatagtttgtagccagctgcagcacggactttaagatgatatgtgtatgataggtaagacgctgtgtgtatgataggtatgaccaaatattaatgatgtactgtatatttgtagttgattattatataaattagctattagattgactatgtatgatttggagctagtagttggctatactattaaacttgctcttaagatatattctatttaacgagcttcatcttatttatatcacctttataatatcaaaacattctatcacatattaatataataacaaacgctaactaataaagagttcatcaaatataaagagactagtcactacttcctccgtttcacattgtaagactttctagcattgcttacattcatatagatgctaatgaatctaaacattatctaaacattatatatatatatgagcaatgctagaaaatcttacattatgaaatggagggagtactatagatgagaaagaagtcttattctaagtttgttttaagtcggaacattttaatctgtgatcattaattcttataaattcatatagtttatcattataggttttatattttcaatccatcatgaaacatactttcctactaacatataattaacattgttgtcaaacctcacatattgtaaataaaatctatagtaaaaaaatagttatgtttaacttaggataaacttagaacaacaaactaattcaaaacagagtagagtagagtgctagagagctaaaaacttataagctcggtttgactcattatgactataaggctcagttcctttgtctgggttcccaacccctccttctcgttttccgcgcgtacgcttttgaaactgctaaacggtgtgtgtttttgcaaaaagtttatatacaaaagttgtttaaaaaaatcatattgtttcatttttgaaaaaaaatagctaatacttattaatcacacgttaatgaactgctctgtttttcgtgccgagggaaccgttcccaaccactagtgttgaacacagccttaagtcagagttgatccaacccatataagtttggagttttttttaaccccagtgattgctacttcctccgtcgcaccatataattattcttaagatagccacgagtattaagaaaatatgtgtaaatgattagagaaagattatgattggttgaaaagagaaagtatgtgaaaaattaattaaaaataattataattgcttaagaagaggtgatatatgaagaaatgattttattttagaacaatacactgcacattttactttgtagtactacgaacaagtttaatagtatagtcaactactagctcaaaatcatatataatcaatttaatagctaattcatataatagttacctataaacatatactacactattaatatatggttccacctgtcatacacaaattgtgtattagagttccgtgttacagctgggcgctggctacaaatctgtagcacactgctattttctctcattttttttcttgatatgtaggccgagtttagatccaaattttttcttcaaacttccaacttttccatcacatcaaaattttcatacacacacaaatttccaacttttccatcacatcgtttcaatttcaaccaaacttctaattttaatgtgaactaaacacacacgtatttagttgtttatagttctattattgtacgtgctctactagcaaaaactgtataggattctactttaccagcattgtcctcggtgcctcctgactcctgagcaagcaaggcggtaaattttaaattttcaaataagttgcactgaacaatgctcaccaaccggaccgtgagggtgtcccagttgctgtgctgcggcgctactcttgccctggttgctccggatcgcaataagttcccccataaatgctgccattcggagtggccgctgtaaatgaaggttgttgcgacgcattgaatacaagcaaccttcagacactgcagacagccgtaggccaggaaccaggagcttttaaaacctctgaccctcttttcctttgtggtgaatttccagagggtttggaaaattgggggtataaaacaaactccgttttgttacactagaacgaaacttctaaaaaattgtgctctactcctactcatcaaaatacttctactagtaagctcaactcctttaaaattcctgcaaaattcctcgaaactaaataggccctaattaaagaggaagatatatacttactatatcatatcatatcttcaatagcgaagccaatgatgtcgtttagtttaaggaaacaaatagcatttttggacgattaactagtttctgtgaacgtcaaaggtagtaattcattgtggagtaatcaacaacagagcctgaagtcgtcctgcagccccgccaccgcataatgctataggaatacgtaacggtgacagtgatatcggaggcgatataaattgtgggactccatgcttatcaaacgatgtttggaggaaaatgttgcaagtccataatggtaacctatttaattccatttcaacaaatgaagctgtggaagataatttatcttcgaacaagcaattaaaattcacttaatatcaatcatatgtaagattaattatatagtttccacctatgaatacccaaaaaaaggagtcgacaacatgagctaagccaagattaaagctgtaccaccattttttctctgcaagataaaaccatagaaatccagaaagccaagagaaatcattttgtcgattcctatttgttctactcgtagcacattaatagcagcacaaggccccccatctcctctcctctgtgcttccctcactgcgccaccactccaccacctccacctcctctccaaaaacttgccttgccgccgcaaatggacaaggcgccgctgtgatccctcctccccattgcgttctcccgcttcctcctcctccgcgcgcgagatggccgccgcctcgccgctcgcgcggctcctcgcggcgctgctcgccgtggcggccgcggcgacggccgccaccgcgctcaccgacgacgtgctcgcgctggtggtcttcaagacgggggtcgccgacccgatgggcaggctcgccgcgtggacggaggacgacgaccgcccttgctcctggcccggggtcgggtgcgacgcgcgggcggggcgggtgacgtcgctgtccctcccgggggcgtcgctctccggccgcctcccgcgcgcgctgctccgcctcgacgcgctcgcctccctctccctgccgcggaacaacctctccggcccggtgctcccgggcctcctcgccgcgctcccccgcctccgctccctcgacctctcctccaaccgcctcgccgcccccgtccccgccgagctcttcgcgcaatgccgctccatccgcgcgctctccctcgcgcgcaacgagctctccggctacatcccgcccgccgtcacgtcgtgcgcgtcgctcgtgtccctcaacctctcctccaaccgcctcgctggccccatccctgatggcctctggtcgttgccttcgctccggtcgcttgacctctcgggcaacgagctctccgggagtgtccccggaggcttccccgggagcagctcgttgcgggcggtggacttgagccggaaccttctcgccggggagataccggcggacgtcggggaggcggcgctcctcaagtcgctggatgtcgggcacaatctcttcaccggcgggttgccggagtcgctgcgtcggctgtccgcgctgcggttcctcggcgtcggcggcaatgcgctcgccggggaggtgccgtcgtggatcggggagatgtgggcgctggagcggctggacttgtccgggaaccgcttctcgggcgccatccctgacgccatcgcgaaatgcaagaagatggtggaggcggacctcagccggaacgcgctcgccggcgagctcccctggtgggtgttcggcctgccgctgcagcgcgtctcggtcgctgggaacaagttgtacgggtgggtcaaggtgccggcggatgccgcgctggcgctgcgcgcgctggacctgtcgagcaacgggttctccggcgggatcccgccgcagatcaccgcttttgcgggtttgcagtatctcaacatgtcctcgaattccttcgcgaggcagctgcccgccggcattggcgggatgaggctgctcgaggtgctcgatgtgagcgccaaccgtctcgacggcggcgtgcccccggagattggcggcgcagtggcgctccgggagctgcggctggggcggaattcattcaccggccacatcccgtcgcagattgggaattgcagttcccttgttgcattgtgagttctttttactcctacttcttttagcatgtattttttattgaattaaatcaaattcgacgtcattgcggttgcttgttagtgaggttgactagttctatttgttttttgtattatttcctgcatgctttgttggctttcagtttcgtaggttgtgcagagacgttgtagaaagtgataggagacaagagatcctgatgtcttattttctgtttggacccccaaaccgcaaaatatgggtctgtgtcatgttttttgctcgtatcccagtgtaacctgggccctcattttcttcgatacactcaaaactgaagtcaaatgtacatgaataggatcttgagcatttgcttcaatatagtattaaactgatcaattcgatcaaaccgtcatattatttggttacggcgatttaacattatgaaccattttaagtttttaaccaagacaatgttttgctcttgaaatgcagggatttgtcacacaataatctcacagggtcaatccctagcaccgtaggcaatctgaccagtcttgaggtggttgatctatcaaagaacaagctgaatgggaccttaccagtggagctatctaatctgcccagcttgcgcatctttgatgtctcccacaacttactatcaggggacctcccaaatagtcgtttcttcgacaacatccctgaaaccttcttgtctgacaatcagggcctctgcagctcgcggaagaacaactcctgcattgctatcatgccaaagcccatagtgctcaatcccaactcctcgacaaacccattgtcgcaggccacaccgactgcccctagcagcatgcaccacaagaagatcatattaagtgtttccaccctcattgccattgcaggtggtggtaccattattatcggggtgatcatcatatctgttctcaaccgtcgtgcccgtgccaccacctctcggtcagctcctgctactgcattatctgatgactatcttagccaatccccagagaatgatgctagctcagggaagcttgttatgtttggaaaaggcagcccagagttcagcgctggtgggcatgccttgttgaataaggattgtgagcttggtcgaggaggttttggtgcagtctacaagacagtgctgagagatggccaaccggtggccatcaagaagctcaccgtttctagcttggtcaagtcgaaggatgactttgagagacaggtgaagttgctcagcaaagtgcgacaccacaatgtcgtcgcactaagaggcttctactggacttcgtcgctgcagctcctcatctatgattacctgcccggaggaaatttgcacaaacacctccatgagtgcacggaggacaactcgctctcttggatggaaaggtttgacattatccttggagttgctaggggtctgacacatctgcaccagcgtgggatcatccattacaatctcaagtccagcaatgttctgctggacagcaatggtgaacccagggtaggtgactatggtcttgccaagctgttgccgatgctggaccggtatgtgctgagcagtaagatccagagtgcactggggtacatggcaccagaatttgcttgcaagactgtgaagattaccgagaagtgcgacgtgtatggctttggagtgctcgtgctggaggtcttgacgggcaggaggccggttgagtacttggaagatgatgtagttgtgctatgtgatttggtgagaagcgcactggaggaaggtaggctggaggactgcatggatcccaggttatgtggtgaattccccatggaagaggccttgccaatcatcaagctgggccttgtttgcacctcgcgggttccatcgaaccggccagacatgggcgaagtggtgaacattcttgagctggtgaggagtcctcaggatagtctagaggacgagctggtttaatgtctcttgccaactctgttctgaacggttctaggcgtttttttttcctttttgttttaatgagatgcatatagtgtaatgctaggtgggaagaaatcagagaaagcaaagagtggtatggatcgtgaaatgcttgtagtttgcttgaagttttagggaggttgcaaggctattttgttgcttctcggcaattctttgatccatttcttggaagagttgttttgccatgtgggcattgcctcggtgccgcatatgacgtctcacaccgtgacacagtcatacaactgaatgaatgatgatgttcttagggtgtgtttaaggataagaggattgaggagattgggaagatacgcaaaacgaggtgagccattaactcgtgattaattgagtattaactattttaaattttaaaaatagattaatatgatttttttaagcaactttcatatagaaaatttttacaaaaaacacaccgtttagtagtttgggaagcgtgtgcgcggaaaacgatgtgcattcttactctctatcacccaaacaaggctgtgtttgctgggggaggttgggaacaaatcttcttcgcacggaaaacggagcggtctattaacgcatgattaattagaaattagctaatttttttcaaaaatgaatcaatatgatttttttaagcaatttttgtatagaaactttttgtaaaaaacacatcgtttagcagtttgaaaagcgtgcacgcggaaaacgatggagaggtgttgggaacccttgggtccgaacacacccttagtagtgttgctctaacatttttgctttcaaatgtgtggtagatttgactccactgtactggtgagtgtcaataccaacagcccaagccacagcagggtgtttgtacttgaattaggggtactgtattttacttcaccagtgactaaagtaaatcacaaaagatgtacagaaaataatcaagagatgctaatgttgtacagtagtactactagtactgaaccatcacttgaagcttggcattgtttcatgattggtagagttttggcagccgttgaccctgtggaatagggaacagtatccctctgccttccctccagcaggggtgcccccatttgcgcgaggatccatggactcacctgtcctttgaagcttccaaaaacatgggcaatgagaccctgtttataatcacatcgaatatttgaacactaattataaatattaaacatagactattaataaaactcatccataatcttggactaattcgcgagacgaatctattgagcctaattaatccatgattagcttatgtgatgctacattaaacattctctaattatggattaattaagcttaaaaaagttatcacacaaattagctttcatttatgtaattagttttgtaagtaatctatatttaatattttaaattagtgtctaaatatagagaataaagttaagtccctggatccaaacaccacctgaatggcccgtgctgccctaccacgtgcccgcgtgttggcatcgtgccagaggctctgaccgcctgtggcggcagcagcagcagccgcagcgacggacggacggatgggatcgtcgtcgaggctcgtttcgtgcagctctcgcgtgaccgtcagttgggagcccggttctcgtcgacgttttttagaaggggtggtggtgtgtgggtgggtgtgagcctgggccctgcctgctgccgcaccactccggcggtcaccaccaccaccaccacaggaattgaatagatggccttaattgcagcacctacccttttgctcctcctccccttcttcttccacctcgtgcaactgtggatggagtgcgtggcaagcgggctgcatttactactcgctctacctttcctcctccctgatctgcaggagtggagtagcttcatagcttcgcagtaaacgtagaagagggcaggggctttcatggcatcggccgcagcaacagtgctgtggtgcggtggtgttggtgtgaggacgccgtttcgatttgtgctaaggcctggtttagttcgcaacattttcgttaaacgtccaatttttccatcacatcgttctaatttcaatcaagctttcatttttagcgtgaactaaaacacaccctaagctaggagctcaggaaatattcaaagattaagctgggagctcgggaaatattcaaagattttgggtttgggaatctttatattcagattctgtaggatacatgtttcaatttgctcctctttttttttcatgctcaggataaaacaggagtaaggttgaaggatgcttgtattgcaggagcaactcaattacacctttgcctggagtggagtgctcgactgctcctactttgtttcgttgccggcaaaaaaaaaaagaatgaaagaaagacagccacgtaaaaagaaaaaggaccgacagaatgaatccatgcaatgaacaaattattgagggtgtgatgatgaagattcaaatcagaacagtgctataatataccgagtgtccgcaccaaaattggaagtttaaagaaaaaagttggaagttgatgtgagtacgaaagttttaggcctagttcctaactttttcttcaaactttcaacttttctatcacatcgaaacttttgtacacacataaacttccaacttttctcttcaaacttccaattttagcgtagaactaaacacatccttgatgtgatggaaaagttgaaagtttaaagaaaaagttgggaactaaacaaggcctcaatagacggtagaaatccatcactctctccgtttcagtttagatatgtaaaaaatgcaacaaatgtcattggcaaacgtcctattctaaaaatactatcgacgaacgcaatttcaacaaatattgttgtacaaaccaacttaccattaaaaataccattatcgttagggtttcactaatttctctccgctaaaatgtgatgaggttaacaaagagatgcaagttgatttgtacaacaaatattgttatccaaaccaacttatcatgaaaaataccattatcgttagggtttcactaattactccatcgttttagtatagcagtactaccatgttcttagagtggattattgcaagtgtgattcattatctggagtaggacttttgcttttgattcactcagaaggaacatccatagcaaaatatgatatcgattgtcgtcaagatgtaatgagcactactcattactcaagagtgcattgcttaaagggccacgtcacgaggcctcgaataaacgattttttttagataatgaaatataacatcccagcctttgctaaaaaaaagctacaaccaattattataaagtagcacttcaaaaaaaagtgtagttcagataaaaagaacacactaaacaaaaacaatggtaaccaagccaaaataaggagaacacatttattgaagtctatttgtgaacctccacccataattggcaaatagttgcataaccatcgactccaacctgcggcatgcagcctttaggaattccccatcatcctcacacctttgtagctgtgccaaaaaccggagccagtgcattgccctaaaaattacctgtatatatgtaatagatagtgatttgtcaaaaccaaatcatttctactcaactgatggaacgagcagtgtcaaagaggctagcctagcctgtgataacggcaatcaactgatggtaaaatcgtcacggccgccgcgggggtcgctggggcgggtttgtcgcgttgctgttgcgaagattcggagaggaaagttctaaaaaaaaaaatcggagatcgatgaaatcggctcgcactcggaccaatgccaattgacgacacatggtttgaccacgacaaaaaaagaaacgctactcatgttgtcctactgtcctacgggcttctcctacgaagaaaaaccgtatcccgagatgttccgtggacgacgcgcgcgcgctgtcccgtgccgtgccgtgaacggtcgtctgccctagtactcctaccgtgctgtgagcccgtgatttttgcccgtttcgcaggagaggcgcccgcgcacctgggcgccgcggtcgcggatgcggatgcggatgcggcgtggtgggacggtgtgtgcgatggcgaacggcgaaggcaggggcttggggcttcgggggcgctcatttatggtgggcggcagggtggtggtgtgtgtgggtgtgagcctgggtcctgtttggtttcatgggccaatgtttagctctcaccttttagtcttaaattagtcctcaaggatctaaacatgtggtctaattttaagctaatgtgaattagcccccctcaaaacattagcccctccaaggggtgctgatggggctaattttatgtggggactatcaaaaagcagctttttctctccttctctctcctctctttctactctctccccaccttttagccttgaattagcccatagatccaaatataccaccataggctaatgtttagcctaacaatttatgactaaatattagctgtcaaaattagctctggactaatcttccaaatagagccctgtgagcgtcgtggccgtggaaacaaaatgtgtcccattagattgtgtgggtgcttcgccccacacagctcgcccattagattgtgtccgcaatcgatcgtgtcagccgtcaaccagacagcaacaacagtgctgtgctgctacggggaggggagggtgtgggggctgcatgtgtcgtccactcttgcatgctgtttgactagtacgtgatgcacatactagtagtctagtgttacgtggtagttgggcacgttgtgggcgtctcggagtcgccacgagcacacgagccgaacaaaatcccagtccattggacccatttggcctcgtatatattcgttataattaaaaaggagaaaaaaacatatccagagattaaaattagaaaatcggctaataagactcggagttttaacctccgatccccttgacctcgatgctttggtagtcatcatgtaattttccctgttctttctgcaacaaaagttggataaaattttagatactcgtggcacgctttttaaatcgttaaacgatgtgtttcgtgtgaaaactttatatatgaaagttgctttagaatatcatattaatctttttttcaagtttataacaattaaaactcaattaatcatacgttaatattacctcgttttgcgtaaaaaacttaatctttatctttaggagaaaagaacaccgcctttattgttggccgatctttgtgctgattcatgcatgcttcatccgctagattgtttctgtcctcggcagtagccatggatgatatatgaatacgctagactccgactcatggtcgagagtctagtcaatctaggtgattagatgatatactgtataatacttctgtcagggttatgggtaccacatacctaatagtagtcgactaaatctcggcatgacccaccatataccatgtcttatacgaaaactgacctcggatatggagggagttccgaataaggaaagagaaccagagttctacatggaaacgacaagaactctcagattgtatccatattggttttcctagttctgcttggacaaggggacacctatgggtataactacaaggccccttaggaggagaggggacacacccaccatagaagacacggaacaatagatcaagacagaagatcaacatacaagccaacatacgccaagacaagacgccagatatcaacttcagagataggcatgactagtcccctacggtgcctatggctaccgtcaggagagacataacgctatctctgatctcgccggatgcggattcgaggaggaagtctaccctggtgtcgactatgagttagaacttcagaccgccaagtcgacaacagttagataggctaccccaagtattgtattggtgtgattatggtgaataagagcaatgaccggcttcggccaacaggatgtagggttattacctgacaattcaggggcccgaacctgtataaaaatcctcgtctctgtctcttttactacaatctcgcgtatatcctagtaccaacgatccccatactatgcaaatactgaaatcgcgacatcaaatgtcgacaacttcctccatccacaaaagttgcacatattacttttgtcaccaagatcaaggagaaattaaatcatcttggatgttacaaaatcaacgagtaaatgtaaacaagcaatcaatgaatatttagattactcattgggttctcacaaacatttaatttatctcttcatttaagtcttagatgtataaagactacaaataagaacaacttatttgaaaaactcaaatgtgaaacatgtctaacttttatggatggagatagagtatatcatcggcttttttagcacgcgtataaattcacttaacatgtttggagtactagtggcacaataatagccaggtgcagccactcacgtacaacccctttagagcaggtacaatagcaggctataagccagctgcaaacatattttaagaagataaataaggagaaagaagagcagcgggctacagatttgtagtcagctgtagcacggactccaagacgcagtgtgtgtatgactggtgggaccaggtattaatagtgtagtatgcaactattgatgaatgagctattagattggctatagatgaattggagttagtagttggctatactttgctcttagcctcattcaggctgtgtttagatccaaagtttggatccaatcttcagtccttttccattacatcaacctgtcatactcacacaacttttcagtcacatcatctccaatttcaataaaaattcaaactttgcgctgaactaaacacagcctcagtcgttgattaagaaagagaaaaacatgaccggagattaaaattctgttccgccgcgtttgccctcgtcaactaatcttcaaaccctagtgacatcgttcgagaaagaacccaaaagagtaaacccggctacgggggttcggaatttttatctccgaacccccttgaccttgctttcactcgtgctttggtataagacagtgaaagagagaggagatttcatctccatgtacatagcgacatgttatgtgaatttgcggtgatcagattctgcggctaaagttgtgtgcttatgttgttcctgcatgtttcggttgctagattgtttccttgggcggaagcggccatggatgatactgtggtactacatgacgattcattctttaagaaacaaagggagcgcagtggaaaatggtgaatgaagattacgagatggctgcgttcgttccatccaacactacagaaatttttagcgcacgataaaactcattagcatgtaattaataaaatattaactattataaatttaaaaaatgattttctttaatttttttaaacaacttctatattttattttaaaaaacgtatcatttaatagttagaaaaatatattgacgaaaaataagtaagatgaagtttggagtttaagaaaagaacttgttctccccctaagccgagctcgataccagccacgagctctcgggcgcaactagcacaggaagtgaagttcgtaaattaatcagaaaagaagcccgtgggctcaaaacgctccaaatattgcctcagtacggcccaattcactccgaaggccagcatccattgggccattggcccattggccgctccaactgcaacttgaccctaaccatctctgccctcttctccacttcccccatctcacccccaagctcggcgcaacctctctcgacgtgctaatggcggcggcggcggcggacttcgcggcgagcaagcgggccatggcctacgcgctctgcaagcacctcagcctcgatccggtgattccccgactctctagccataaaaccgtggatttctgttctggtcgcttcgaagcaaaagctttctcctgctattgttgttgtttagtgctgtcgttgtgcaggctaaaggccgattttcttatatttccgtgttgaggtcttggttgttgaagttcttcggggggattagttcactcgtagtagtagtatttagtatttgatagactcgtgaggtgaatctcataatgcgattgtattgtgctgtcggatttagggtatggttacttcaagcgtatagtacgtagttggggagtcgaaagatatgcagttatctgctgtacaattgttcgatttgtggcaggccgtgaattgatgggagcagtagtggattttttgcatcatatactatatccactatgcaaaccatgagtccaggattgaacaggatcgtccttgctgttgattagcttcgtgcttctctagttctcttaattactctaagcagtgcaattagatgattaatctagttagcttccaatgtttttggctgctgcctgccacatagtactatgtcacagtctataccttgtaaattgtaacagttactctaatactccaatagaatcaatgtgcaaacgcttttaccaaatgcaacatatgcccttgtagtcagctcttaattaagtagcttgctaccttagttcacatagtgcctactctatttctttaactggtgcctggtcatggacttgatactcctgaaatctgacttgaatatttgactggtgtacaaggcacaacgtttgttgtattgctacactgttggcccacttatatgcacttcacagttcaccgttcattactagttcatttggacaaactttgcctggctcactcttataaatctccaattgcacaattgagttctacctgggctggaagcttctactaatttctgcgctgaatattacagaatacaatatccagtacaagtattgaagagagtgatattgccaccctgttctcacatattgtgaaatcgagtgaagatgaggtaactgtttttccacgcatgtacactaataacacgtagtactacttatatattgacagatttcttcactgataggtactgaaatgggttgaattttccagcaattttgttggaaaatgtggagaacagcatgcattgcttggtaatctgaatcaagacttgtcccagaaatcagttctgttgggtaatggttttaaaccatcagttgctgatattgttgtgtttgcaaccatacaagtttttgtggtaagtatgatgtgattactcatttgtatgaccaccatcaatggtcattcataaaagcagaagttctgagattttaaccttttactgcttgtttcagagtcatcttggtgaaaacgagttgcagaaatatccacatgtattgcggtggatggactatatccaggttcgaaataaaactttatttattttgtactatcatactttgttagtatcttttttcatactacctccgtgccataatataagcacatctagcatttgaaatttgttccaaaatataagcacgtctagagtactaattcactcaccaaccaccctaatttatgaggggcatcatagtcttttctgcttaaccttagtctttgctagaaaacctagatttgcttatattttggaatggaagtagtagtttgttgctatatgttgtcaacatgaagtacatgtgcccttcattctggataaaataaccaaacgcatatagtttttttaccgtttctcttgacagtcccctatgttgctttctgtggtataccagcactgaggtgaatgcacataccatgttttttttccttgtttgttgcctggtcttattaccagtttgttcatactttataccttaataatcagacccatattaccattttatttttacatcttatgtgagtacttactgattgacgcagaacatcgttgattttggcacaacagtacaaaaggttaacttgaccaaatctgtcttcgatccaccttctgtaagtaaagatcctttcccaatgtgggctagaagtattacattttgggggtacacatattcttgaattcctttgttgtatactttcagatgttataagagacagagttgaagaaaattaactctgtcaacttaatgcaacctactgtgtttaaatacaattttgtgcttggtctgaaaatacctgtacatgttcatatcagtttatgtttaggatctggttgatataaaacctttgtaagaactactgacataatctgtggaagtgccatagtgctgggaagaaatataaatatcaacaatttttgtaaaataatcatacagtatttcctgttcagtatgctatttgaataaacaaatttgttgaggagtaattgtacaatttcctatttctgtgtgacagcatccaaagaaggcagataaaggtgacactgatccaagttcaaagaaagttgtttcaggacagaagaatgtgggcaaatcggatgcaaatgttgattccaagaaagctgcaccagaggtagttcattatgcaattatgccaattatcactagtactttgcagttctggattagtatgatattatctcagagaggtattggtaattcatgttactttgaagatttggctggaattgatattattgcattttcaactcttctctagctgcaattcatgtagggtctcatgtgcaaatgcagaacaaaactctgtggactttatgtccaataaagctctttaatcagcacataaagtattaaaatgctttatgatgtacagatatctgttgtggaagctatttttttcccctttcaagttagttgattagttcctttgttggttgaatcagaataaagctcctgagaataaggcaaatcctactccagcaaaaaataacaaaccttctggggataaaaagaaagcccaggagaaatctgcaggaaaaccaaatgagggagttgcggataaagctccacagaaaactgcagaaaaggactcagaatgcaatgtcagtatcctgaatatacaggttggccttattcgcaaagcatggaagcacccatctgctgacaggtacccataacttttctgcttatgcaacaattcaaaatggttcaacagttgtattgtgctctttgaacaaatattctaactggtctctcttttcagcctcttggttgaggagatagatttgggagatggcaatgtgcatcaagttgttagtgggcttgccaagttcttcagcccagaggaacttgttgtgagtatttaacagcaacaatggacttgaattattcctgttcatttttcttgccatgaaattgtttcatccaagattctgttttctgtaataaacaactgccttttccttcacagaatcggcatgttgtattaatcacgaatgtgaagcctgggaagctgcgagacgtaatgtctgccggattggtatgttctattccataaattatatttatgctcgtgtacaggcaaagcatcttgatatgtgtcaagcagttgatttataaactacatccaacatgtgacaaaagatccatgagcctatgatggaatactagctttaaataggcattgctgtagaccccaaatcattaggtcatgtgtatgctcttgaagtctactgtagtacatctaaaataggcaatgtaacacttctcactgatgaaacaatgaactattttagaagtgaagcctcaccatgtgcttggtatcacttatttagtcatttgtgttctttctccagtcttagaaatggtaggaatataaactttaagttaggaagtcctaatttccaaatgttgttttcacattgaacatattgccaggtcttgtgtgcttcaaatcaagatcatacagttgtagagccattgattcctccagaaggagctaagcctggagagcgtatttcatttgcagggtaagaattatgttgtatagatgtgatatctgcattaaaattttaaaaaacgtgtttgtgcagttctggggagcatgttctgttcaatttgacctatttgcattcatggctttaaagtcagcttgcacaagcttatatgcaattactgtcttttagattgttatacaagttgtcccctaatatgttggtcgtaagggaagtccaaacaggatggacccatgttgtgtgatgatctttctgtcgtctttcaaggaaaataatattttagcgtagttagcatttcggttgttattagtagtgtcttgtgctgtagaaattatttgattgtgtttggtgtcctgcaccgtttgtgaagaaaaaaaatgtttataactgtccacctttcagttcagttaaattacttatccttcacatataggtttgatgggaagccagaagatgttcttaatccgaagaagaaacagctcgacaagatcacaccggtatgcttttaccaatgcgctatttttgcatgatgctctaagttatttttcccttttagcaatcacatgattagtctgcccttccagcacaatctgggtgaattaaatcagttgtcatttcttttgcacatctgggtgtcattttttacattgccttaacaaattcaataattaaatacagacaattcacaaatcgtgtttgctatgcgctgagtgctcttgaaggctgttgtgtatccatttgtatatatactgcatgaatcaaccaataattaaattttatcatgcacccaggatcttcacactgatggaaatggaattgcaacataccgaggggtacccttcactacatctgctggtccatgtagatcttctgttcctaatgcgagcattaagtgagcagttattttaacagattccaaacattgttgtgctataacacatgctaggtggatgtactatttcatcttgcatcttattacatgccctatcaactgttgtcagcgtagcgtccatctactgtgatatctaatagaaaattttgactagccaatgtgaagaacatttgtattaccttgcaccaaatgcaaaatccttcatgaacacggttgttttcaggcaggatttctgatgagtcaatttctctttaccatttagacatttaattcaaattaatcaatgcaattctaatcggcaaaatcaaagtaattgctggtagctgttctcaggagcaataccttgcttctttcgagggttagcatgaggccatgagtatcgatttctttcttgtggagttctttttgcctgccttccgtcttatgtctcacatgcaacagcttggcataagcaatgtatgtcatttgagtctttttctttgtatccatcgtgctgacattgctccatgaggagggcaaatgcccctcctggagaagctttgattgcggtaatcaataaaggaatcgattgaaatctgtgtggttgaaatgaaactgggtatgtatctgaaaaagaaagttcaggctgggctcatagttgagattcaatcggttaggtattctagtgtttcagattcagggaaaaaaaacagctataacatccacagggcttcttacggttttgttttggtctgcccccacacgtcagtgcctgccactgcatcagcagtacacagtcgacaatctctactgtaggagacgtgtgctagcttatgcttatgtgatcttttaacttgttgaagcaatcagcattgggcatggtcaccttaaagtatacctttgtcctttgagcaaagagatggagtgcatataattatgagcaaaagagatacatctaattgtgatctttgggtgttttcaagcaaccatccatttgcccccacgttaattctcgctttggccctcgtgccctgcgcttatatgcatatcacctggactatttactgatataaattgaacggccaaaaaaaaatatactgtagcttcactgcatttttcttgctcgatgtagaggatccgattcgagagtgaaatactgttactacaccaatggacggcgcatattttcttgccgcgagcacaaggccaaaggtttgattgacagaacgtccactttaaaaaacctggttgaaacagctgaaaacgaaacgaattccagcccaccaaacacaattacacaaacacctccgagagctccgaaaccgaaagccccctcacacgaaaaccccaccaaactcttcttcttcttcttcccccattttcctcgcgttcccctcgtgccgcccgcctccgccg

SEQ ID NO: 5488 - DNA, 102082 bp, Oryza sativa
actcggacactctgcattacaggtgttcaaatggctggcctactcgtgtaatcattaactaatagtactaataatctagtaatttacagcaagttttccacgatccatctgtccgtggcgaggcaattaccagatggttcacaccgattgtgcggtgtgaaactgagactgcaattaggcaatgtaatgctattgtggtatcttttgtttctggttttctggatcaggagagacttgtgaaaagttcagattagtcacctggaagaagttggaatgctccgagtcgatctgcgattctgcataatagaccaggacagcaggactgatccagaaggatataatcatattacaagcagcctagtacatttgaagctacgggcgggtagtattctcttcccttgcacataggagaatcgaagaattgaccggctgatcagacgaccactaaatttcgcaaacggcgaattcaagtggagttgggacttgggagggagtcgtttggggaaggggaaggggaggggggggggggggggggggacgatgaacaaattcagaagttttggctcgattacgactttgattttgggagtgcgtcgccaaaaggaataagttcacttgtggtcctttaacttgtcaacgaatctgattttcatccttcaaccagaaaaacagatacaacacgtccctcaactatcaaaaccggtgcagataaggtccctcggcggtttggacggtggttttggctgacgtgacgtctacgtggctaatttgactcggtcttcatctgacgtggcacttgtgtggcaattcgtttaaaaaaaataaaaatcgtaggacccacctgtcagttacactaaaggtaaataaaaaattatggggcccacgtgtcaaccctttgccgctccactgcgccccgaggactctccacctgcatcgcgcggcgacgcgggagctggagggcggcatcggcggagaagacgttggagctggagggcgtcggcagtgggaggaggacgtcggcggagcagaagcaggtcggggcgtcggcgtccgagtccatcttcagcgccgggcgtcggccttgagagttgagcaggagagcttccaggggcagccgaggaggcagaggacggcagggaacccaatgaggttgaggaggtggcagagcagtcgacgatgtcgggagcggaacaaatatattcaacttttaatacatccagacagatgcagcaacaaaaaagaaaatcccactttctgaatcaaatcaaatcaaaaacatttcctcaatgaacagctgcaaatcgagcatccagatttttctcccgcggaaagaaaaaaaaatcatctccagctgcacaaggatgaacgagcaaagtccctcaaaaagtgacccagatcaagacgggcggtgaaatgataggataggtcgggcggtgcctcacctgcttaagcgatgaggggaacatggtccgctcgcactcaagcggcggctgcacgatggagaccgcggcgtcccgccaccggctgcaggcgcaggcgtagaccaccacgtccagccgcggcggccaccaccgccgatgacgtcgcagtagacaggcagcgacacgagtgttggatagtatagggagaggaatattgcgtaacgtggatcacttgtattgagcctcaggggccggtatatataggagtacttgggaggagataaggaaggattacagatatggaaggagtccacacaaatcaatcctatcctaatatgactctaactaccatatactctaacatccctccgcagtccaagcgtgagcagcgcggacacttggactgaagaagaaaccaacaagagtactcaatacggatgataaccctttgtgccgtagtcgatgtagccaaagcgaagggtgcgagggagctgtggtcgatgaagctgtgcgtagagtagctgtggtcgatgtagtcgaagtcaggaagctgatgtcgaggtagccgagccgcagggagcgcatgaggcgccgtagagtggtcgtggacgcacgggaggggcgtcgtggaccaaggtgcacgaggatgcactggagacgaagatggtgacacaatcgcggcagtcgtgaggaagatgacgccgaagagccgatgtagtcgaaccgtgaaggacgagacgtcacatagggtttgccagaccccgggacaactcgggacgaatccgcgcgccggtgttgccaataccgcgcgggcgacaggggaccaccatgaatcatatgccaatgttgcaggagactagcagagaaggcctccaagacggtcgcgacgcgagaacagcgtagagggagaattgccggagcagcgcgcagttgccggagaagagcgaaatgtagtcgagggagatacggcgacactggcgatgaatcatgctggacgaagacgaaggcctagtagtgagaccaacggcctggatggcgatgttggtagccatgtagaggtagctgcaccaccggcctagagtggcgacagtggcagcttggagatgcggtggcaatgctcgaagtcgaggaagaagaccctgagcggctgacgatgaccagtgcggacgacgaggttgttgatgtgcgaacggcgatgaagacgacgaaagcggcgaagctgcggtccgagaggacagcacagctgcagctccatgtcgatgcagcggcaagaagtccaccggtgatgtagaaatgctgaggagggtgcctcttagcactgcaacaaccagtggaggtgtggaccacaggcagcggcactgcggcccgaggggagcgaacgcagcggcaccccaaagcttgatggtgtagacgcatgctcgatgatgatcggttgcataagtcgttgtagccgggcgcttgaacgggtgatcaagctgaatatgcgcgaggcggaacgatgaagttgaagcagagtcaacaccgatgtcggagacacgtggatgttgacgaggcggtgggcgacgcaaacccgttttttgaaaaggggaaaaaaacaaggatacatgtagcagcagaacagcatcagtagcaagctcacacgtgcagctcatcctctcacacatggtccataggccaagtccacaccaccttgtgcaccacagcagggaccaaagtcatcaagtagcaatcctttgaccggtccatccaatgcctttccctgtccccaatcctatccatccacacacgcgtagacagatagaaaagtgagacatgaagcaacagattgatggcgaggcagacagaaaaggtcgacgatgactcagccggcgaggagacggcgagagccgcgaccctccaggaggggacggggtggcgccgggtggaggggacctagtggccggcgagcgccggcgccggcactggcggcctcagatcctagtggtcccgagcggcggacgtccggtgagccggtggaggatggtctcagcaggacatgcgaggtggtaggcgaggaccggcggcggagaagcagcgccgggagctcgtccccccagtcgacggtggtgctggagacagaggagtcgggggttgcagggggagaccggtgccggaggtggagcagccgagctgcgtcgtccgtctgtccatcggggctcgatcgttggccagtggaggcgacgacgacggcagggcccgtcggtgaggccggcggagcagaacggacgctaaagatgaagccgacgacgggcggcctgacggcgatacaagagtgccgcgcacggaggtcggcagaggagatgcaatctgttgctgctgcttgacgacgactagactcgacgaagaacaatcgtgaagatcgatctctccaagacgacgacgacgacagcgacaaggaagaaaaaagaaaaaaacgggtggccgcccccgggagcggcgtcggcggaagcgtgagagcggcgctagatcgcccgctctgataccatgttggatagtatagggaaagaggatactgcgaatattggacacattgtattgagcctcagggggccggtatatataggagtacatgggaggagataaggaaggattacatatatggaaggagtccacacaaatcaatcctatcctaatatgactctaactaccatatactctaacaacgaggatgacgaagaaggacaggaacgggaggctagcagcgtgcatcggcaccaggaagcgaggttagcagcgtcgggttggctcgcgcaggcggaggcgtggatcggcaccaggaagcgaggttgatggcgtccggcgaagggaagagcaggaggacggggctccccgtctcgagatgagggggccagaggaagggaggaggcggaggttggagagggaatgggcgaggagggggaggatggagaacgggttgcggcggagggcgtgcgggtgctggaggatgacaacggtggttgaggcgggttatggcggagggcgtgcgccgctccgctccctcctctcccgccggcgccgcctagtgccgctccctctccgtcgcgcctgagagaggagaggggagagagacgaagacatgggagatgtgaagaaaggaggaaaaagaggtgagaatgacatgtgggggcccacgtgggccccatcattatttatttatttgtgtgttaaactgacatgtggatcccatggggtttattatttttctggatcgaattgccacgtaagcgccactcaatgccatgtcagatgtagactgagtcgaattagctatgtaggcgccacgtcagccaaaaccgccatccaaaccgctgagggaccttatttgcactggttttaatagttgagggacgtgttgtatctggttttctggttgaaggacgaaaatcgaattcgttgacaagttaagggaccacaagtgtacttattcctcgccaaaaccagcgccggttattaaaatgtagctcgaatcttgtggctcggccagcttttgtgttgtggttttcttactgcgatacgtttccatgggccatcaagtttgtgctggactgctggatccaagttacgtaaggcctcgctgttaagctcatcataagtagagaaatcgatcttctctgggccaaaagagtacggagtaatctgtttcagtttttacagggcacgcaagacattgacgggccaagcccatatgtattccctcgttgctttgcttcgtgataattcttgggtggaaaagtctattttgcttttcctcaagtctgacttggcccctcccgacaaaatcatttcgttttatctccctgaacgatatgaacgttggttttgtcctatgtgacgtgtaaataacgcctacatgacacggagacttgatcatctgatgtgatgcttacataacacttcaatcaaagaaaaataaataaacaaaaaaaatcaaaatcatataggccctatatggctctcagaaaataaaaatgatgtaggtggcatcatctctctttccctcttctttcccaatgacgctagaagctcaaggttggatgcgtagttggccatcggacccctgcacgggctccctcaacaatggctcgttcgatgtcttctccatgcttttcccaccaagcagatcgcttctgggatcctcccggacattggtttaggatggcagcgacgacggcctcaaggtgtggagtccatgcgacgcacttggtaagtagaggacaacagggatatggcgcgaatgacatcctccatgccgagaggctagagctcacctacacctgctacattggttagcgtagtggatcgattttttgagggaggcattgtcacgctcaaaaatttaacccaaattttcagactattttgcgtattaaatccctgtccagaaccagccagggtacacaaaacgacaagtaatatacagttccaaacgtaaaataagcgtaaaatacttacagaagaggcacttagtcctcacaccgaaacaaaagcagtagcagcggaaaaaaaaaatgatcctagcggggcttcagctccactccacaggcaaaactcaactggggtctaagtcttggtcctctaactccatcttcagctcagaagcactacacttctgaaaagggggaataatagcaaggctgagtacaaccaccgtactcagcaagccacaccaacgatgcagacgtgcaaggggatacaaggatggtttgtggctatttgcataaaggcggttgtaaaacattttattgagcaaaacagtaaaactgttgagtaattaaagtaacattaaatctccattgatcaacgctacaccacgttgaacaggcccaaccaacccacctaaactacagtgtattgggtcgatttattaagatgagactaatcacggtgaatctgatcgaccgcccataaccgcgggcacggctattcgaatagttttactctgatcagaggtgtacaactgtacccacaagacacagccccacgacacgtttccgtgcgccgacatgccaccacgacataccggaaagaggccgtgacaggacccttcgcataaccccctctaaccaagcacaccacacctcaggtttcacccccactcctcgcaaggcagcgggcagtcccctctcgtgcctaggtgaatccggaagccgcataggccgtcgcagggcccatccaaactccatcacgcccacccttgcctggatgcgtcggctagaggaaagctacactacaagcccagccgttgcccacgctggcttgtggtaagtacgataagttcttccagggcatcccgcgaaccggtccttaactgccatgggtgcgaccaacaaaaccatgcacccacagcccaccattcagttgcattttagttggataattacgaccatgaagcatggccagatgtctcgagcacgcagctcactctgatactaaaaaggtctaatactgtaattatcccatcaactgagctagtggtaattaagcatggctaagcatatagttctagctaggtcatcaaagtaacacaagctaggcgatttattacccatggttgacaaaggacagatatcaagtaaacatggcacaagcgagcagataggtaaaaccctgaccccatgtaattagcaaaacatgcatatttatttgcaaacagtaaaacatttgtaaattgggatcaacatgctcaaggggaatgtgtgacttgccttgcttcttcacttggatcttctgaactcttatccttgcgaacgcgatcttccgaaacgacgggaactacacgctggcacgcaaaacgagaaaaaactctaataaaaaccaagaaaacagtacataaaaactaaacaaacatgtagagctcaattttagatgaattttgcaagtggaatggctcaattcggagttcgaatgaattaggtatgaattttagaagttttaagccatttaaatgaatttctagaattaaactcgatttattgcgcaattattatttatttttacaaaggaaatggtcatcgctgacgtcagcaaggggtgaggcgcggaccacgtccacaaagggggcaggccccacacgtcagcggcacggcccaccgtggaccgagtccacggtggcgatcggccacgcggccgcgcacccgacggtctagatcggccaaggccgatcggacggctggggacggccgggcggcgcggcctggccagcgcgcacacaaggctggcggcggcggcggccgggaccaaagcgacggcggcacacaggccgggcgtcgcagggagcggcggcgcgcagcgcgggaagcggcgagaggaaacgggggcagtgagggagagggaggtggtggagctcaccgaggggcacggcgacggcgagagcagccggcggagggaggcggcggcgctccacaggtcgacaaggaggaggggctcccagcggcgaaaggcggcgaccgggcggcggatggggaagagcgggacgcggcgaagccggcgatgcagccgatgcgtcgcagcggcagccggggtgaaggcgaacggcgatcggaggcggaaaaaggcggccggtagggtggtatggcggggaggtggttcaggtggtggaggggaaaaagggatcggtggccgggcttgcccgcgcggcggcgaagccggctgcggtggtggcagggcgcgggatcggctcaggcggcgacgacatgcgactcgggtgcatggtggaaggggagtttcggcggaggtttgtgcaaatggagcggtggcggatgtgcggcgaggcatggcgaagccggtggtgtaagcggcgcagcgcggcggtggctacggcaacggcggcgtgcagccggagctcgccggaaagcagcggagcgcgggctcgcgcgaggaacacgggagaggtaacgaggagctcggggaggagagggaaacggaagaggagagcacgagggtgctttttataggctcggggaggagaaatcgtggccggacgtggcggatttgaagcggcaacggccggcgacgtgggcgacatcgtgggcgaagtggggctcgatttggcgccaaaaattggggaaaagtgggggatttggtggaggaggtggaggggaaccgattttatgcggtttgggcgcgagggcgcgagcgggaggagccggaatcggcggcgacgtgggtggcaatggcggcaatggcggtttcggctctagaggccgaaggtagaggaaggacctgacaggtggggtcgtcgggcccacctgtcggggagggagagagggaggagagccagggggttatttagactttgcgcgaggggaagttgatcggaccaaaaagggaggggtcggcccgagagggagaagggaaagagagaggggcgagcgggccaaggaggggaaaggatcttgggccgaaagcggcccaaagacaaagaggggaaaattttatttgttttctttttattttaattgattaaatgaaatttgtgctattaaaattatttctcgagctccgaaaattcacggaaaattccggagagtattttagggcacaaagaatattacaaaatattcccggccaatgatttttaagggaaaattttaattctcccatcaattcattcgaataaattgctttaacttttaatataatttctagaaatgcattattaattgatttttaatcccgaacgaaaatcggggcgttacaggcatggcgcctggcgatgctaattgggccttctttcctcctcttatctacattgagctcgctaacaagatgagaatggcgaggacggctgctgagccatgggcgtcgccgttcttcatgttctcgacacgacatgtcgagcccttaggaggtcctgtatccaccatgccaatggctagttcctcatgccaccaagaacggtcaagtgagcacgacaacggtttttcaaaggtcttcggttgagaacatgaactcgttcatttgcattgaagtcgggtgttactgtcatggttatgtataccacatacataatagtagttgactaagctcgatagggcccaccaagtaccaagtcttatacggaattatatctcgtatatagaaggagattcggataagcaagaacgaatagagttctatatggaaactataaggactactcggattgtatccatattagtctctctagttctacttagataaggggacacctatgactataaatagaccccctaggaggagggggggaggaacaaaaaaaatcaagacacgacatacaacagatcgagccaacacacgccaagacaagctgccggatatcgatatcagagataagcctagacaaactcaatatggtgtctacggaggccaacaaaagagatttagcactatctctgatctcgccgagtgcgaattcgaggaggaagactactgcgttgtcgactacgtgatggtattttaagccgccaaatcgacaacggttacataggttattccaaatattgtactggtgcgattatgatgaataagagcagcaataggagtagggctattacttatcagataagaggcccgaacctgtataaaaatccctgtctccatctcttttaccttaatctcgcatccaccctggtaccaacgatccccataccatgcaaatattgtagtcgtgacttcagacgtcgacaagggcccgacgagctccacctccacattgccaccatggctccatcgagctcatcgcaatatggtcacactgctctgcaccctatgcaggatgcttaccatgtgctttcaatcaccggttgttgaggactaggcagccatactaggtagttgcataaggaagagttggcagggatgcatggttgccactgcttcctccaccataccaccatagctgccttggtgtagcaaagaggaggggaaatatattaaagcggggggagagggggaaaagagggaaaattaaatgaggattagagcaattgacaccgtaatagactaatcggacctgaaagagaaaatatgatctagagattatgaagtactaccaagttttttttttctctaaatgtaaagcggtaaacaaaaaatccaagtaaacataagaggaatgtgtatcatgtttatacaactctctacacgtgtagtactgatatgtacatccaagaatctatggggtccacatatcgtgagaatactgcactcaccccagtcttggggcctgttcactttgataaaaaaaaaaaccttaccaaaatttggcatacttgccaaaattttggcaggatttcttatatagtcaccaaaatttgacagcaaactaaatgtagccacttttttggtaactttaccaaaatttggtaatgttgaaaatggtatcaaagtgaataggccctttgatgccattttcaaccttaccaaatttttggcattgccaaaattttggtatagttgccaaaattttggtaggatttcttatatagttactaaaatttagcatcaaactaaatgtagtcacttttttggtaaatgtatcaaaatttggtaatgatgaaaatggtagcaaaatgaacaagcccatagtactgcatacaaccttttttttttcaaaatacaatacaagtactcgtatacacatccaaaaagttgagattcacgaatcttgaagttaccatagttaccttgcttttaggtctacatagtataggtgcttatataaatgctcgtacattcacccctcatcctacctgtacaataaacgctagcatactcaccacttaccttatccctattagcacatctaaaaattaaatcttgatattgacagagttatcataggcgtctagttgttgatggaaacatcattctagtaccatttaaaaaataaattatcgtaaacatgttaaatctattacttaaattcggatggacaaacacattccatcaccagcaagtttgcaaccccatgttcccaactcctcttcctcgttttccacgcgcacgcttttcaaactactaaacggtgtatttttttaaaaaaagtttatatacgaaagttgcttaaaaaatcaaattaatccatttttttaaaaaaatactaatacttacttaataacgtgctaatggatcgctatgttttttgtgcgggagggattagttcccatcccttctatccgaacacagcctaatacgcttctaactgttactagtattttgatatgacaacatcatgtgttaccatcacatcaactctcgaacagatcactgaataactcaaccagcaatggacttgtacacttttcattttgcatataatataacgccgataatgctggatctttcataaaaaggcaatgtgatatgattctagaaaatccaggagcgaagccactgcccgacaaagcctcgtcggttccctgagcgtttatgttattttagctgtttccgtgtatctattagcagttcccgctcggtgcaagcatcaaattaaacttgtgtgcatatgatcccgcttgtaccaacaaatatacggtatttcctcgcaaaatgatactacttatacggtaatattacaagcctgtacgtaactgtaagcgtcctgtacctcctaacctccacaacaactgcccttgctagccaagatcgaaatcgaatggacggtggactactgtgagtaacctacaaactgaacagacgagcgggcccacccgtcatcctctcacagcaccaacgtcggaaaatatctcacggccatgggccatggcctggcccaaggagagatttttttacataggtccaaaacaagaaaggagattttttacatgggtatgttacactgggcccacagcggctgggggaagcgggggcccacctgccccggtcacgcgatgaccaccgtcacggcggcggcggcgggggcgtcgacctcgctccccggccgccggctgcccgcggcggcggcggcggcggttggtttgtgcttggtggtggcgccgtggaggacggagccccggcacgtggggcaggagtcgtgggagacgagccacgtgtcgacgcagcggacgtggaagccatggccgcagcgcggcagcacgcgcaccttctcgccgtccgcgaactcgccgaggcagatggcgcagacctccgccgcggcggcggggctccctccaccacctccgccgtacacctcgatggggatgctcctgagcgcgcgcttcttgagcccgccgccggcgcccgccccctccacgccgccgccggcgccttcccccgtcgccgcccgccgcgcccaccggatgatgagccgcgcgagcgagttgagcccgagcgcgaacagcagcgcgaagagcagcgccgcgaggatgatcaccatgttggtgtcgaagctggcgtcgctgccccctcccccgccgctgctcagtgcgtgctgcgcctccccggcgctccccggcgacggcgaggccggcgtccccatgtaccagctcatcgacttcgtgtgcacccccatggcctccccccaacttactagaacttagaacaacacgctaagcttcccggcaaattatgcgccgaatgtacaggtccaggtcagtggaaaagctactactactcaccagttatctcgctcgcgaaccaatccgtaacacaaaaggacgtggacgtagtagcgactgccactagctaatacaaaaaggtgaagcttaactgttgctaaactgtaccgatcgatcgattgatggagtgagctagccaagtaccttctgtgatctctttcccacacgatcgagctggattagtatttcgggagatgagatgaggaggaggaggagaatcaacaacagcaagtggagttgagccgtagtagtagtagcagtagacagcgatccgtcgcgagatgccacgagagatttataatgggtgcaacaccaacaccggcacaccgcacggcggcaggtggggccaggcagatgtgggtggggttcggctccgggtcactttacggtgggccatccaaaagcggaggcctctctcctctcgcgtgacaaatatctttgcccccgctttggcgctttgccagttggcagcggctcgcgacggccacgcggttgctggctgtgcgggtgggcggcaggtgcgttgccacttgcaaatggatggatggacggcccacgccgccacgcgcgcgcgcgcggatggagatggagatgaaacgagactcggcgtgtgcctaccttggagcaggtaggcttagaggaggcagaaagcagtacacggcatttgcggtgcagctggtaggctgtcacgtttgcaagcttggagatgtatacaggagcccaaggattcattccagtggttatacctctctagtatggggcatgatcttcttgtcggtcggacaggacaagttttagggagagccagatatgattagcttatataaagtacagttcaatttgttacttagtaactctctcttttttggggggttgggagggaagaaggccagcagatgctgcgatgagtgctttgaagctactagaagtgttctccttttccgacaaaagcctcaatatttgttaaaaaggttaaaggttcagttataagcagatcatatcgatatcaagacagcacaaaagaaagagcagtttactagtatttctttttcaaaacaacatcaatatctcaggcaacttacttttgcaactgcgcgagcgtgcattagcctttattcattttgagggtgaaagatatgcaaaaaaaaaaaagaaggaacaggtgagttctagagtcctagcctggtctttcgaccattccacttatcagagaggcaacgtgcatgcttaccaggactccgctcgccgcagttaattagctagcttcgttttggccttttgggaagtaacaatcaatcgctgggttcgttttgtcgaaggttagatgctagctaggtttagatagtagtgcgcatgcatcagtgtatcggatcatgacactaatgagatccgcagccaaattaattcgtctaatctaatatgtttggcccccataaagatccactaataagaaaagttccccctttaaccataaaatcagtatgccggtgacagatcgtgtgtataggctgggcacttttctgcaggcagagatcggacaaggccagctcaaaaccttatctcctaattaaatccgactgtcacagtcccgaattaaagcactaatacagaatgagatgttaactaaggcgttaagcatgcagcttgttgtagacttgtagtgctcatctaatccctggataaacaacacaaaagcacccgtgcaaaaaaacggcagttcttacagcttgattctctgtggtactagctacagatggttatcatagctatgtctaattaggacaacaaatagttggactgaacaacaacacttatatgccccatgaaactaccaattgcaattttgtttttaaacatattttttatttcgcgcgcacaaaagaatagcatgacaatatattagaaggaaaagagtttttgttacacaatgcaatcggccagacaagctcacaaacctatgccaagggaaggaagaaaacgaaaaaacaagaaccgcaactaggtaaaagaaaggtaaactactacggataaaagctactcaaagctacgggagggtggaggcggagccacactacatccccaaaaaatctagaaaagtagcaacactagcggaagaccacatgcgaccctccgagaggatggactctagaaccacggagaccgagaaaagtgccgagtcgaaaactttgaagtcatgctccttccacaactgacaagagactaggagaaccagagagtcgaagccggtacaaaaatgctaaggtaaacaggccctagacgacggccaccagaccgctagcgagttgtatatgtattactttacctgtaatgggttcttttgacttaactattgtacaattgagttataataaagtgggatttacatatcagtgacttaattgcatgttcagttatgtttagtttgaattatgttagaggatctgctccttactttacctacgaagggtttgaattatggtactacagatattacatacatatgcacacttgataatattttagtgaggctagggatttattgccggtctttgtccatttaagtacgtgtagaagtgtgtgtacacgcgcatatatgtgtgctgtgtgttcagtgtaatcgaaaagaaaggaaacagaggttattacttttgttgcgctagcttgaactgggccataaattgaacttcaaagttaccgtttacccccgctatacagaggatccatttcggccgttccagcgtttacctaaaccccaattaaacatcacaaaagcctcatgcagaaacgtgggttcttgtcccagcttaattacaaaatacatatgcaccaagacacgaagtcattaagcaatataatatttaagccagtggcaagatcagcaacctttgtcatatgcagaactacaaatccaactaattcaccaccggctcgtccagatgtacgcgtcgtattgttagggatttaaaatttcaaagttaaaaagtcatccgtgcacggacggttcgacgatccccagctgttgttgctactgtcattgttgcacgaacggttagacatgtccactttgcctcctctgacccaggcatagatcgctttaggatttgcattttttttactcccatatcgcagctggttttacgtggattttgtgacatggcatcagcaatccttaacaactactcctattgaccagatcattgaagagctggaattgctcgtcatcaagaggcaagtaaacaatcccgatgagctaggcactggattatccgggattttatgttaacgttcaagctaatcgggaagctagagcacgcatcagcaatatgagcttttttttcctatccatctatcaactctaatccaaccaccaatttcgtgttaatttcatcaatttgagatgcatcttcccttgatcgcagagtatcaggtcttaagatctgtacgggatcagaacaaatccgagctccttatcctctatagtactcttcaagtggcaaatgtatgggacaaaagattaggatgtatatggacagcgtcattcaccataatcaaattttcttttcacgtaatcataatcaaatcttgccactaacacgctacaaaatgtcggtttctgtagtactagcattgatggaatcatcacagtagctagctttagttgccgcccacgtccatccctgcacaaacattcgcaccacctctctagtgcctatatggattgccggtttggcgacaaatcttcttctcccccatcttcagccgtggcttccttctatagggttgccgttgatgatgttggtcatggcgtctaactttagaactcttatcccaacggctcattggataacaaaagaacgcaccggaggtggataggatcggaggctgagttatgcacgaatctttaagtgaattggaccttaaggcttatattataagtgactccactacatcgtattactggtttaacttcaaagttagcgtagcttaacttgttatgttatttataatggaatatgttcaccagaatttaaatcataaacttaacatgttgatgcttgtatttacgaaagttctaaacttgacacgttatgctcgtaattataaaagtcttagacttgacacttaatatatgctggtcagtctctcgatgatgcttataagagtagggtgtgcatgtgaatagccctgcttgtgtacagtgtttttgaaataaaaaaaattatatgtacaccctcgctctgcttggttgtatttcttcttgtttttttttttaaaaaaaaagagctacctcaagctgttgttatggccgtaagtaaaagaaaatatgtaagtggtttataagatacaaggaaattaaggggagttaattttagaaagttgtaactaatttgtcaaaaatgtagtttgctacaagtttaactcatcatttcagagaaccgcaacaatagtgtaacatgggagttctttaataaagctgcgactttatttgtctcataaatttgagcccacatatcatccaaatatgtaatactcacatcgttttaagttggccttacacgccatacacatagagaatgtagttatagttttctaataaaatcatttgttattgttataattttgtgaaatacccaattaaaattgtagcaaagtgattagtgatagtttgaactaaacaaccatagtttttcaaaatttacttaggccttgtttggccatttcccatgaaaaaaatattagatgggattaattgaacaaaatcgtaaggataaattaacgccaggaacatatgaccatttggctgtgacaactgacaactaacgatgccagcgtggcagtttttccgctgaacatttgccatgaccacaacacttaccgtggacttcttctgtaaactttgcattttcttttggtcagcgcgacagctagacacctgatcagtgatttctgccaaactgatgctcgctggctggctagagtgacggacggtgtgaaagatatttgcggtggaccggggccatcttggctgtttacctccaccgaagggtaaagtgaaaatatccggtgctgacacggtaacactaggaggcctggcagcaagtacgtatccctggcccgttgtgtgcatggctcattgggcgtactccaactcctcgagctatctctcaagtctcactctccgcatcgttcttctatctctgatcaatcgtgtcatctctcggaagctcagtatctttttagcaaaacctcaaaagccacttgacaagactgcattagcattagcattagcgatgcccggctggctgacggaggaaacaaaggcagccgcctgctattcgcctagtcttctttgtcgagtatcctttcgttgcaggcagtagaaggtagtactagtactagtactatagatttactagccggcacacgctgcagaaactttttgtacaacatgggcccttttcttcatcaccatcatcgtcgtgttcgactgttcgtgttgtcatcggcggcattgttgctgtcgggttcgaatttgcaatcaacggcacgcctagcaggtgagaaaaaaattcgtcgggtgatctacaccgttaagcttgttgaaacggacggtggagaattaggcgcgattctctgtggccgcaatcaaccaacggagcaaggacagatcggcgaatctctacgggcgtcggcacacggcgatcgtcggcgccgggccgccggtttggcatcgagcaatgctactgctttaccatcctggccactgctgcaaacctgccaggctgccacacgcacgcgtaggcagtaggcacggagaagtgggccgtttggccccttttttgggccgttctctcaaaattcggcctttcaactgaaacgagacggtccttttgtacggtggatagaaagaggccggaactgggctttcgaattaagcccatatattacctcagcagctcagtgcattgagggtgctataatatttatcggtaatctacaacgattttgctaaacatttattgataaattttctcccaaaaatcaaaattaaatacaatataattatagtgtaattatattgtaacttgtatgtaactttcatataattttgaatagttagatttactcaaaattcatgcaaacggctaagggaaaaaatcacaaggcatgcacgagtgggagtattctaccccccccccccaacctccactttatgagaaaatttattgaaaaatatatagatagttcacctacaaaagccacaaggaaaacgctctcgaatttgttcgccatatctctttaactaacgaaaagtgaaacacgaggattaaccacatcatctgaaaaatattagccgtcggattcactgggagacaaaagagggtcaatcaatcttaaccattgaattagatggatgggaaatttcaagaggattccagaattgcatgaagctatactggaaagaaagacagaaggaaaagaaaagacctagagaataagcaggggaaaagataaggtggtgcatataattttgctatactggaaagaaagacagaaggaaaagaaaagacctagagaataagcaggggaagagataaggtggtgcatataatttttcgatatatgtatatatacatctatagtaaacattgtttataaataatatcctcatccttgggtaagctattcatgatgcactcaaaatgtatggttatgtgtgtatttttttttcatggctatagccttagagctatatatagacttgatatttttcctactatatcaatggaaaacattgcactatattttagttgtttcaaaagaacgtgtttgaggaagaaatcattacaaggatatgtacccacattccttccaaccaggcggccatgatcgcctaggtttttagaataatttcataatggttttcactgtatataggtttaatgattttgcacaaatattataaaatacatatataaaatatatgtgcacaggctataaaacacacaccgatggaaaataataggatctcattaccatagtaggctagttattgatgaacggattatttgttccattttctgaaaatatattttctcgaaggactttattctacttaaattactttaaacaacttgtgttaagctgtttttttaagtttattttttataatattcacccttacaatcaactagataatccgtaacaatgatcgagtgataagagcgtggtattgctaaatgatggcgttcggaatgtcttttcccgtgcatgtgaagagggttcatatgcatgttcagaagttcagcttgatactatcacacacagtacatactgcagatttgcagaacaatggacggttgacacagttcacatggagaacatcaggaccaaagctagcacaggcgttacataataacaccaccttataaagtgcacaatatagctccaccatcgcccaagcgacactatagtaggaactgtggagacatacgatccctaaactgctaaacaccacagaggaagaaagggatcgattttcgtaaagcttaactagctagcttaatttgatggtactaatgacattttattctcctctcgtacgggaggcgcgggcacacacgtacgcatcaggccggccgccctagtttatcctgcacaaagaaagaaattaaatttgtctgtaaaaattttctacttcgtttaatgagagtatgagagtgtttatgcgtgcacgtacgcgttgcagttgacgctggtgctgatcttgtaagggagggagacgttgcacttggaggggagcgcggcggcgcgggtgatgtaggggcccccggaggcgccgttggcgacgttcttgaggcagccgcagatggtgcggcgatcgggggtgttgttggcggcggcgagcaggctctgaatgccgccgcagcacgccctgggcaccgtgccccccgcctgcacgtacggcaggcacggcatcagcgtgttgtacaccgccgagcacgagatagccgcgcgcaccgccgtcggcggcgccaccacggccgccaccagcaccaccaccaccgccagcgtcgcgcaccttggagccatgtcagctaagctagctagtctcagtctttgctgctgtgtacgtacgttgttgtgctctctacaacctacgtgaacactgaaagacagctgaaacgtgtggatggaatggggcttcctgggggtgtttatatagcggaggaagcttagcttggatttactaaggttgttgagtgcatttaggggaggagttaagaacgcgagctggtagcagatggccgtgtgtgtggtcagaatttgactgaaataggaggagggttttttgggggatgcatttttaccagacgtttgatcgttctgataattctggactctgtgatggtgtagtctgcaagatgcacttgctgtttgagctttttaacgtatgccatgctcgatttgacaattcggtaggattaaccatacaacttttgacggtgaagcgatgattaattcattttttttatgaatgtgacaaggaattacacgtcattctattagaataagcaaaagcaagtttttacacgacacggcagccggacaaccatcgcccgggattcgggaacaggaaaagaaagagaaactagaaacgctggctaagaaaccaataagctccagcaaaaggaagagaagcaaaaacagcaagcgagaactcactatatgtaagattaaatcacaagaactaaaccaaccagagaggagtgaatggttggtatacccaaaaacaaaaaaaatttagcgaaaataaaagttatcctcgaaatcgatggatcgcggtctgaccgaagtagtagcgccggtctgaccgcctggatatcgtcggtctgaccgaggttgtaacaccggtcgaaccgccgagatcaatcgccagctcctgtcgccgccgccggtctgaccgcctcgccttagccggtctgaccgccagtaggtcgccggtctgaccgccggtgagatgccggttagaccgccgaaacctggtgaaacacaaatcgaagaactctcaaagtagatgacaactttattgcttctctctgtgtttacaaagtgcaacaacagcattccttacaaaaatcttgactaaactcgaaaccctaactaaactatcaactccacgctttgaaaagcgataaaaaagcgataccggaaagcctcacgctccccctctatttatacatgaggtaggcagcctaaagccacgaaccaaactcatactaagagtcctaaacaccttacgaaaccctctagtacaagaaagaaactcaacataaccaatcgtaccaaatttggactccttccaaattcgactccgcatcccatacgcacacaatacctccatcgtatgccatatggaatcttcaccaaccacgtgcatcaactctagtcttagtatctcgtatgatatctaaccaccacggatatcgtcttaccactaagccgactcccggtccatcaccgcaaatactctcccgaggcatcgagtcacctatacatgaaacaaacaaagaaaccatatttcgagaccaagctatctccaacttaactcattcgtagcaaacaacagtattatatacgtatagtatccatctataagccataaccatgaaacaatcacggatatccaaagaaacaacccgaaaccgaaaccgacacagcgtcggccggtcagaccgcgggcaagccggtctgaccgctcacatagctcctgtctgaccggcaacaaccgcccggtctgaccggtcccgacaaatcagtaaaccctattcatctcctgaaaattgattatctccaaaaccacttcgacgataatctccaaatatcaaaaccgataatcacatatgtcaattgttcatcacagaataagaatcaaaacacacattgatcttacactataatcatgttttgttagatcaatatggttagtgcagatactaattgagatccgacgtgttgcaagagactatgggtgtcgatgtatatcctaatcctatcgtgtgtctagctcggttttttgctacaataatcagatcgacgaacaaattctgcatggaccgacgtatagtcctgcagactccagattgttcggccaataattcgagaccgtccaatatgacgcagaattgcacaggttcgttcaccgacaggcgacagcgagtccgtaacgcgtgactgttgcatggagccatggagtacctctgatttaatgacttgccccggacgtggcctgcctaaagccattgcacctctgcgatcgagcgtaaatggcggagctagatgagctagatgctggtcgatcgggttcatcagatgctgcttccttacagatttagatctgccaacacttctgacgacggggttgctggctctgcttgtgtaggtggcaaggacgaatttatgaagctatacgagcagcggccatgtgagagccatctgattacatttacagccgctgctgccccggtctgtgaggccagcagcaggaggcgtcaatgcgatagccggctagctagctagctctcgccttttatttactgcgtacgtctcgatcgtatgcatgcaacattgcaacatcgcgtctcgtacatgcgctgtatgaagcaagttcttgttgcgatcaacaggggaaagaaaatggccaatagtgtgtgcatgcctgtatggtgcgtgccgactgttgttgattacgtggtagctgttcatggcagtggatagaagaagtttgttggcaggtgaaaattaagtgcacgcgaactactcgctacattttccactgatgtctctgcaccgtcattcatttcagaatagcgcgcggctattcggggacctgctgtaaatttttcctctcctttttttgctcaccagatttctccggtggtcaacagggtttcccaaaccgttggggctagggttaccgtgccccggcggtaagcacggttaccgcgcggtaaccgcaaaaaaccgtacaaaactgtgtaaaatttatcaaaaattcaaattattttttaaatttatttgaatttaaagaggttaccgcggtatttatattaccgtacccccgcggtaagcccgataaccatgataaccgcgcggttaccgacggtaagtcgaaccgactggtcaccacaagatcaatgcagtttaatcagtgcacttccttaccattctcagccattccaaatttcgatgataccaccacgataacacaaccttaccattttttataattctaaaactttatagtctacaaatttttttaacaaattagactttctcaaaacttatttcaaaacttgaccgtgtaaaaaaatttcaaccaaaaaaagaccatcagttcaacgccagggacactggccctaaggttgtacataccaacgccagctacgttggcgttgatcccttgcccacatggagccgaggacaatcccctcgccgacgtggcagggtctcaacgccaacctatcaaaaaaaaaaagggacaaaactagtctcaacatttaataaggtattaaactaaatactacatatcttcaccttaccttatcaaaatttaacattgccaaagtttagtaggtttttatttatagtaaagtgaagaagccctataattcaataaacatgtatgcgaactgccaaacgtagcaacaagcagctgttatgaacttatgccatggtgccgtggaccggtggtgatgaaggtaaaagcatgtacaccaacatgtacatgaagttaccgacatggaaatggaatgaactttcacatgcacaatttcacaggttgatgctacagctgttaacttttgaggaaagaactagacgagcccggagataaaactataaaagggctctgtgagcaatttcgatgtagcacagatccatgccatggactcatgaaagaataagttcactccaggtccttcaacttgacgtcgagtctcttaaaccacaatctacttctacttctacttctacttatatatatatctctacttaaaaagtaaaacttgtttccgtcgtccgtatgaccgtaaagaaaaacacgtagaaaaaaaacagcgagaaaaagacttctgtcgaaaaaaaaattctgactcctattataaaaaaaacttccgactcccttgaaaaaaaggacttctcgtccgtaataaaaaaaattcaaaagaagtccgactcaggcttaagttcgatcggtagttttaaaaacagatttttaaggcaagtaacgataaacctcattagcactcattagcacatacatgagtactacttaaaaaattaaagatttttccatcgttcgtgataaaacatataaaaaggcgaaaaaacatataaaaagaaaaagaaaggaaagtctgagtcatcaatgacgcggagaaaaaaacctccgttcgtgataaaaaaaagggcgaattttttgttcttcacggagaatctaaaataatcatccaatcggacaattacacaaatcgagaaacctaaaaaaaggggaaaaagagaggaaaaaaatcacacagatgagcaagcttgccgtcaaatccggttgttccgagctcgtcgccatcgccgccgaccgcgctcctgtcgtggccttgcccgctgggcatggccacactcggcacatcccaacccgcgctggcaccccctccctctacccggtgccccgccctccgacgctctcctcttgcttggagacagaggagagaaagagaggtggatggccatcgccgaggtctccgcgccgtaggctcgtagccccgccattgaggctgacggggagagaggaaggggaaggatggtcgtcgccgccgtcgtcgtcgctgtcgtacccttgccgtcgctgcactgcgtcgagcactcactgacatgtgccatgccggcgagactggaaggagagggggagaaggaacgtccccgccggtgggggaagggggagtgtcgccaccgatgggggagggggaaggggagtggtgctgccaacgccgtcgtttgagaaagagggggggaggggaaatgatttacgattagggttagggctgccgacgttttatatatgttcggatcaatcgggaccgtcgatcagataggacggctacggcttctcccactcgggctgctaacgccacacaattgggccatatgtacgctccgcatggataagttcagttttggtccctccagttgtcccaaatacttactaaaccaaggccaaaatcagattcaagccatttaaaattgctgggaaattatgatcaattatttaatcagttagtagattatttttagataaatgaaaccaacaaaatgtttatctagaaagtattaattatatgatattgtatttgaccaacgttaatatggttttatgtcaaaataataattatttccttaaatattaaattatttatagaattcaaacatattccactaaagattttatttcgatactataaagtgtgtgtttctttcccattgcagacgctttgtagcactgaaaaaactgaaaacatactatagtagagtgcaacaaagcaacgaaacgtttaacctcttttactaaatcccgttgcaacacacggacatatttactagtaccaaatataatatgtatctaaactcgtaaaaccgatgtaccagagatcccagggcagtataaagctcggctttggttgaacgagttagctacgtatggcccacctaggcacccggctaactcagtgtggccccgcgtgtcagttgccaatatttcttcctcctctctctccgtctcacccatctctcatcaggttgggtcactggaaggcaggagacggccgacaggaacaaggcgagccgccggcgggaggtgagttgcgggaggccgagccaccgatcgaggcagcacagacttcatcggtaggcgatctctgcattgttagcatgcatgtgtatgtcgtggactccaaggtaggaatgtggaatacttccaccgttttaggttataagagcaaagtcaataatagagtaagcagcaagctttaatttttttccaactcatcaaagttatcagtatagcctctgtatacaatagctagctatactgctgggtccatctatttcactttgcattagaataatctacccctctctcgtaatgttctctctttctccgttgattggctagctatccatcatcaatgcttcttatctcgatagatgtgtgcagctcggcgatagatttgtcgtcggctcacgttctctctctcccctctctcctccagctaatcacgacagttgatgtggcattcctatcgtcagtccacggtggattattgtactcgctctaagacgttttgagtttgatcaaagtcaaactacttcaaatttgactaagtttatagacaaatatagtaatatttataataccaaattagtttcattaaatcaataattaaatatattttcataaaaaaatgttttgggttgaaaatgttattattttttctacaaacttagtcaaatttgaaacagtttgactttaaccaaagttaaaacttcttataacctgaaacagaggtagtaggagacagagaccgaagagcatgtgaaggctacaagttgtgttagacttcagggtggcggtggtggatggcctcaagctgtccaagcgcctcgtcctcccaagcagcaagccctattgtgtcccgttgttgcgatggactgggtggccgcattagacgtcaccttgctgctactaccggcgtcgatgacctacaccgtggtgatggacccaggtgccatccacagccccagtgtgcctagctaccagccacacgtttgtgactgcctggacccgccatacatgaagaaggaggcggtgaacatgaggctgacggcgaccatgacaacccacctctccaccaagcaaccaaacaccttaaacccaaatcccccttccctgaattcgccctaaattcatcgctccccgctagagatcgacccatcggacgccgatccagctagtcgacgaggtcaccaagtaatgcgacgtgactcggtgcttccgcgcagagtgcggtgagctcaaggcgcgggcggacaagcttggcatcggcagcagggcagggtcgttgacggcaaccgtcttcaccctgagctcatcgctgccgcctttccgccgatgagtgagcaagctcaagctcgttgcccagctcctctccatcggtgctaatgccaccctactcctctccaccaatgttcttgtcgcctatctcctctccgccgctcttctccctgccggccactggccgcgtcgccttttcccgtcgatcgtgtgctcctggaaagagatagggggaagtggagattggagaagctgtggtttcacactttaactgacatgtgtggcccatatgttttttgctttttttttttgtctttagtgccacatcagagccatgtcaattaaaactgcttacaatattttcttgtcctcttggaactatatttgtactggttttacaagttaagagatgtgttatatttggtattacatattgaggatgtaattcgaactcgacgctaagttgaggtactataagtgaacttattccactcctgaattcccaagccctgcagagtttcagtcttgcacttgcacttgcagcaaaggaagctaggcctagctgtgtgggttggtcagaacgtggtgcggcccacaaaagttggttagaaccggattcggaaaaagtacatcgaaggtccctgaacttgtcatcgagttataaaaacgtccccaatctgcaaaaccatatatcacacgtctcttaactaatcaaaaccggtcacaataaatcccttggcggttttgatcccggtcttgtcctacgtggcggctgaatcagcgtagaacctatgtgagccccacatgttagcatgccacgtcagcctcttctctatttcccctcttctctccattcctcctctctctctctcactcctctgtggggctctggacggccggcggtggggaggaggtcgtcggggcatggaggtccgacggccggccggcgatgaggcggcggcgacccagaagggaaggccggcggcggcggcgggagcacggagagcaacaccagcgtcttgtgccgcgtccaccgcggcgtgccagcgccggcggccggcgaggtcgtgttggcggcgccggacattgctgctgctgctgctgcctcccggaactcgatcgagacacatcaagggatccaccagctgggatttatctacggccatcgcagccattaaatcgggaatcaaagcttgcaattttggcatccagcagaaacatgcaagaaattaatctcgtgctacaaatgccatctcatcatactcatctcttcttatctcatccaactaagaggccatagaaaatcagtgtcattctactggcaaatcacaattaggcaaaaaaaatgcaagaagttaatctagtacaactaccgcagctcgcagaagggcaccggcgaggagctcgccggagcgccactgccgccgctttgcctcagggcccttatcaagggcttggtcgccgaccacggcgaggccgcgccggccgtgcacgcacacgcggccaagctcggcctcgaccaccgcctcgtcgtccgcgatgggctcgtcgagctctacctcgcgcgcgtcgagctcgcctccgcgtgggcgctcttcgacggattccacgccggctggccgagacgtcgtttcttgtacggccatggcggatgatagcggcgtgtgcatcgacaccgtcgccgccgtcgcggcgttctcggcgtgcgtgcaaatcggggaccttgcgctgggtcgggagctttaggaggatgcccgtgaagaagaacgtcctcgtcccggccgccgccgccacgtcgcggccggccgtcggacctcctcgccccggcaacgacctccccaccaccggccggcttgcccaatccagagagaagagtgggagagagagaagggaggaaaggagaggaagggagaggctggttgttgacgtggcatcctgccgtacggggctcacatgtgtcctacgactcagccgccacgtcagataaatcggggtcaaaaccgctgagggacctagtttgcaaagttgagggacgcgttgtatccggttttacggttggaacgattttgtaactcgaggacaagttgagggaccttcggtgtactttttccatcggattctgacgaacggcccatattagttttgtcggaacgggatcgtgagttcgtgacggacatatgggctgaaaagtttggcccggaaggggcgtgtaccgtgagcccatattgttgggctggaacgaacgggctacataggttaggccggaacggtatcgcgacgagcgtgaagcccatataagttgttgggccagagcatgattctcgttcgatctccatcttgacctttcacgtcgctaactccggaaaatttgtcgatgggcggacggtcgctctcgcaccatcacacaggcaccggctgtctcccatagtcccatgttccagtgaattcacaaggtacaccatgacacctactaaaaaacaaactttagcacatgaaggacttgtggctgccgttaatgaagccatcggaagttcacaaaaaagaggccgtcgtcaaatcttgtgccaaacatcctgtttcgttacagagagagggggaggacatttcaacgtgcaggcgttgccggtgatagaatttggttcctcgtgagcaggcgtccttgcggatatccagccgtcggtccaaccagccacaagcgtactaccctgtctgccgaaccggtcgagttgaagatcccgtccaatgtagcgcgcagtacacaaacatcttatcccgtcgatcggcacacatcggcagtacagtcggatcctgttcctccatcgccgtgaacagcgagcggtcgatcgatcgatcgcgacctagcttcctcgccgcacgctcgatcgaatggcctcctgcatgcctctaggccgacggaccacgagaacagcccgcgggcagcgactcctgagccgacggatgacggatcgacgagactcgacggaaatgccgctttgccgtgcgggggcgcaagcacatggcacatggcaggcagcagcaacaggacgcgcaaccgcgacccgcgcgccgctggtgcatcgcgtgcggccatccgtctcatcctccgggatcgcgcgcgtgcgtgcggggtgacgtacgcgcggtgcggtgcgggctccatccaaccacccgccgcgcgacgcagggcaggttttcgccggagagagcgacgcgggatggatggatgagtaggcgggggggcgtgcacggcgccatcggttcggttgggccgggcgctatcgagccaataatgaacggaacggtccgaactgggaagaacgcaagcctctcccaccgtcgttacgcgcgcggcccacaccgcgccatgataggatcccacttgacatgcacttgccgtttcgtgtctaggtaagacaggagtagttagctaccgttaagtactactagctccctttctttggaaatgagagcgaaccgcttgcaaattgcttttttctcgtatgattgagcgtgccctagctaacgcaattgatgagatgtttaagcgagcgaagagcacgattctcctcgacaatcatggacaaccaccgaccggggcaaagaaaaccttccttccaaccgtcattaaccagtgctgtaacaaccacgaaatgcatgatggtgtctctgatgatcgaggcggttggatggatgaagaagattttgcagcgccctactgctacgagagattctcttcagacgagtaggcgtggtgttccattcgtgcatgatgaatctctttttgtttgggtgcgacctgcagatgagttccctgggcttcagtcgccatcacggcaagattttgtggtccgttttggtgtactcaccacatgcttgctcctcgctctctctccatcttccaaacagtcatggcctcttcagcgcatggcgtgaatagttcaatgccttcaatgtgagacctggttctattatactccctctatctacaaataattaaattatttgatgtttaaattttgcctataatataacggatcctacattattacttttccaattcatccaaccattacatttgttgctcaattttatttgcatagttggcgttatctttactaatctggtaaacctataggacaatttcaccccagctcaatactatactactgttaaataacctagaacccctaatatttacggacaaaagaaacacttcgcatgttaataccatcatttatagacgaagggagtactgtacatgctaatgtcggtggtaaaaattttgacgagcaaaaattggatttaaaatttatattatatggtatttttaacttatttatgatggaagtggttcacataatccgcctctaccaaaaaccacacaaccaaggtaaattcgcatattgtatgaaatgcttatgatcaactgtaattagatttagtatgtgtttggttgaaagaacggaatagattgagatgaggcgaatccatttttcaagttgtttgatttaagaataagtgacatcggatcatgggatggttcgtaatcccataagatttgggtcagttttacacctcagaaactaacggactaatcaatcctacccacctcctctctcttattgacaaatgagccacaccctccgtaaagaaaatataacgattctatctgtcatgacaaacatatgactaaaccattccattcataaaaaatatagattatctcacctcattctcaaaccaatcacgcacttagattatactccctccattacataatataagggattttaaatggacatgagacattctaatactacgaaactggacaaagagtatgtccaaaattgtaagactataatgtgtcacattctttcaaaatcctttttattacgggacggatagagtacaatcctgccgcagttagcagtagaagttgccataaaagagtctttgttgtactattgtctggagtgaaaataagccccttttcaaattagaagtgccttagaatttaagactcgtgtacgctctacgcggttcctacatactttatcgaacgtgagtgatggcagattgcagagcttgctcaatgctcggctagctcaaatatccgtcggtacagcccaagtaaccaacgtaaacagggaaaggaaattgtggcgtgaaccttatgatgctcggagctgaaagctcgggacgcttgcaaaataaggcgaatcaacgcatggtagctagtaggagattgcccgtgatgtccgggcggcccatgcccatgtgcagctaacatggcgtgggggcacgaaatggatggttaattagtcacttgatagactacttctttttgaaagattggcacgcatgttctctttgaaaggaacggattatgacgggaaagctaaccgcgattttgttttcttgtcctccaatacgtgatctttgaaacatcgatggttccgaattcatcacgctatcatttccgcctgctaggagcgatcagctgctgccctgtgctgctagtataaaacttctcctgttgcatggtagtgataatttactaaaattacgatgacatagaagtaatttgtactgttaaactaacaatgacgcatctccgaaagaaaattttcaaaagggctttatgaagttggttgggggaatccattaaaacttcgtgtttgacctctgttgtgtaccagcaaaggaagcaggaatcacgatacgcgacactgtcgaaagaaaaggtgctacactaaaagcaactgaagaaatgcactgcaagttcgcaacgtgcagatcatgaatatactcccaagcaaaccggtggaagagcgcaccaatagtcccattccttgagccactaaccaacatttcctgcaggccgatccttacaggaggcacgaggttacatcgataaaatcaggatcagagtaggtttggagcgagtcagcgagagacgtgttattgcagccacctgtcactctgccacatgtcacaggaaaaagaacagtactatatgcagaggagatgaacgaagaatgcccattcaggtttgtcagagcaaaaaacgtgaacttggacaaacatgcctgcagtttgtctgaagatttcgatttttatacacctttttttgatcgcctacgtacgtggccatgtttatgccatattgccatgtgaaggtgtgaacccttgcaagcacccatgggcgtcaggctatatcctagtcctaaatcctaatagtatctgagcttatcattgggagttcgcactggtaattttggcatcaagcatgtatgcactagattaattgctgcactaatctatattacctagtcctaccaagtaaagttactcgcggctagtcctactattgattcttgtatactcctagtcctacatgatttacatagccgacagaaaaatctggggatagtcactttgcctgatggtgcaatagtggcttcaatcttcagcctactctgctggcgcattacaatttacaattgtgagaacggttatgccttttagagcaagtttaatagtatagtccactgctaactccaaatcatctatagctaacgtaatagctaattcatataatagttgcttactatactattaatacatggtcccacctgtcatacacacattacatcttggagtccgtgctgcagctggctacagatctgtattatagttagtttatagcctgctattgtacctgctcttacaacatcgaccggctccgatttttcggagattatccaatgaacgagaggttcttaaccgaagaatgcaaccttcgaatcttgcgctacgtcggaaaggtgcgagaggcatccacgaacatggttcacactttagaacgattggttgtcattcggtctctttttcgtttctcgcattaatctaccatgcatgcaacttgatcaacagttcaagaacataaacaaagtggtttactttagagcatttgagcaaactgtatcgcgtagtccgtgcatttgaccatgtctatcctggcacgtaaaaaaaacataaacctgcacgccaagtcatgtcatgcatgtacacttcgtgcatgaatcacacgagagacagcccacgacgcgcagccacgaagcatggccatccacgataacgtaccggcgtgtaatcgaattcgtgaagcatatgtctacatgatcacatggtcggtatggtcccttcacacctgcgaaattcgtggcccatatagcttctgcgagccatgtggcaagtatcaaagttcgccgatttctcgtttaaaaaaatgctcggtgatttttattgtttttttttcttttgctgcgattaactggacttgttcctgcagacacacgggcagttggtgtctccttgtgcgtgacgcgcgggtccgacgaggcgatgcgacgagcacttgcatgtgcggggctgatcgccctgatttgtatgtgttaaccgccgtcgtggctcgtggccggttatggtgggctcaccttcctctcgccgccttttgtctccttttccggttctctcctctgtcgttgggcaaaagctatcaacgattctaactgccaaggaggagtcgcctataagtacctgagcccgggagcaccgctctcttcacaaccaagcaaccatcgattcgatcctagcttaagccgagtgaagtagctagcaggacattgttggtagtgtgatcttctccctgttttgcaacaatggcctcacgcagtagtgccctgctcctcctcttctcggccttctgcttcctcgcccggcgagccgccgccgactacggctcctggcagagcgcccacgccacgttctacggcggcggcgatgcgtccggcacgatgggtacgtgtgcactgctcctcgtaacactttgtttttttttcttttggacgcattgacaaaaccgggagtaatctgactcgtgtcgtgttgtttgtgtacatgaaaaggcggggcgtgtgggtatgggaacctgtacagcaccgggtacggcaccaacacggcggcgctgagcacggtgctgttcaacgacggcgcggcgtgcgggtcgtgctacgagctgcggtgcgacaacgatgggcagtggtgcctgccgggcagcgtcaccgtcaccgccaccaacctgtgcccgccgaactacgcgctccccaacgacgacggcggctggtgcaacccgccgcgcccccacttcgacatggccgagccggccttcctccagatcggcgtgtaccgcgccggcatcgtgcccgtctcctacagaaggtgagctctacttgggtcaatgggtcacgagtgagtggcaaactgtttgcaacttgaagccatgggccccccgtgcggtgtgtcggcttcgatgggccgatccccaatcggctgatcaggccatgtgtaggtgggccacccggcagatttggtttgtccacgatctgtccgtgtcggctgtaggcaaagccatgcacgcacgacttgacaccgacgtggacttgacttcgctgtcccggaattactttacgcatcccatttcacatccatatgattaatcgttgcaacaaatagtaacaaattacagttaattctactgtttcactgaactttgctttttttttttgctggtgtgttgcagggtgccgtgcgtgaagaagggcgggatcaggttcaccatcaacgggcactcctacttcaacctggttcttgtgaccaacgtggccggcccaggcgacgtgcagtccgtgtcgatcaaggggtccagcaccgggtggcagcccatgtcccgcaactggggccagaactggcagagcaactcctacctcgacggccagagcctctccttccaggtcgccgtcagcgacggccgcaccgtcaccagcaacaacgtcgtgccggccggctggcagttcggccagaccttcgagggcggccagttctgatcgagtactcggctaattccgtttttcagttcacttttctgcagaaatgtcagtgtgagattgagattgaggtggaggaggagggaggcctctttgctatagtaaaagagaagaggctttggctattctgaggctgcttattaattagcacccgcttaggcctttgctttctcccataggtccagtagacataaataagttatcatggagttgggcattttttttttctgcattgttgtagccttggtttaaaatttggcaaggcaatttaaggattatattgtagaacagcagggaggtggtgtcttgtaacttttgttgttacattgtaaccccccgaatcaggccacatgggccggaggagtttgtgggggagcaccggagcactcttgtgcttttgggaccatgaactatgctagtttatgggtctatgtatatgatatgtttgtgatttgattatactttcttttgtcgccttatcaagtaccaatcattattaagtactgtacgtagtctctgagtgataattttgaaatctttgtgagcgcatattttaatcgaagttgaaggctatttttgttcgccattttttgttggattgtcaggatgatttgtaggcaaaagttcacaagagaatttatatgttgcttcttcaaagttcaaaacgattcatgagtgagaagaaaatgatttgtgacaaagctttgtgcctttgtctgttttcagttcgacgtacgaaacaaataaaacgggcccatatctattccaccgcagaattccagcttgaactatcaggccattacaaattcggcccactagagcatgtattctcaaaagcaaaagctggccatatctatgctaccgcaaaattccggcctggactttcaacccattaggaatccggaatactaaagtagtagtacgaagtagtattcttcaaaaaaaaaatttctttgatatgaagtttgttttgtattgcaaaatgtggcttgactatccagtataagtgtataactattctgttcacgtatgctgataaaacaccaggtagactgttcaactgattggtctcacacccgacctaacggctaacgcaagaactttatgcagactggaatactggattcatgagtactaaatgagtatgtaattaagggcaacaaagttttttttatctgttacaaacatctattaattttttaggtatgatgggttcatcattgactgtttcaagagtaggctaaagagctgccaaagtgacaaattgtcgttgcagttcggccgttgtgatgacaacgatggcgatatccgctaaattggcctgtgcacggcgcgggaatctgcatgtctggtaggtcgtcaccgtcatcagaaatcgttaacttgtctctccttatgccaaatgctaatttttcaagcctaaaattgccggggcggacggtgaaatcaaagacgaacttgaatttttagccgcatcgtttgacagtaagccaagcattcaagttaagttagatggactttttgatggatcgatgatcgaccaacagactgacgtagctctgttcactccaccaaactccttcgattgatcaaatgactgtttgattatggagtagaaactgtatatgcgtagcatccgacaataagcaagccagtgaagtccatgaatctgcagtgcggatttggccgcattctgaagaactggacgagaaatgctgacaccgcctgagaccgagaggcatctgtgtctggccagagttggttgagcccgaacaaatccaccaacattttaagcaagacaacgagcaaccacccaccaccgcacggagggaggaggatttctgcctctcgtcgcattcgtcctctctccctctctcggttctcgcggtggtggccacgggcgcaggtgaggggatggtggacggcaggatggccggcacggcggcggcgctgggcctgtcggtggtgtcgtcggtgtcgatcgtcgtctgcaacaaggcgctcatgagcacactcggcttcgtgttcggtgagccctgaacttatccgagttatctcgcgtacagtctgtttctgttggacgccattgttcgagatgccaggaacatcttagcggtttatactgcctttaatcgatgcgtagcagagtccccgttgttcccgtcttgtgcatcgcctgcgataatgatttctgattaagctcagtgacggagaatgctttggcctgcgtagaagacaggaggcggcggtgtacggcttgcaaacgaggagtaatttgtgaaaaaaaaacttttatatacatgttcttagcgaactaaaagcaaatgctgaaaaataaagttcgataaaaatacaccaaaatcagcttcaaatttaaagttgaaaatttaaattttggctgataaatataagcataagcgaaaagatgaaacaaatagtttacgcaagtacctcctacaagtacactgcagtttatgtgtcactcgaatggttataaaaaaataaaaaaatattaagaatatataaataatatgtgatatattatttcacaaatatatatgtttaaatttaaattcaaaattaaatggacgggaagtgtccatccatttttttgcaaaacactgcctgctgttaggattggtgagtggcgattgggagttttgcgcgaaaaaaaaaaactcctatgatgaccgttttattgatagcggtctttttgtgtagtccgcttccccttctgtcttcgctagtacggtaggagtaggaccctgtcaaaaccacgccgccggcggcggcggcggcggccggagagcaacatggccgcgtgttcgctgcagagcatcccgcccggatggcgttccggggaccggggatatcattacgctcctcagcctccggtctcctctgcgccgtgctcctcagccgccggtggcgccgactggtcgccttcgccccagccctcggtcctcgttccaccggagatctccccgcctcgcgctcgcctacctcggttctatcgatcaccctcttgaacctacctcgctcgcctactttgcgcttaaaattccgcgcacatatctggtctgtttgctctttgcagagatcttggtaagtagatttcgagtctacgaacatcttattcaattcccgcaaaaaaatcctttaaattcctccattccaagggaggcctaatactattgttctatttaatgctagcatctagcactctgtccgcatacattggactgcggcaatacgagcttagagcaacgcaaatgactagataagtatgcactctaggtgttctttgaattgcctcagtgcagacttgatgaccattttctgaacatctctgctctgctgcatatgtgagtcaaattcatggctccatgggacaattggaaattgcacaacgttactgctatcctattcatgtatttgttgaacaaaaatgacatccttcgaaaattcaggaaacacaagttgcctgatggacacggttcattaataaggcacacaaattctatactactttatgagtacaatatgacgaacaataccacctgagaaaactaactgtttcctaagctatataaccatgcaaaaatcacagcactctcctaatttctttcagctactacgctgacaagctggcatctcctggtgacattttgttcccttcatgtggctcttcagatgaagcttttcgagaacaaagatttagaccccaagacaatcattggatttggaatactaaatggcatatctattgggttgcttaatctgagccttggattcaactctattggcttttatcaggttggtttactcttcagaaatcaggccaatcttgcatttgtttatttttcctattttgagatgaacatattcatcttcagcaaacgacacctgttggaaactttaaaacttaaattcttgctggaaatttagtagttgaccttgattcatgcccaatctgaaaatcaacatgcacacaatatgttgccctgattttattggggatggaatgacacaattcaacagtctctagtttcagccaattcatgttctttgtctacagacctaactgtgcttgtgtaattagtctactgctttgtctaagctatctcactctatcaaatgcatcaggtaaccaagctggcaataattccatgcactgtatctttggagactatattgttcaggaaaacattcaggtctgatccaaattttgccttgtcttatgtaaaaaaaaaaaatttgccttgtcaattcacgctgaaaaaaaccattaactactaaatatatgatgattgttggtatccttgtgaatacaagcatggtacttgaatatttgaattcctcaatacctgtgggtcttgcaatcctaatgtcatactcccataaaacaataacttgtagtactatcataaattgaatagactataacaatattttcacttcatgcagccggagaatccaaatggcactggcagttcttttgtttggtgtaggtgttgcaacagtgacagacctgcaactgaatagactgggatcgctgctgtctctatttgctgtactcaccacgtgcatttcacaaattgtatcctctaaacaaagtatacattcaatattattttctttgcactaaaataatgacacttgattctttgtttttaatagatcaataatcagacatatgcattatagaaaaaatggcttttggtgttagctcatatcaaatatatattaatttaccagataaatagtttcttatatctattttgatatgcattctcttgcacctaaagtggatgataacttttaacatactctgaaactctgatagtttctacgacctccgtcccaaaatatggcaacttttggctatgatgtatccagattcatagctaaaaatgcttacattttgggacggagggagtaggtgtttctcaaatttaagtagctgatctgatacacgttgttttttttctctccatttttttgtatcagctataaatatgtggatccaacgtagtatattgatttaacatcatatccttcttctgctatcactatttccttccccatacagcttaaccaattttgctagatgacaaactttatccagaagaaattcaaagtctcttcaactcaactgctctaccaatcttgtccataccaagcgctgactcttttcatcattggtccatttcttgatggttttcttactaaccagaatgtatttgccttcaagtacacgagtgaaatccttgtgagcattccctggctcgatgttccctttcttatttgtcttctatccattatacagtaatatatctgtttgttatctttttgtcaggtattcatcgttctttcctgtctaatatctgtctcggtaaacttcagtacatttcttgtgatcgggaaaacatctcctgtaacataccaagtagtaggccacttaaaaacctgtatcatcctcggttttggatatgttttatttaacgacccatttagttggaggaacatattagggattcttcttgccttgttaggaatgatcctgtattctttcttttgcttgatggagaataaacagaaggccccggaattgtcagctccatttttccacactaaggtatcagatagcacttcttttctgaagccttaatgctacatttgcgacttgcagctatttttttcatatctcgtccttgcaactttagctgacccgttattttctttcactaacttactttttcgtgaatgtgcaaaaggattacacgtcaatatattagaactttcactaacttactataattccttgcttctcacccatcggtaatcacccttgcttatcaacctggcaggtgaaaggaggtgaagcagggactcttctcctagtacagaacgggtcagctaaagttgcagatggtgttgtgactgagggcccaatgtggaggtcaaacagagacttggacgcatgatcatcccgctcctgcagaagggatcaagggactgacatatggtctgaaaccggtgtaattttcatcggcattttgctccagttcactccagctagctagttctgaaggctccttgctctgcgtcttgtacatacatattcggcacctatttttgctacgactgtacataacatgtccacggctggaattaaacaaacatttgcattcatactattatatgaagatttcatgtctgttatttacccgaagagtaaagtgcacaatgcgtttgttggttggggatgggaactaatcccttcgacatgcaaaacagaacgaaatattaacgcacgattaattaaagtacaagttccttttctttttaaaaatggatttatatgatttttaaaaacaactttcgtatagaaagtttcaccaaaagcacaccgtttagtattttggaaagcgtgtaggtcgaaacaaaaatgatgaattcacttgtagacttttaaatggttagactatgatgaagaaatattgcatgcttatatttaggatgaagggagccactttgataatacaaaatccattcaagtatttaccaaacttttgtacaaaagacaaaagtgttcacagatctgctacgcatttgcaaacggaggtagttgtagtagtacgttacgtcggctgttctgttcccttctctgatataaaagcgtgtagggtgttgcaaagcggaaagtggcaaatacgctttcgcttatgaaccccgtgggccatggcccttatatattcctacctgacaacttagaccgtcgatccaacacacgaacggccaggatgctttgccgcttctcccggttctagtataaaaggccactcgtggcgcaaaccctagtagaggagagattaccttggaggcttctgagctcgaaccccccgccgccgccgccgtcgcctcctccatccgccgccatggtaaggccttgcttccctatgcttaacgcctagattgctttgcgggattcagcgctgaactgacctctcttcttgctgcatcggcgcagaccttcaagcgccgcaatggcggccgcaacaagcacggtcgcggccacgtcaagtacatccgctgctccaactgcgccaagtgctgccccaaggtaaggcgaagcgaatccccttttgccctctctcgttgcgcgcgaggcacccactggatctctgtgttgatttgggaatctttgctttgggtgcgggacaggacaaggcgatcaagaggtttcaggtgaggaacatcgtggagcaggccgccatcagggacgtccaggaggcgtgcgtgcacgatggtgcgtttcctctcccccgcttttggtttcttttgctgaatttgtatgtgatgcgaaatcgtagtagaggttggatttgtgatcgccgataacacactggcgatttgcatactgctggaaatttttattctatcttgatattgttgaattgatggcatacaatacaactatctcgttgcaggatacgttctccccaagctttacgccaaggtgcatcactgtgtgtcctgtgcaatccatgctcacatcgtccgtgtccgctcccgtgagaaccggagggaccgcaggcctccggaacgcttccgccgcagggtacctgatccccgcctcttaactattatatctagtgcttaattgatagtgtaattagtatatcatgatcggaacgatttcctttatctgttactgcagatttaagaaacaaagtctgatatactaatagacgtaatgattttgcacagtatttgtagatatctcttatctgcacatatggtctaatatctttcaagcacgctgaaaaattaaaattctttagtgtgctgattctatgaagtttaccatttagcttttagtcaaatgtaccggcatacttaaggaagtatactcattcagccagcttctataatctgaaatccactgttcttttttggaactgcatgtcttccctgatggcaaatactacatgttgcctgtgggataaacaggtccttgagattcacagcatcattttcacaattggctgatggtttatgtgtaacatttatgttgggatatgtatgatatcctacaaaaaagccagctaccaaaattttgttagggcctcaatccaaaatggccctaacatcaagtaatcaattttcatcgaattcagtagattgtaagctagctagtctgttgttctttaagacaaccttaatttgtgttaacctgttctaattatggaatgctgattgttttgtgccaatgcttacagtatctagcttcttgctagtgggtttgtgtccctctttgttgcatccagaattcagatgcgtttgtgatagtatagtagtatcaaagtggctggcctatgtatcaaaaccacattaagatatctgcaaatatgtccactcatcctagaaagtgattaagaggagcgcatggtgtagttgcgattgatgtgtttaggctgctgttattgatgggctctattgtttgttattttgatccatatttttttgttctcaagtctatttattttggagcgatcttaatcgtgagattatatgtttctaaactagttgccgctattttgcaggaggataggccccaaggccctcgtccaggtggtggcgctcccgctcctggtggagctgctgctcctgcccccaacgttgctcgcacctgattgtctccggagtgataaaccttttttcagtcgtttccctaaatctagcatgataccagggtgttgaactttatctaggaccaacctgttctttttcaaatatcggatctgctgttactggtttcatctttactaaatgtggtttaccatttattcgattcgttctgttcctactcacgccgtgtcagacgttatgtgccgtgtgagtttttctgttcctgctcatgcttgtgagagcaacatcgtatgttctcctaaatcccgagtatgttactttttctttatattcagccaagtgaaacacaatggatgctcaatgtacgttcctgaccaaaatccagaactctaaaggccatctttgtgcacgaaactctgctgatcgggccaaaccgcttggcttttggttcaagctttttaaaaaactgtaactgaattttacattttttgtccagatttgtctggcttatgtcagtttatctcgcggaatccgacgatagcgatggattgtgaatctgatccggccgtccaacttgaatcagacaccatataagatgcctttttgtgggtgggaaatcatttccatttccaatttagccaaacattgcctcaggctgtgagcctgtgaccccaccggtcagtcggccaccgccacctttgcgccatactgcctcccatctctcttgtcaagtcgtcagccagccagcctgccccgtcgtgcctccactttcccaccaatttaacacgattccaaaccacggactccatctggaccgtccaccagcgcatcccacggtcacctcccgtccccacgtttttctttacacccacgcaaccaccacccaacctcaagagagcacgtcgcgtcgcgggctcgcagccgagttgatctgccgatcggccggcggcatgacggcgacgtccagggcgccgcggcggccccgcgtccgcgcccccgcgcgcgcgccgccgccgaccccgatccggacggcgcgcggcgcgcgctccgcggcggccgacgagctcgtcctcgccgagttcctcgaggcctccctccgcgtcccggacctcgccctgccgcccaagatgagcagcaggcgctcgttccgctaccccgcgccgcccccgaccccggacgtcctcgcgggggccctcctgtcgggccccgacccggacgccgcgcggacggctgtcggcgccgccgcggagtccggcgcgttccgcgtgggcggcgcggtcgatgccggcgaggtgcgcgcggccgtggaggcggcggaggcggtgttccgggcgcccgaggaggtgaagcgggagctcgggaggtggttccggaggagggatcgggtggccggtgaggagttctactggttccggccggcgacggcgagctcggatgacgaccgggtgctcgacgcggcgctgcccggctcgacgtaccaggtgttgaggtatacacgtacgccacattccgcctgcgctttttatgccgctatatgtagtaagttttgtccttttctcgcctcgtccacatcaaacgtaggtgcatacttgaagagagtttcagaatttgagcggttttagaagccgattttgatcggataaaatacgtgcgcacttaaaattatgcaaaaggatcagtttggtcatacttgcgtttttgttagctctattgaactactctccactggactggactgaagaatatctcacttgctaccgttctctcgtcgatgtcaattggaatgagctgtagtctgtagagggtacggaactgtgtacatctgttttgagtaccccagagcctccggtaaccgttgcaacttgcaaggaatggaaggcccatttagatgtagagagcgagctagagaaaaaggctggcacctgaaatgttgcaggggtacaggcacagcccatgcaagtatgcgacaagaaatgttgtgtggttttcttttgaaggcgtggatgctgtcttgtggagtcattgtcaaactctatacaacatgccgttccatcacttattttgttccaattttgatgtttcggaagaaaatatcagtggaacaataataaccataatattctgtttctttagcctgagtgggatttccgctgattcttagcgcagttgtcaaaaactcaaaatacaccaaataaatatagccatgaatgtcgaaaattcaatggatatgcgaacgggcctgttctacaataaccccattgggactttcataatggaatttttgtgtacttacatcagatccttcacttcctagggaaaagatggagattgttgcatccaaaatggaggatcttgcacaatgcgttatgagagttctatctgataacgccaggaatcctgaagactctgctctgtctacaggggccgcgtcaatactatgtctgacactatataactgtaacaagttgaaaactcattggagtgagtttggcagcaccaatcctccaaactcgtacgctttgagcatccacctctctggacgagaccaggaaatttgtctgcggaatcagagcgggtcaactttcttcagtttgccggcaggctctatgcttgttacaatcggcaagcagattcaggtatcaacagaaccattgcttattaccatattacttattgtaattctaacggaaacttactaagagtcctttttttttctactcagaacttgctaaatgaactcttaaccaatgaattgaaattttcttatacgcactgaacatttgcatcatcctttatatactatcaccgtctcatactttcattgacatggtggtccttgaatccttaccccaggtctgccttgtcagtacattttcgtaagtattcggtgccatatatgggatcaatccaatccatgtagcctttgtaggctaaattctaattttctatccatctttcaagactgtaatatgagcaatgggcagtggtgcttgctgtatgcacagtttgatccttccatgtgtggaatgtgacacagttttgctatgtgcgaactcaggaatggtccaatggggagttcaagaatgctgttggtgagatactatttgagctgactgatgaaccaaacccgttcatttccctggaactcttgtactcaccgggtcacctgcgtcttcctgatgttggtcgacacgcaagatgcattgaccatcccaagactgtttctttcagggaccagattttggttgctctggttctgctcgttttcttctacctcttctggagataattgtacccaggtttgctcattaatcatgccctcctttgtcaaggcaacgaagccgtgaggtcaagtgtcctagaaggcttatttttacagcttttcttggacttagcttcctgtacttcttcattaatcgtgggggagagcaccgcacgggtggcggtgatgacaggtagtttgagtttttgcctctgtggtttcaaattcagattttgttgctgttaaacaatacgtgatagagtggatatccaacttgaagaaaatgatactgggtggattttgatttgttgattgaggcttgattttgctgttgaggtattgtttggaggtgagatttttattctattacgatggaggagttgtttgtaaaggtgcaaatgtttttatgcttcacaaaaatatattacaatatatgatattattgccatgaccatgtgaaaattgttcattgtatgcccgcaagttgcaactattaccttcatcccaaaatattgctatgtaaaataggatgtgatattatttagtaccactataaatctggatatgacatattcgtattactagatatatcatggatcctgtttagatttgtagtatcacatcttgtcttaggtgactgtaatttgggacggaggaagtatcacaattttcgaatgactattattggccgtacactcgtacttatttatcacctgaaatgatcgttctacgtcctatgctcaactcggttgcttttctctacacagtttcttcgttgtgtcggtccagcatgtggtgaccacccctcccccccaccccaccccaacccacatactcgacctgtggagtttcatggtgatagatctccaaaagtacgtacctgccctgtcatgtcccgcgctattacagtgtactagtgtactactgctctgctcctacttgaccatgctcaatcgatcaaaacctgagctttctttcagtaaaaaaacgaaaacggcgttgcagactcggactagtccgcagcagtaaaacgcggcaccgaaaaaaaggatcacgaagagatccacgagaggggagtaggaacggaacggggcctcgtgacaagaaaacgggggtccaactcgaattgaacggccacccgcagcgcgacgcaactgcaggcacacagtcgtcgccagtcgccgctcgtactctctccgcgaccatacgtgacgccgtgacggccccgtccttttctcgccaaaaggcaaagctctgcacgtaggtatagctcttgcgtttggcagcgacgacgaccaaagaacgcaaagttgcaaacgctgtgctctgcctcttcttctcgtcttcttcttcacgggttggttaccttgggtttctggcaggttgtaggcacctgaaagatggacgtgcgaccaaccaaaacgccgtgctccgtgaccgcctcctcctcctccttcttcgtcgtcgtcgtgttgcccgcgtggtggcggtgtgcgtgagagagtctgggggccttcgctgataataaatgtgggcatctctcggacgattctgctgttgtgctgctaggaccaaggtggtggcaacaaggagaaggagaaagggctgtgggggggactggtgggctacaggccgtgatgccaatctctcaacctccaccgtcctgtgcgcgatcgatgttctagtgtacggtacaggcagtgtcatcctaatcattgcaatcattggcgccatctttgctagagactcccaatccttcgtctcgttgtcggttctattggcttttcccttttgtcacgtccttctgatcatccctgaatttttagtagtaatttttacttacaccatgtcaaaggctcaaagccagcatcttggccttgggcatgacgcatacacgtacaccattttattcggttcagatcgatccttcctgccgtcgatcatggtaaactagaccgtaggtcgtgtcctgcgatgagtgaaacactgctgtctttgtcattctggtacattgggccattgggctgcttcgtgatgccgtgcgcttttgcagtactactagtaagcagcaccggctgcctgcttttgcctggtaaaacgagtgctgtgcacagcataacggcacctcaattctgatgtgtggcggtcactcatgaaggctgctggtagtagtagtaacatttcgaggctgtgccaaaagttacaccattgaattggatctgcaaagggccgtagttacactgcactggaggttgagagacatgaaccattcactctgcactggacgagcactggccatcagccgtctcttcttcagtctctttctctgctgcaggggtgtcacagtcacttgtttgctggagttaattaagctccccatttccattgttactactgcattctccctgctctcgatagtcggatgtgatgtctcaatgttaaagcccttcactgactaatcactgaggcctccgagagagaacgtagtgaatgcccgatgtgtgtggctgcggcttgcagctgcagcgccttttgtcaggcttacatgtacagtagtatatgatgtgtgtgtagagtaggagtaattgtgtacagcatactcctactgtagtagaggaaggaggttctgatctgcagcttgtggggtgcagtaggagtaatactccgtgtactccagtatttgacactggatgcagtgaaactggttcttctgcttcttggcagtcgttcataaacgatctttgcgagaacggtaaacaaaccacgcatacgcagtactcatacatccatgaatttctctctgaatgagtcgaagctgcaaaccgggacacagattgccgtgtgcatgcccaccacaaccgattggcttccaatcctgtcatttctcagacccgatcctggccgaagcttccaacaacagtacgctatgcagtaatcctaatactatctcgcccatgcacagcacagcctgaagcagtgaagcttgtgaaggatcaacgacgacgcagtagttcacgaaagcatctcctgtttcaccaccgccatggcacgcactgtccctgtgcatgcacatacatgttgactcgagaaacacactgaagaatgggacgcgcgagctgcaccatgtcgtgcgtacgcatcgacgatggcgtgcaggttcaccctgctggtactggtacagtaggaccgacggccggacggccggcaagatgggtggacagtggtggacgcgctgttcccgggtattcacaaggtagaaattctacagaaaatcttctatcgcccaacctatctttgaccccaacagccacgcaaattcttgtcgaaattgatgatgtaccactactagttaggtttcagacattcggcaaacacactggcatagtggcatgcagctgaatcatcatccttccctcacatcagatgccaatatgctaagaattcagtggctgttatcatagttgcaagatgtgaacgccacggtggttgtttccaatcattcccgtatggccgtatcgtgctatgctgcaacatttgccaaggaaacgagctattagctagaggccatgcaaatggggacatcgtcatctgtggaaccctatgctgctcggggacaaacggagcggagctacagctcctggaaccatttcaggggtatcccatgtgtcttgtggaatgaagagagcagaaggaattaaattcagaatgatctgatccttaggacatcaaggggagccacatgacgtgccaagtgagctccaagctcaatccaatttatctaagatccgccgatatctggagcttgtgtttattagacatggctatcatgcattcatgcatgacggttttgttcatgtggtccactatataatgcagcccactattgcgacttcttgaccagaagactcaagatgagcaatcattttagtaagactgtcattgttgccttggtattgtcgagtaggtacgatccatatgtcatgatttcatcgaattgttcgtatgctaatactactatttttaacacaacaaagacatttgccttctactcctactgtggaaagcatcatgttttggagaaagaacatactactagcaagttcagacttcagagtatgtagcactgatactttacagaagttggatgaattctttcctcaagctctgcagacacaggctcctcattgatgaggaatggaatctacagactactactcctactacgtatatactacagccactcttgtatatgatgagatgagtagaaacaataggagcagtaggattgcagtgattcaattgctaggttttttgtctgcaactgttgctacttctgtcctctctatctagctgcactacccacaagctgcgagctcaagaagatcgcaattcgcaaggtgcaacaagctgctagtactactagcattcacaactcacaagcagaataactaaaaagtactaacctgctctgaggaaaaagctcttatacaaggacggactgttcatcacttaaagaggatgaggaccaggaactcgcaactgcatcggtactgaatactgatcgataccaggtctccaagaaacagaaaataaaggaagagagacaactgtgaacatttacttgatggtactaatatgttgacctgtactgtgcttgagaagcaaagcttgtccaacattagtacgcgagtcaaggttagtatcctgattcgtatattagtatattacgatactacgattttatcaaaccgaaacgataccgcgatatcctaattttgatagtatctcgatcctactattcattaccacacgatcctacgtaatcttatatagtatcctaattctacaatccaacaaaatattatttaaaatatgatagtttgaaaataatgaaatatgctcaagtttatatataaaaatcaattaaatatatcaaaactaatgtggtttttcttaataaatatctctatttgcatgacatatattattactatattttttatatagaatggctatatgtaattaatataaatattaattaaacttttaaaaaaagaaaatctcttagtatcccgatcctacgatacgatactactttgagcaaaactatattaactaagatcctaatactgacaaccttgtcgcgagtaactcaatttcttgtaaacacacacagagactatcaattaataccaggaatattttttacctgtatttctttagcagtaaaagaagtataagaaaggcacacttgttgcaagtacaattttcacaatatttagatttaaggtaatttttttaaaaaatactagacacaagagcagtttgttctagatcacgcaaatattctagctagatcaaaatcaacttgctatgctaaattattcgtgaaagttgaatagttttgtaagaaatgataagtttgttatttaaattcttagtgaacagtggcaattgcagacgcagcagaccttacgcatttatatagggtgtgttctttttctctattcacctttatgcatgatgcttatctttcattatctaaaaaaaatatgtgcttgatgatctttgtttcagaatgaaatttgtttaataatctattttagaaatgaacttaaagaagaaaatatccacattatactagctacatgactaaaccagttgataaaggcagacagcaatgggagggtctcttcttctctgcctccactagatggcgttggcgggtgaacgctctaggggccaggatctatcaaatgtgatcgttgacaaacgcagggtgatggaggatccgtttggaatgcttctcaagagcgtcttagtgtgaggattccccaagaggttgctaatgttatcaacatcgacagagaagacctcaacctcctatgagaggaggcctctttcggatatggacctcatgtttcctttgtagttcaacttgattcttctgccttctttgtcggtggtttggatcccgccgtttatgtaattattgctgttgtgttgaatttgtgtaaaagatctagctaaaatctttggtggtgtatctgaagcttctcatcgtgtgttagcacctgaacctccacatatgagaggcccctttagggtttgtgagcatgcttttcttttggcaactcgccttgtttcaagctccgtagcagctgagctccaagcctatgccatcggcgtcgtaggcagccaaaggagaataacccaattgccttttcatattgtattatgttattttctgcaaaatgttgattgaaattgtaatttaatcattctaaaagggcttgtttgcaaaactggatgtatcctatactgagtttttttttcttttaaaaaaagaagaatcagggagtggccatttttttctgcgttcctctctgtaggttattttgtgaaaaaaatagaagtggttaaatttgcaaatataacccaagtagcacgtctatgtagcatgtacatgcaccttgcttagttttcttggcaccctactaaggaaaaataacttgtgtgggagcacttgtgagttgtgactcaaatgcacccaccagacaagatgagtgattcgctattcaattacaaaaatagtgaccaacttaaataagaaactcaccgtgcaagttgcaataccaatagtataatttgcactttaaacaaacttaaataagaaattcaaatgcgatatactactgtaatactccatccacgacatactagcttcttagcgatcttcaacattatagtttgatcaatgatttattttaatttataacatattttccataaaaataaaactaacattatacaaaaatattttaatacgaatccaaaaataaggacgcgttatattttagattgatgaaagtaattcaaaaaagttgctactactaagcattagacaaatacaaacaataataactataacttgaaattaaaggctattttaatctaattattgttatacagtttatgttatggttatggaaaccacataccacctccgtcccaaaatataacaacttttgactatgaatctggacacatagttgtccagattcatagctaaaaatgcttatattttggtacggatggagtacctaatagtagttgactaagctcggcaggaccatcatatattaagtcttatacggaattatatctcgtatatagaaggagttctggataaggaatgacgaatacagttctatatgaaaacgagaaggactactcgaattgtatccatattggtctccctagttctacttggacaaaggggtatctatgggtataaatacaagaccccttaataggaggggagacacaacaacagatagacacacaatatacaagccaacatatgccgtcagacatcaacattagggttaagcctagaaagaccaacaagagggatttagcgtcaaatctgatctcaagagctcatactcgaggaggaagactaccatgtcgtcaactatgtgttggttatccatgccgccaagttgacgacagctcgataggttatcccaattattgtacttgtgtgatccagatgaataaagagtaacaccggcttcggccgacaggagtagggctattacctgtcaaataaggggtccgaacctgtataaaaatccttgtttccatctcttttacctcaatctcgcataccctggtaccaactatccctatttcatgcaaatactgtagtcgagacctcaaacgtcgacagtttagttagggtgaaatttactctggaaatccgctcgattttttttagaaaatcatgagctacaattaggagtccgactttcgtctcaagttaacatacaagtttttttaaaagatatttcttatacggctccttttgtattttcaaaagcgaacaaacataaaaactaacttaaacacgaatctatatttctaaaaatgaacgaaattaaaaaccgactcaaacaaggataacgtaccttgtattggcaaaaacattttcaacttttataatagtcgagattaataaacagataggcgtgaacttagaaagggtctcatcttttcgcttatatttatacttatcagccaaaatttgaatttttgacgttaaatttggagttgattttaggggtttttcatcaaagtttatttttcagactttgtttttagatcgctaagaatgcatatataaaatttttattcataaattattcttcaaatgcaaatatgccgtaaaacgatgggtccacaaggtttggattgatgaatactactccctccatcttcttttgatagtcatatttctaaatctaaaaaaattatttttgataggcatatttcaatccaacaacctatcctcttaatgactttctcggatttaatgcgtgactctacattcttccacacaagattggctacatgggcatcgagaaatgtaaatattaatgaatcgcttgtttacaaggaataactggtagcatatttaaatggatgataagtagaattactttggtctgtgtgccaagatgaaatatgactatagtttaagtatgcaatgcggtagtacgtacattgcatcggtaccacactaagcgcgcattcaataagcatcaatcaaactgtcaaaaaaaaagcatcaatcaaagactccaaattaggtgcttgtcaaattacggtttgattaatgattaatccatgcaccacaatgtctcggatgctcaactaacttgacacgtcgtcatatacttgtactgaagtcttcaactctacatcacgtacaacagtagtggtgtagtaccattggacactactacatcctacagataagaggcagagccaatagcgaagaaatactactgtttgactccattagatttgtcattaatattatcatttatcaacaccactatttagtctttaccatagttgatttctacagtactagtagtaccctgttttgcctggattagcctctcacatttcatactagctactgtagtatagtaccataaatgtaaagagacagaagaacagcatagtatcccaggtctggataacactatttatcatacccaattttaggatcattaacaggctagagcaaaccaagattctcaagacgacagctcttggcacgatgggactcattggattcaccatgcaagacaagagttgcattgcattgcactagcacgagtgagcttgagactgagctcttccgctacatcttgatgtccgcgaggttggcccagatatgctcgaacacgtcgacgatgaggtcgtggtactcggcggcgttgagcgacaggtagcacgccaggaggtcctccaggtcggcggcggtgcggatgccgttctcggcgatcatctcctccatggactcccggaagtccctcctcgggtcccgcgacgacttcaccaccgcgaagctctccgccaggggcggcttcgtcgtcggcgccggcgagcgcgccgccgcgggtggtggtggtggtggtggctttgacttcttggccacgatacgcggggtgttggcgcgcgtcttgaggcggcgcgcggatgacaccgaccgcctcggcttgctctgttcgaggagggtagtgggttttttagccgacgcgcgtctcacgacgtcgatgtgtttctcctccagatcgcagccgtcgagctctctcctcgccggcttggtcacgataggcgggagcaccttgtcgggcctcttctcggtccgcaggtcgatgatgatgtccgtggcggaggtgatcaccttgccgtcgagctcgtcacacgcggcgacggcgaccgtcggcttcttgaattccacctcttcctcttcctcgtcatcgtcgtcgtcattgtagccgacgaacttgtcgcggcggcacggtggggtgtcgggcgcctcgaccacgacgagctccggcttgcgcccgcaccggcagccggtggacaccggcgaggacaggacgctgctgccgctgacggacggcgccagcttgacggaccgccgcctgtgcctgcgcctggacttcctcggcggcgacagctgaagaggagggaattgcgtgtcggagcacttgggatggagcggcgaccccacgagcaggtcgccggcccgcggcgtgtagtagtaggacgccctgtgcgggagcgacaacgcgccgtgcctgggcgtgttcggcagcggccggcacgccctccccgcccgcgacacggccaccgaagactgcgtgaccaccccaccgtggctggccccgccgccgccagcgcccgcacctccccgggcggcgcgcatgtcgcggagcttgaagaaccacgcgttcgggatcatgtcggacagcctgaacttgtgcctccccatggcgccgcgctgcgctctgagctccacagaatgcgcggctgctcgagtataagaagagcaagaagaacaaagctttgtgtgggctgcgtttggttgcttgctgctgctgctgcgcagcttgctctgtacgaggaggagcagaggcgagcagaggaggagatggcgcggagcagaaaagggcgggtaatagagtgggggatcggcgaggcggagaggaggggacgtgaggcgccttttgtcctcgctcctctctatgcggcgtgggcccccacctcgcatggcttcactctctcagctctcatcagtgagacaacgccacggtgaggcctcctcttccattacagattatttcaacagtactgtacttactgctgctgcctgtatttttatctgaaaatccctgtaaatctctcgaagttttggttgacatgagaggctaaaaaatgtttcaagggaggtcggggataggatgataggatggaaagcgcaggtattgttggtcggagaagaatgggcctacgctgcactgcacgtaggatatactactacagtagacaggatatgatatgaaatctgaagaaatttcgcttcgctcgcttgtggattgtggttacgtcctttgcctggctgccttcaattcttttctttctttctcatctcatcaggcctttaattacgcgtcgaaaagcatccttgtccgggacctcttgtttaatccttttatttccatcacccctgggcgagacaagcaacagtactactactggtggtggtcgctggctcggagcttgagcggtcagtctgcgagatttgccttcgccgcttgcgttcacaacaaaaactccgagactccgagagggtgtgtttagttcacacaaaaaattagaattttgattgaaattagaacgatgtgatgaaaaagttaaaagtttatgtgtgtaaaaaaaattttatttgataaaaaagtctaaaagtttgaaaaaaaagttgagaattaaaccacgccagaggctctaaatttaagatgccacgcgcagcttttcgggccaaggccaatggtcaaatcttgcgctgcaatgcaaagcaccgaaacgcaatgcagcgagcctgatcggccgcacgcatggcggcttatcgcgaaagccacacacacgcaaaaccaaaccgtaatcctgtcatgacgcagtactaaacttgtacttgcatgttagattagtgtggttgtgtggcacttgtaaagagtcaactggcaagtggcaacccaaaagagggacgtgggtgaaggtaccggagcttttgatcgtaaaaaccgagtcctcgatcggcatgcttaacacgggagatggatccagcaccggcaccaaacggtgtcgataggattgatggctgcgtgcttagtgctcggcgatctcagaaaggtgctcgttattgtagactagagtgtggtcctaactccggccctgaggcgggtactcgcttcgcgcgcgcgtgcatcatgctgcagagggcagagcccctctgccccgtggacgagacaaacacaaggatgcaaaaacgttgatcaaaaccatattattattttttttagtttttcacacgcctgcttaattaacccatatgcattgcgagtgcgacacacagcgacagtcttagccaacaagtgcaatataaatacttgaactaactcattctagcgccggcaatataatactgcaaccggtagatgagatgagatgaggatggcccgcgttttgcccagcacggaatcgcgcttgcgcgcacggccggagggcgagagggcaccagcgatgacgcctcatttagcgcgcacggagcgcataatataggtacttaagccgcacggttcgtcgtcgccgtggccccgcgcgcgcgcttaattttttcgcggcctgtcgggcgttgcgcccgccgggcgagcggcatcgccgactccgtctccacctactcggctacacgtccttcccgatcgatttgttaaccgcgcggaaacaaaagcgcgccagcatcttggttcccctgggccatgcgtggtgacactatttgcttgccttcttttccgggctcctagttacctaaactgcttattatcaaatgttaagagtgtctctctcactagccatgcaggcaaatggagtgcgtatcagctggctggcttcctttgacttggaggcatttccgtgctagttgcagttagccaacaatggatgggctcagctcaaagaaaaaaaaaactacgaaagggctaacccttcacaagttgtgtctgtatcgtggatggaatgatgatacgttgatcttgtttgaaactgaagcagataaagattttttagagaaaaggccgaaaggcccagcttactatcaagcataagagtgcagatacaagggtaaacgctggggaagccagcttgaaatgatgtgctgaaaactcaacttcacttctattaaggtgctgctggcacagcgctaacaagccaggaaggaactcacaaagaaccacacagcaaaaattaacgcactagtttggtcctgacgcccgaatactggcaagcaatgagtccttcagaccatccacttcgaccttcagcttctccggcagcagccctctccactggatcaaaaacgaaacagctttgtgagggagatgacatatattagaaagcagcttgttattgaaaacccagtcatttctcacaagccaaatcgcccaaatccctgcagaaattacgtgtaaaaagattattgccctatcatcccccatagtcatcaagatattcataaactccctcctggaagaagggacgtgatcccaatgaaacacatctctaaaacaacaccataaaaacctagctggtgcacatttaaacattaggtgatccacatcctcttcagcaccacagaacttgcagaggggatctccattccacttcatctttttaagccgatgagcagcttgaattctccccttaagcatcagccaaacaaagatcttaattttcagaggcacgggtgtcttccaaagttcttgcatctttatgtctctaatccccccaaaggtcatttctctatagagagatttcgtagtaaactgtcctgattttgttaatttccatctcatcctgtccctatccgtagataagtgaacatttgcaagatctgcaagtagttgttcccattcaactagctcctcggcaccaagcgatcttctaagatcaatcctccagccatcagaggaccataattgactcactgttttcccaggatcagccactatactgtaaatgtagggaaatttgattttcagaggtgtatctcctagccagacgtcatcccagaatctagtaccactgccatcccctaaatcatacagctgcccaatttcaaccaatgttttacctcatgcaaacctctccagaattgagagcatccctcagtactagactggaaaaagcctcccccgaagcagataaagattaagttgatatacgtaaaacgagaaaactattagcatagaattaattaatttttaattattacaaacttaataaatgtatatttttctcacgtagtaatggtgttagatattgcaacaattttataatccattgcaacaaatagaaatccttgtagtgaaaacaatttctatatagaaagttttcacaggaaacataacatttattagtttaaaaaacgtgctaacagaatcttaattgatgtaatgtgtatgtgaccaggccgattgatccctgtcgcggatgttactcatcctgcatgcgctgccgatcgatcgacgagcgtaggtacgttctctacgtcgttgcctcgtcgctgtttgttctccatcgatcgggttcagattcccaccggtacttttcgcggatcatcatgaggctaatcttgtgttttgtcacgagattagagcatcctagtcatcaaattcctcagggagccctgtcaaagtacgtacgatacgccggctgcgagagcagctggcgacacacagtacctgcgttgggagtatacgcacatggacatgtgctatacgcaaagcaatggtagcgaagggtcgtactcgtacacgactcgggggcatgtattattagcgtatttcggccgtctccccttaaatcgatcggtcccgtgcccatctgctgataatgatcgaatacctgatggcgatgatcaatacgcaacaaagatacgggtatcctttggtgtgacggaacgggggacggctggtggtgtggtgtcttcaattcagctcaactcgattttttcatacagtcctatactgcatggtcactggtcatgcaagaaacgaataaatatgttcagtgttgcctaattggttggtagcgtacacgcacaaattaagccgaatctttcacatatctcgccccgacaacgtaactccatatcgacctctcttgaatagggcaggatatgaacctatggctccttttatgctgctctcaactctgaatcttgacttgatgaaccagacgtgctacctgtgtatagtatccaagatgtacgtatgtactccgtacatagctagtaagtgtgctgctatagagggtgtttgggagagaggtaacccctctcacaaaaccataagtactcgtttctgccaatcgctagggtgaggataacaactgttggagagtttgacctgacgtgacaacacacgtgtgaagcacatcaaagcaagcgcagggtagggtatcgcctctcgcctcgccgaggccgtagaactagctattcaatgacaaggacgccgcagcgaaagcctctggctctaacctctaagcccctgttaattttttttcatcttatacccgtcttaattggaatccagctcatgatcctaactggcccattgtacatagactagggtcttcttcaaccggtcgatcagtttggtctcaggctgccagccattgcattaatccaacaagatttgcagttgccgtagtaggttcattaagcgaggtccttggaaagaatctcgacctactggccggctcggctctcactggtgcgtactccatttttgcacaaatgcacctatgccctgacgacgatagaaaaggattggacattgttgcatcttgggactttggtttgaaaaaacaggagtcccccctacaaaaggtacgtgtcatggcaccatgatgatgattatctccgcgtcgataccgcaatctgatggggaaataaagctgcatccatggtgatggggaggcaacgttgctaccaggccatcatggagattgcggcacctgaggtccacatggttgttgcattgttgtggatcgatccatccattttgctcggctttttttttttatgtttgtttttcgaaggctttgtatttataatggcaatgtgagagcacgttcagcggtcggcccaatttatttccacacttccaaagcttcaaataatcaatgttctaaaatacggagtactccaacttcgatggctcaatctgaacatcaaagtcaaccgacaatactccagcattgttcatgctactacctctacttgcatagtcgccatacgttcagctacaacgtggaatagtgtcagcgacctaacacagtaggttttcataatctaatgaaacagaccaccttaatgagcatatcattacttagttccgacttggtcgctaataacacccagattctaagcattgtgctattgatgataggctttgatccctagagcttaattcactccagtcagagtaaaatcctggtctgctcggggctctatgtgttgtacttagcggaaatcatgttgttgaacgatagagtactagtaataaagaaccacgtctaattactgtattttgcacacggcttggacgatgggccgagtgtgagccgtgggcaaagctcaacctgtaattcagtttcttgtaccggacaattgagttcctatcagaatcaagtagtacttgggcagctagatagcccaatagcccatataaaaatccctataaaaattcggaggattatgcaaatctgagaggctgggcccaaccaaaaatttctgactagtatttccaactctcacgaggagaacattcatccacaaatatcacctcctgtacacatcatctgaaccagccagcaggcaaccagccacgttgcccaaatcgctcctgaccagacacaagcgtgcaagcgcgcgacgcaacgctcaacgccgtcctctcgcgcctgaaacacaccccggcgtcgcagtcctctcgtttcagcaggctcgccttgcaccacgtagccttgcagccgccacaagactcccatgcatgcgcacaccaaacgcctcctacatatatataataatggtttgatcagtcaccagttcagtttctacctgaggagaatcaatcaccgatctgcagactgcagccatggccatgagggcaatcacgctgtcccactcgcagagcgcctcgtttgggcaccaccaccaccaaaccatgccgtcctccttcaggccaagcactgcctccaccagatcagtgaaggtctacgcaaaggaagatgaggagaagggcagcaagcagtcattgttcgggagcatcaccgaggcgctggacttctcgcaggtccggtcggagaaggacgcggagcttctgtatgaagccagagaggccacaaaggatggaggaaggatgacaaaggagcaggtatccattgaactactgatccgcacaaaaaattgtcgatcaatggtgttatttagtttagtagtaacttagtactgactatacacggcatggattttctatggtctgacaagttaatttgatttgcaatgaagtatggagcacttcggaggaagatcggtggcacctacaaggatttcttcaagtcatatgtggatggtactacctcatatatgctttacttgcagaatcctaaaattacttctgatccaaaaagattatactagtaggagtatcgcacagtcctaactgtttctgaattctgcttgcagttgacggggaatacgtagaggaaggttgggtggataagacctgcaaagtttgcaagaaggacactagaggggaacccaggcaggtcgacaagctaggaagatatgcacatgtcgcatgcttggagaacccaaaaccgaccaacatcttcgccaaattgttcgccagatgaacttcaattgtacaatcaaagacatatttttactcatgcttagatacatagatggtgttgtagccccaagaatttgaacaatattatgtgttcagttttgccatataaaatggtatacagggagcatgtcacacattttccttcttcaattgatccatttactcacgaacaaagcaatgacttaacagacctgaacgactgaaaatgttaaatattacatcaagtattacagagcaagttaatacactaatctatctattagcttatgcccctggtctaatataagaggagctcaacagaaactcaagtcaaaagaaatgctatatagagctaactggttatctgatgctgcttacctaattctgtagctatatgacgtgttcagaagtttctttcgttgaccatggacagatacaccctgcatctgatgacagtgcatccaatcttaaaccccggcattactgtaaacccaacactgaccttgtctccttctttggttatcttggatggaacacattccatgtgtttactcctaaattcagtaccacccttgacatagaacatctctgctcttggattcagagaacgtgctacggttagggacgcccatacatatcttgacattgtcacaaatgcctgataaaatggtgttcttggatggccgccattctcaacaaatgatctatgatccaaatttccgaagaatgaatcctccatactaggaggcaaaatggccagatacttttctcgacagaatctcccaaaacaagagtctggggccttcataagagcatcaaaaggatcactgaaactcattacataatcgaagacatccagcgaaaggtactcctctttgtgccccatcaacatcatacaagcaaagtaggcctcaacggcgtaattcttgtgagaccttttatcatagacaacagaattgtctattggggatgttaagttgccaagattccaccgagaaagtttcatccaacggacgacgagttttgcaaaatcatggatagactttgtcgaaagctcgaataattccataaacatatccgttgatactcccatcccaattgcaaaacttccttctttctgtaacgcactttgaccgatcttctcctccagttccatgttcttcctttccagttcatccaactccgctcgcaaacacacaatctcagagtctctcttgcacatgccagcttgcaactccacggccaacttttgttgctcctgaattctagagcccacatagcactggtacattggatttctccatttgttcatgttgacatacagatccttcaacccggcagtctcttgaagctccgatgtgaatcgctcatcagcgatcgtaatctcttcaggatcatatggcacaagagcttgctgaaggttcacgtaactcaatttgaggccagaaatcgcgtcgagaagcctctcaacaaacgcttcctcgcagcgagcagaggagcattcagagacgctctcatggtcggacacatgatgcgggtggactttcaggtgcgcgccgccgtcttcgctgctctctccggtggcgctgccgtcggccttgggcttttcgcggacggtcggcgcgacgccgacggagcgcaccttgcagatgtcggagatgcgcagcagcaggcaggaggagggcgtcctcctcaccttctccgtcgccgactccatcgcaagactgcgtactactggtctactgcaaaggcgaggcagagcagcatcaggctccaagaacgattcaagatggttgagacaggaagtaaaacatgcgcggattccaaggcgagagtttgcgggtcttcgaagagattgattccaaccggatcaaagccaagaacacgataaagtctctgcctttcttctgaaggttttgggttttagccgattgccaagaagaagaaaaacatcaaaaattgcaaacaaacaaacaacttcaccgtatattctcgcacagtcatgagtactcagtaatcactaaccagtgtaccttcagtgaccaccccaagaagctccaataaccgccattgaattctcgcgcctgcacggatccaagaagccaaaagcctgaaagaaaaaagctgcagcgaaggtgaggtccctgctctgaatcttcgagaatccaagtggttttgggagaatgggaggcaaagacctcgtgggctccaatggattcgaacaacaaaaaagggtggatcgaggaaggcgagtgggagccactcactcggggcagttttcttttgtaatccccagatgctaaggacttggccgaccataggaagcggggctaggtaaaccctaatctctcatttatctctgactcaatgcaaagactgtaactgcccatgcggctatgccatttaattttagttaattttaggctctgtaaagactgtaactgcagatctgacttctggccttctattccagatctttaccatggggatagaaagcgggaatattcagagggtatcgccacgtttttcgttttttctgacggtgttgcatgccgtgtcacgatgcagtaaagaagaattttttgggttggtggaagttgaatttgggagaggtagtacagtgctgaatggcgctcagtgttgttcagattttatgtttctactgctatctagtggtcctcagggtcaatcttgaatgataactgagatttctcggagggaataatttgctctgcccatccacatacacttacaatattttgcaccatcaaatagcctacttgtgtgtttgcacaataaacaaccccctaggagcaaagctttaaccaaagtttctttctgatgaacaccacacgattggagataagtaatgccatgtccccaatgcctcagtgtaaaactaactgatgctcgtggttaagcactcttccaattgattatgtctgcgcctttgagttagcccatacttgtcagttgccactccttaaatgcccagttgcctagtcctttaataatttccatgagcaaaaagcaagcagaaatactactagcatccatgcgagccataatttgttcatatttttgtgggagtaacaaagacgtggagatcagccacaacgattttctcctctgatacgaactgtttaattatctccgcagtaatatctgggaaaaaaacaaaccttttcgaaatacaaatcagtataggaaacaagtaggagtaacaaacgtacctggagccggagcacgtactggtatacgttaatacgtacgcgtgcgtgcagggttccaccactcgccaagacgatcgagccagcaacacgtacctagctacgaaaacgaactctcgccgatggttgatctgtcaggcctcgagatattcctcgccgtcgtcgcgctcatcgccgcgatctgtgccatctcctggaccgtgcgatgcttaatcggccggcggttcgaggtcgccaccggcgatcccaacggggagcgccaagggttgctgaacaaggaggaggtcgtcatcatcgacgtcgccgccgccacggaggcgaggggcgacgacgtggcgctctgcgcgatctgcaaggggaggctcgcggtcgcggtcgcggacggcgggggacagccgtgccggcggctgcggccgtgtgggcacgtctaccacgcggagtgcatcggcctgtggctgcagagggggacgacgtgcccggtgtgccgcgccgacgtcgttgcctcgcggaacgaaatcgtcggcgcgatggcgtgagagccgcgcgcacggggcgcggatgcgtgcgaccggggggcctgggtcgagcgccgcgttgcagggttgcacagggtaacatcaaaatttatgtttccatgttgtgtttctcttccggagatcttttttttgtacgtgcacaaaattggaacggagattaagctctactcctacctactttgactcttcttaagcccgtctgcaacaagaggccgatggacaataacattagcgctctggtccttttttcgtttagagtatccggaccaaaatacatgtctaaatcagtaaaaccatgggccgacaggacgcgatcttgtgttgctcacaataagcccaccagatcacgacgtttctagtcagcgacaaaaagtagcccatcacggtatcgcttcacaaagcttcgctctcagcccatcttgccaacgacaaaacttagcccatcacattcgcctcgcccacgcaaacctctatccgtcgcttctgcagtcgctgccttcgctgcggaccaacgagcgcgacactgccacgccccaacacaaacaaacaggacgctgtagctccaggaaaccattacataaaccattcggtcagcgatgcgcaatcatgattggtgcaacagtagagaatcaatcactacataatactattgtcaccagctagtattcgtataaatgtttttttagtacacaatccagtggctgattacaacatgtagacttcattaagtcctaactaacccatcgtccccacagcccactgaaaaactaatccgtagctgtttactttcgtattcatatttcctcgatttgctgtcaatcggatggcggcgtctgaatgacggacatgctagtttgaacaacacacagccatgaatatagtacaatatatttcttacactcatatatatataggtcaaaatcttcatgcgatgtgtaacctggaagcctgagatctcctaaaaaacagaagggtcagacaggaggtcactgattcatcaagctgagcaaacacgctggcatgtgtttcaagtcaaacctatttcattagtagcaagtcaggagcaatgttcagattacaaacccgtcgatcgtctgcaactgtacagaagtgcagaaactgagaaacataagctagcccgcatattctcgtagtgttgatcccttgcgagataagatggtgacattcgtgtctcagatttcattgaaagagtcatcatttgagaaattcggctttatccagggttaacaatccatatgattaatttatggattgaggataacttctctcggataatgacaaaaccaggtaatagatcgataagaatcatctaaaacaaactcgtaatagctcgtcacggtaaagtcgcattcaagcctggacccgcttgatcgatcttatcataaacccctatgtactctcggcacgatcaagtgccagattaaattattactcccttggtttttttagtttgatgtttttgacatccatacacatattctatcattaagttttacaatatatttataaaaaaaatattaaaacatataatcatgcgaaagcttttttcatgagtgagtatagctattactaggggtgggtagaaaaaaaatcgaactgaaaagaccgaggccgagaaattcggtcctcggcagtgaaagaccgaattttttcggtcaattcggttagtctccttggttaatcgaatagatcgcaaaaaccgaattaataaaaaaaaaattaaatgcaacctataatccactaagttcaataatattaaactctaattttcacattcctacttcttctaggcatgcaacctaataagagtctttactcatacgtgcttataatttttttttgattttgtgttgaaaatttcgattatttctttgcatatatgaaaatgttgttaaatttcggtcaggaccaagaccgagaccgaatttgttggtcctgaaatttttgcgttgaaattcggtctacactttccaatgacccaaaaactgaaaaccgaaaccgaaattttctatcggaccgaatgcccacccctagctattagcattgctaggcatattgaattctaatgctttttctatttataaatgatataagatttcaagatttgatcgcacatattttaggacatcatttattgagaacgaatgtaacaataaactttaaaaattctccaacaattcctactaaagcagtgggatttctaagggtatgctcgatagtgcagttttgtaactcattctccccgcattgaaaacaaaatagctcattaacgtattattaattaagtattagctaaaaagttgaaaaataattaaaatgattttaaagtatttttttctatattttttataaaaatataccgtttaatagtttggtaagcgtgcgtgtgaaaagctgttaatgttgaggttgggaaaggtagcgccaaacacacccggaattaaattatgaatgtagtaattttcatatgtggtataggcccttatttggaatgtttgtgctttgcgacaaataggctgatgctacaccaaaattcataatccagagttcagttttttatagaagaagtttttgatcattttcatccatttcttattcaaaatcgtggtaaacaaaactgaagcagtgaacctcatattttaggctccaagctcaaactatttggatttttttcaatatatacctttttttcaatattttgtgccgctttggtgtgtaatctctccgcctccatcacaaaataagccatcactacatcttgcaattgactgtatttttaaaacatttttaaggaacataccatagataaaagcttttgagatgcacttgatgttgcggtggcaagaggtatatggtgtcaaccccaatgtctcgtgtttaatctccaattccaaatcttgtttaaatagataaaaactctttttatatataaaatgatagatccaagcatgaacctgcagcatttggcgatagatccaagcatgaacctgcagcatttggcgccatgtacatatatagcatggcacacgcatgaataacccgttgactgtatgatattttgtactcctgatggctcaattgacctttgtatgttacaatcatacacaaagtcaaatactgtgatggtatgcagtatgctataaacatacatacagtccctgttcttttcagtctctcttttccagttcttttctggctatttgccagacacttataataatacaatttctaaaaaatatatattctactgtattgaccctttatactaatctatttataaagtttatttcttaatttattaattcatcatgttaatcaaataaacaatatgtttcaataatgcatgcaaaaatccgtgttcggaatgttccctttttatgaaatgacttgctaggggtgtatttataaaatttctcacggaaaatggctaaaattgtgaaaatctcaccactgatgataggttgataaccatccaggaagatgaaagtgattgaatcgatggcgacaactagttggatgaaatttctcacttttcccacggaatgctatcaaccggcgtttaaatcgagcttcgccatttctgtggacgcacccagctttgggtggcctctgccacgccgcaaagcgtccgccgtccaggcaggcgtacccgcccatccattctgccaatcgctttgcggctgcaatatcgacaggtttctgcaccggatttccgcagcgcggcactgttcgagaccagtcgtcgcaaccgcgggtcgacgaatggttgtcatcactacaacgattgatggtgatactggccaaatggtcccagtaaatgcttacaagtttcacgtaattccttctcccgctttcttctcttcgtttgactcgacgggatagatagatatcagtagatattagagcagttacaatagcagctataaaccagctataaccacatatcgagaaaaaaaagtgaagagagagaataaagcgggctacatatttatagccagttacaacacagactccgaaacgttatgtgtgtatgagaggtgggaccgggtataaatagtgtagtacattttatagtaaactattatatgaatagtctattagattagctatagatgatttggagccagtagttgactatattattaaacttgctattaggaacagtggttctaaatttccaactctccttcggtcattttcagttttgtgttcgtctgatgcaacttgtttttgtccaagtgcgtgcttgatcttcgcttcgtcgactattcgacctctctatacactatacagccacgaccttaatgccgacagcagcgaattaattagggagccaattgcctcgctgactgttcatgcacaagtcaccgagaaacagtggcatgaattggattgtctgacaagttcaaatgacgggatttgttctggaacccaagaatcatttcaattttaaatcggctgacttccttcattgccagggaagcaatttggtttcgactggaagaccagatcaccagatgcaatgcacgcggcattgtcagttgtcacaatggcgccgcaccaattaagaatagtgagcccttccttgcttcgaatgcagcattttgacactgtcagggaacaggaacgccatcctctgtttctcttttctatcgatagcctccgaagagcacgataggagcacgaacacccatcttttttttttctctttttgtatcttacccaaaaccgccagcttgatcaagatttggagatcaaaattcggcacgctctgatgggggcaaataaaaaaacaaaatactttttttcccaacaaagcaacgcgcaccatgacaaaagctcgcaccggcgcatgcagaaaagaacacccgcgtgatcccagaagccgccgcgccgagcagccaaacgccaaaaaaccgggagctcgtcggcaagcgcgcggcggcacgaggacgccttcctgccgcccaaccaaaaggcggcgccgcacgtctgtgccctcgcgggcagaacgttgaaccggccgtggcatctactactcctcctacgcctctttctcgcaccaatcaagcggcctgcaactcgcggcgtccccttcccgtgccgtgcaagtgcgtgcaacccaccgtgtcgcgaatcatgtccgcttcgccagcggggggcgagtctggccgctggtcccaatcgtcgcaatcactccggggggcgcccatgggccagtgctggcggctgctcctgccccgggacccatcaaccaccccctatgatagcaaaagtgccaaactgcgcgtcccagttgcttgcttctgttacattggatcatggagtagtagacgaccatggacgggggtccattcggtaagttaaatcggaacaaaggcgttgctttccttcccataccaaatacgagtagtggttcagacgtcataaaggtgaaggaaaaatccgggtatccttacgaatggcagtacagaaatgtgcatgtgaaaaatactttctatcttcgtttatctttcgagaaaagaaagggcgcaatttgagttggaattggaggggattacattggactgaagctcgtatgcacagttgatcaaacactcaccattatctctcggagcaaagaatcttgacagcctaaaaaagactctgtacagcaagaaggggggaaaaattatgtttctgaacttatcctacgaggcaagttgtgattggttttcacgaagccatcatggcagggggcaccacggtggcaacggggcaaccgccgcctcgctccccgtcggcggcggaggcggctgcccaccgccggcatatccggccgagcgaggcggccttccgccgggcgcgctccgtgccgatgctcatcagctcccagatcgcccattccacgccgggcacggccatgacctgggtcaccgccggcgcgcccaggcgccggcagagcagcacgagcgccgccgtggcgttctccctggcccagtccgtgccgcgcctcatttccgccacgagacgcgccacggcgccgtcgatgttgacgatcgcctccgcaccgccgcgcttggccagcgcggcgagcaccgccgcggcggtctcctccttgctaatcgctgacagcgccacctcggcgacgcctgcgtcaacgagcttgccgacgttctccctctcgccggccagcgtcagcagcgcggccaatgcgtccttctttgtgctcgtcgggccggtgcgcacgagatgcactaatttctccacgacggattggttcctgccgagcctgcggcggtaggaatgcacggacgccaagctgagcacggcggcggcggcgttctccttggcgcgccacgtcgcgccggagctcatgatatgggcgaccgcctcgacggcgccgtcggcgtgcatgatgcgcttcttgttggcctcgaggatggagagattaagcagcgccgtgacggcgttgagctggagccctgcatcctcggagtagagcaggggcacgagcagaggcacggctccggcctctccgacgaacgctcggttctccgagccggacttggatagcagccggatctcgtgcacgacgcggttggcggcatctggggagaaggagacggacagcttcttcacaaggaacgacgccgtcatgcgcgccgcctcgagcgcggccttgttggcggccaccgcctgggcctgctcgctcttgctcgcctcgcaggcttccatggcgacgccgttctcccggcaccacttggagatgaggttcttgagggccttgttcgacacgagctccagattggccaagacctgccctgtcttggggcacgttgacttgccggagctgaaccaccggtcgatcgactcgcgatcgtacgtctggccgctcgcgacgacgacggggtcgcgcattagatcgagagagattgggcaccggaagtccgacggcggcaccgggggctcgccgtcttcagcctcgacgtcagccttggaattggaatctgaaggccgaggcgtggcgctgaacaggacgcacttggcataccggaggaggccgacgagagcgatcatggaggccgtccatttctccgaggcacggtcgccgatctcctgctccaggctctcgatctcctcgctgcagctcgccgggtcgttgatgccgacctccaccaggatctcctccagcctctcccgctccggcacgatctcccgctcgatctcttgtatcagcgacagcacgctcgccttcagcgcctcctccgactccggtgccggcgagcaccgccggcactggcgcgacgcgagggcgaggacgtcgagcacgtcgtcggcaagccccagctcgacgaccggcaacaggtcgagcagcgtggccaggtcgtggttgagctcccgcagctccgcctccatctcgtcggactccagcagcagccgcatccggctgcgcgccgagcaatcggcgacgatcgccttgaaccgctgcagcaccaggagcacctcccgcaggcacagcgacgccgaccgcggcagctcccccgcggcgccgcacagcagcaggtcgtcgaacgcggccgccagtagcttggaccgcctcgagatggacgcgaacgcggcgcgcaggaacggcgcgggcgtgtcgacggcggacaggtcgcgcgccaggcggtgcagcggccggagcagctccccgtcggacggcgacgggggcggcaggaacaccgacgaagagccagacgacgacggcgccgccgccgccggattaccagccattggcgcagtaaccacaaccaaaagaaaaaatccttagcttattagtggagtaaaaccaaacggaaatggtggacacgcagcggagagctcgaaaagagagagaggtttataaacttcggaggcggtaggcgtggcgtgacgagttggttgagagctggaaggaatcccctagactgattttgcctttttccgtttatttctattgtgattgttatgcatcatgtgcttagtttatttgtgatggtattaggattatcttatatgcatactatagtattaatgtattatgatgcattggctggaaaggggggcagggtcgtcgcatggtggccgttggatgtggcgcgatggacggccgggatgggaattggatgagtgatgatgagtcagcccgtttcgtttttgatcggatcgcatctcgctctcgggtgcggcggctgggtaagactttgggacagatgagggacgagctaagcacccgagtggagttaaaagtacggtgagagtggcttttgtgagaggacaggcgaagatgtggaggactagatatcgtcagaacctaaggatagctgtaaagattactttgttcaaatccaggcaattttcacgtggaagtgggagacctgtcacactaagaactggagtaactgctagatctatacaagagccggctgctggattaaggtcctgtttggtttatagagacttattccaagtccctgtcacatcggatgtttggacacttttttaagtattaaacatatactaattacaaaacccattccataaccttggactaattcgcgagacgaatcttttgagtctaattacgccatgatttttacaatgtgatgctacagtaaacttttgataattatggattaattaggcttaaaaaattcgtctcgcggattagctctcatttattaaattagtttttttactagtctaggtttaatactccaaattagcgtccaaacatccgatgtgacatgggctaaaaagttttagccccatctaaacaccccctaatatgcatgtcctctacagtgagtagtagctaacatgtcctattccgtaaaaagaaaataacggttcgttgttagaattgaattttttttacggaggggtacaatatagaaattttatgcttactataatataaatattctactcatcctagaattttatgtggatgcgacacatcctaatactaatactaggatgtatcacatccgtctaaaatatcttatactacatccgtcccaaaatatagcaactttttgctatgaatctggacacacagttatctaaaatatcttatactacatccgatttgttgagatgtgaaaaggaataggtcccactacgataaggctattgaatgacaccatgggttaatggtcaccaagccaaggacatcgtcatgttggcaagaatgaagtcaaacttgtgatgggaataaagtcttgacaaaggatggtaaagacctcggcataaacatggttcaaccggatggtcacaagtgttgattttggcttaagcattgaccccaagttggatggcgcaaggcaaaggtataatggagctacgaatgttttcttagtcttttcccggtcttggtgtttggtgtagaccggatttgctagatagacgtcgtactattaagaggggtctatgaagcgagcatgtggatgatcttgcgccatattagttcatatgcatgtaggtgtatttggtgggcttgtctagccaagtgtggtgagtattatcaagtcctaaacaaagagatatgtgggcaaatcctataggtttgggtagcctcatgtggttatgtccggtggagtatcctttggagtgtgagccctttctccctgagaaaagttgtgtttcttggatggattgttcatggattggatatccctttgaataagctttccatagagtccaagagcgccaaattccgagacccgagtcaagagatatcgcattttactaacggttggttgtgctgaaaattaacctgcggtctgaccgtgggccttaggacggtctgaccgggcctgttagccggtctgaccggcgtgataaggccggtctgaccggcttcaatggtctgttgcactggtctggtttatggtggtgatacagagctgccagagccgcaaccggtcagaccgagccgaaggaggtctgaccgagccgtggacggtctgaccggccactacactgcggtcagaccggccaggttgagtgggctcaatgactgccaactagccgttacaaagtagtccggtctgaccggccactctatggcggtcggaccggcagagcacagagttggggatttcgaccccaacggctggttttggtggttgggggtatatataccctttccccagcaacaagggtaaggttttggcactccattgcattatcttgaacccttgcaagagctctcacactcttggcacttagtttatctagtgaggtgttagagagtgagttaagccaatccaagtgcattgcttcattgttatagctagtgtggcacttgatcatcctcggcaagcatcctagacttgttactcttggaggttgccacctcctagacggcttgtggaggtgttgcccggtgacctctctgaggagattgtggaggaggcccggcgccgtttgtgagtggtttggagttcaccaccttcgaagtgaaggaagaactaccctagtgatcgaggcttgggtagtcctctccgtgggccggctcccaccttgcccaccccttgatgaagggggcgtgcggtggcttcgtggttgagcggtggagttgggctcgcctcaacggggactaggaaaccggcaagtttctgaacctcggtgaaaaattccttgtctcttgtctcatttatttgttgcatttacatttgtgcaatttacattcatagagacatatttgagcccatatcacttaggtttgcaaaacttaacttagttgcttagttaaccttgcacctcaccttgcctagcaacttaggttagttttgttgaagtgccattaagttttaaaaccgcatattcacccccctctagtcggcctccttgatcctacagcggatgaggcagttgctcacgacggtgacggttagagtggactagggtggcgactgcgacagacggcgagaggcgatgactgccatggaggatgagggcggtgacggatacagtggactagggtggcgactacggtgacgactgccatggaggacgagagcggtgacggatgcagtggactagggtggtgactgcggcgaacaactagaaaggcgacagatatagtggactagggtggcgacaacggcgaacggcgaggcacgaaccatgttcctccccttgggttgtgtgtaacaacccgccttccagaaccgcgtagcccagcccatctgataggcaggcccactcacacacaccacccacttacactttcgtcatcgcatcgtgtaaaagggttaattcaaaagtggcacggttggaggaaagaggcctataagttggtccaacccttaggctgtgtttggaacctagggttcccaacctctctccatcgtattccacgtgcacgtttttcaaactgctaaacggtgtgtttttacaaaaaaaaagtttctataagaaagttgcttaaaaaatcatactaatctatttttttaaaaaatagctaatacttaattaatcacgtgctaatggatcgctctgttttctatgctcactgtgcaagtttggaacggctgattctgaacacagccttagtaaactaacaagattaaactaaacatgcgtacacaattctcataaaccacacaggtcaagtcatagtttggtcaggatgttatatacaacccctccaaatacctgacgtgcctatcgtctaacttacctttaacaatttctttactgattggtttgttttatgcgcacattgttaccaatcacgacgacaccaccgtgaaaggcatgaacacggtcaaaactctaccggacacaccgtcgaaaatttacattcacttcagagacgtggtctacaggttgcgcggatcaacagggtaaagaaacgtccaagaacaacccataatatctcgatccaagctacggcttatcggaggacgatgtatgccatatggaagaagcaagaagtaacttccatataccattggaaaaagtacaaattaccctctaaaactatcgcagtcgtccgaattaccccctgaaccataaaaccggacattcttcacccccaactatgcaaaccggacgaattacccccctcgacctaatccgcggtggttttggtctacgtgacgtacacgtggcatcccaattagcgttttttaataaaaaaaaatagtgggacccgcttgtcatactctcccacctctctcttctccacttttctctcaatctctctctctcttccccctcttcctctcaatctctctctgtctgccctctgcaggcgtgcacgagggcgagcggcaaacggcggcgtcgcggctacggctgagcggaggctactacggcggcagctgcgggcgcggcgcacggggcgggcggcggacaccggcgtcgcggcgatggccgagcggaggcgtcgcggcgactcttgggcacaatggcacacggcggcatggggacggacggtggacggcggcgcgcgggggtgcgctggcgggcggaggcgtcgtcgaggtgggggcttggcggagagacgggaagcacgatttttcccctgtaaatttcccggtggcttgtcgcatctcgttcatcgtcgttttgtgcttctacctgttaatctatctgatggttttcttctatcatttgagttttggtggagtccacagaccggacgctcgacgaacaacggcgacgaggtagtcgagcagggcagcagcagccacaccggcacgcgcagcccgctgaaccgctcctggcagagcagcaagcagaggacggcacagccggagcacagcgtccggtccgcgcccgcagccgccgccgcagtcgatgccgtggtgaactcgagcgccgccgtattccgctacgcgacccacgtctcgccgtcggagttgaagatgccgtcgccgagcaggtcacggaagacggtgtgccagaaggggggtggccgccgccgctcgccgtcaaccgaagcaacccagccgcgcccgccgtcaacctaagcaaccctggggaagtgaggaagaggggtggccgcagccgctcgcctgcgccgccctgccccgccgcttgcctccccgcgttccctgcctccgccgtcgcctcgccttgcctcgccgcctccgctctcctccccgcgctcgctgcctccgccgccgcactcgctacctccgccgttgccgggaggagagagtgtgtgtgagagatagaagagatagaagagagagagagtatgacatctggtcccacattttttaataaacagaacgctgactggactgccacgtgtatgccacgtaatttaaaaccaccgcggattggatcgaggggggtaattcgtccggtttgcatagttggggatgaagaatatccggttttatagtttagggagtaattcggacgaccacgatagttcgggaggctaattcgtactttttccttatactattcgatttgacaccatcaaattccaggtgcgcgatgccatatggaacatgccaatcccgcccaacaccctgctgcgcggttgccggccggaggacgacgcccttctctgtgatccggcagttcggctacctccaactagcgaaagcgcggtgacgcgtcgaggaacacgacacgggcgggggctagctgctgctacctgcgcgcgaagctccgaagacgcagccatgctgatcactccacttaaaaaaatgccgtagccgacgacccgacgtgctgatcaggaaaggtttcgcgcaagttcagagaaccaaggtggtggcgatatgcagatcgggtcaattcatacaattcgcttcacgtgcgcgttcctttcatcaatccgcgattaccttttgcctcatctttccatcacccggtggcagccgactagcagaaaccttttgggtgggtttggtctggggtgtgttgggtacttgagttactgcagctcgcacggcttagtacgagcactttgcgtgcgcctaaaccatgttttattgtatttgacctgacattcctggtcaatttaaacaggccagcagcacacgtacgagtttaaggaggggccagcacaaaagtgatagctgcctttggtcatcaacgttataaaggtcataactaattcataagtcataacagtgaactattgatcttttaattaggtgttaggattagtgatgttctcctcaaaaaagattaatgctgttgaaagattagtgggtaggtggtctgctctcctgcgttaagatttctctatattaccaatagtagtgaatagcccacgaataccacatgcaaatttgaattatgaagatacatgtctattcattacatattcagtgtacctatagttatttaaaaaataattgtatttgtcttattaataatctaactaatgcatgcatatataccatcacaaattggaagcggcaaaaaatagcatttccacaattatatgggcattcacctatgtggggttggattataacagcttggattgaaaaagaatccacagattttatgacatgttcatattaatttcaaatcttagagttacattaattaataagtactccctccatttaatattataagtcactttgatttttgtaaagttaaacttcttaaaagttgaccaagtttatagtaaaaatatagtaacacttgtggcaccgaattatttacattgaatttaacattgaatatatattttgatagttgttttctttgtgttgaatatattactatattgttttataactttggttggacattaatggtttgattaaaaaaaatcaaaacaacttctatgatatgaaacagaggtagtactactaaattgagagtgcaagatgagctcatcaaatcatcaattaaacatcacctacgacttgctaaatactaattctgaatttaaagtgtgattaattgataaaaatactaaaataaaaatgaaattcaaagagtgaaaattgatatttatattaatttaaagtttgagattactaagttgcagtagaaaataataattaagacacatattggatataacattttattgcaaattttaggatcattaggtgcttggcgcggctggccaaagccaaagccaaaaataatatgtactgaaaataatatgttatttccatgcaaactgtgcaattagttttttgtttttatctatatttaatgctccatgcatgtgtttaaagattcgatgtgacatttctgggaaaaaaattgggaactaaggcctggtttagtttccaaatttttttttcccaaaacatcacatcaaatatgaaatattacatatagatttttaaaaaactaattgcacagttgcagggagaaatcgcgagatgaatcttttgagcctaattagtccatgattagccataagtgatatagtaacacacatgtgctaatgacggattaattaggcaagattcgtctcgtggtttccagacgagttatgaaattagtttttgcattcgtgagaaaaacccctttcaacatccggtcaaacatcgacaccctaaaattttctttttttaactaaacatgccctaaaccaggccttagcagtgtaaccggactccgctacggtgcctgtgttgacatggactattgacgtgtccaaccatttggctgcctccgagccctctcacagtctcactgttagaagtgggcgtatctagttataaacgtttagggtgctaataatggggtagttatgtgataattttatttgttattgatgtagcttagggaaatgtgtcagctagagccaactatgaacatataactcatattagagttaatatatcgtaaggttatctctatttttcttctaatagaaatggagaggtcatacccttttaataaaaaaaagctctatttttcttctcctttctttatctctcacggtctcacctatgtatttaatgtatttatttttctatgtactactccctccgtcccaaaatataagagattttagtgggatgtgatattcatagtactaggatgtgtcatattccaccaaaatcctttatattatgtgacggagggagtagcttttatatgaaagctaaccctcttcattttttaaattctctcctttacataaatttctagttagcttttgtgtttagttcacgccaaaattggaagtttagttgaaattggaacgatgtgacggaaagtttggaagtttatgtgtggaggaaaattttgatgtgatgaaaaagttgaaagtttgaagaaaaaatttggaactaaacaagggcatattttaacttgctctaatgctgcagcaaaatgatagttttgtctttaaaattaaagttctttaaaaaactacttatttatttagcctggattatattatacaaagtttatattatacaaagaatgcaataggaaaatagccgtgccgatgcaacggaatatcaaggttgatatggttcctcttgcaagtagcggaaaatataatatgttagtcatagtacaatgatttagaattttgttattaggaacgatggaacttgttcttgcgtagaatatatactgaaagatgccattataaaatttattaggacgaataaagtataagaatagagatagacgtacatcggaaaaatcagggcccatacaacgctgcacctaatctatcattaagattcactagttaagcacatcaactggccacctaatcatgacaaatgtgcgcactgcatttcttcttttttttaatatgctttcagtacaaaccctagatatgaatgtggacatgatgtatgtccagattcatacccaaggtttaccttttttttttgggacggagggagtatatcataagtagaactcgtaccaaatgacaccaaaagttccagcaaaatgtcgactagttatcatgtatcttcaacagtagccatccaaataaaacataatgcatcaaaactttggctgaaaacaatatgttattactccttaattaatcgccattttatgctaaaatactagtgacgatactgtgttaacaaagggataagaccggcacggcgtcggtgtgaagtagcaaagccggtggcaggttcttgataataaaagcacgacgcttttgtagtcgtccccgtatcaatcgccagggtgtcactggatgctgcactgacaatactgttaggtacagcaattagaggaggagatcacgcatgtaccctactgaaaaaaagaaaaacaaaagaacctgaacgcttttcttttatagcgaaagtttactagctccagtctagaagcatggaaccggcggttgctctgcggaagctagcgacgaaggcacaatgcggtacaggagaggcgccgggagtaaatgggcaagcaggcagcgagagagagccgttagcagtatcaaatgcgtccctgcgctgccgtgacagggaggggacacatgcatctggggctagcaagcagactgccgatcgagcgtggcgtggggggacccaacccgatcgatggatcaacccctcggttttttttctgtcatctgcgtgtcggcgtggggcatccaccattccaccaatcaaagtcgcgagctcatctctctctctctctctcgtctcatcggctcatcgcgcggtcctgccgccgtgccgctcacttggacgaactcgatcgcccaccgtttcgagcgaaaccgagcgccgcacccgcacgaacgcacgcgcgcgggtgctgatccggtcccgtcccatccgcctctccacggcttggtttcacgtgggctccccggacccggagaggttgctagctaggatttggtttgagacggaaccaaattcatgtactccctccacagtctgcagaaacagcttcggattagttgagtctgagtgcctcacagatgatgcattagcaggtccatgtttgagggggagggcaacggctcaacctaaatccgaatagtctcgtcactaagagtgggtttagcagggaccaaaccaactgatctatcatccacctttgtatttttgccggtgtagttagcacgtaactggggtggcgatggagcatgacacgaaccaaaaaggatgggtgctcacatcacattcgacacaaaatacttttagaacgaggtatccatcagtgtgcttctagaaggccggagttaattaagtttagcaagaacccttgtgcatgtcactgggagtgacagggtaaattaagctcacgaagtgacagggtgataagtgacatggacgtcgcacaagtgcagaacagaccggccagtaggggattaggtcccgtgtccctttgtgtaggcctataaatggtgcgcgaattgcgtatgggtttggggggcaatcggtccagcccggtctaagtttcgcccgagattgcgaaagatcaacagtccaaccggcgaccggtcgattgcttgcgcagcgcgctcggagcaactttgggttgggtccagattagagaaacactttcgatcattccatcgatcggcgacgtgcaaccaacctcgcatgcacgtcgcaggtccatctctccctaaagcgaccgcacagggaagggacatttgttcttttgctatgcggcatttaatgtccgactaagacttccaggactccaggtgataagtgtaaatcagttaattagtgtcccattggattggctatcatcgactatagattcgtttaattagagcaagtttaatataatagcccactactagctccaatttatttatagccaattaatacaatagttgcttactgtactattaatatatggtcccacctatcatacatacattacgtcttggagtccgtgctgcagctggctacagatatgtagtccgctgctcttctctctcatcttttatctcattaaaatatgtttatagctggctaatagcctgctattgtacctgctattaggtgtaatgaaacttcttgtttgatttttcaaaaggaaaatactagtaaatcacttgtcaggcagtagtggtaaatactactataacggaagaaagtggaggccgtatctgaaaccaaacgcatgcatgtgtcacggcgttgccaccaaagttggacggaaatagatactagcactgacgtactccaacacttttgcttttatcactttttggtttatacctatgtgcacaaatttgtcataaatcgagtaagtgcaacctacgagggccatgtgccgaagccggagggagacggcgatgccgtaaggccatttactgatgtgtcattctccctcgccattccacatcggcaaagcaggagggcacacgccacgtctacttctaggcccaccagaataaggttcgagtgtccaaagatggccattggttcttggcgaaaaagaggacgaatgaagctgggagacgacgctgctttcgcgtcgtggagcgagtggcatcgccctccttcccatgccagccgtcgccctccagccagccgcctagcccgccgtcgctgtccgcagccgtcgagctcgttctcgtccctgccatcggagctcgccggccacaccacccccgatccgctcaacccgaagctcgccggccactccgtcgctcgattcacgccggtcggaggagagccagaggagaggggtcgccgccgtgggagccgaggtcgccggccgcgccgcccttgcagggccggaagaggaggaggaggggaggcgctcgagcctccggttgcgagtggcattggagtgagcggcgccagcggtcgtgggggacaggaagggcgtgtcgcctccgcgtcgctcggagctcgctggccgctccgaggtcgccccgtaccgccagatccgcgttgccggcctgaggaggagggcagcgcggcgacgaccatggtggcggcgacgaaactacggccgcagccatcctcgcgccgcgcccggacgagccgtcgccactggatctggcgagctgccacgccgtcgtcgagactcgtcgctgccacgccgtcttcgagactcgtccccgccatgcgagaggaggggaggccaagaagttcgccaccgtcgagcgccaagcccgccgccccgccaagaccgccgccgccgtcgcctccttgctgccgagtgagtggcctccatgccaagaccgccgccgtcgtctcctccttgccgccaccgccgtcgtccccagatccaccgacgctccgcccggccaccccagcgccgtctccgctcgccactgctccgcccggccccgtcgccgtcgaggccgccgctccgctcgaacgcctcagtgccggctccgctcgagcgtgagagaggggaaggagcaacgttgggctcgaggaaagggagagagagagagcggaaaggtggagaaaaaaaaaggaaaactatatttttgtgaaccccacttgaggtactgcattgtgaagcttgtgcctcttagtgttcctcagcatatgtggcagctcaggtccggcattttaggtgacgcattgctattgccctaaaagacgacgtgccattgctgctgtgtcgctggcctggcggaggaagccaacaagtcctgatgagtctggcaccaaattcaatgtacagtactagtagtacgtgccaggtgcaacttgctaataataaatcgcttaatcgagcatgcgcaacggcacggcgagacgagacggacgcgcagctgcagaggtcgtgcgccacatgcatgcacgttgcaaccgcgattattttgtggcgtgctattcgatgtagttttccgtgctactcctatatttgttggagaaatagggacgttacccgtgctacgagtcgttctggaagaactgttctcggtggatggagccatggaggccagctagctgcagacgcagctggctcttccgttcacctggagagcatgcaccaagaggcacccttcctatacttgctagtctacccaggtgagctgtgacgttacacgtaacagctccgaagtttgcaattttgagcgttgctgtgtttgagttccttccaatcgagcaaccacgttatatcgcctctagtcttacgatccataggaattaatgggaggcgtgaaagtggcctgtccttgtatactctgttgacttgctatatgtgcacttctccaatttgtgcgtcctcttgtttcagccagctagctccgctgctccgacgtcgttgggcaaccgaaaagaaagttgcagtcgaagaagagatctcgcagaagaacggcaggatctcatgccggactggaacgtaccgaggacgagggacagaacagatattggggactcctgtagcggaaactctaaatgcgcgatcgatcgcggctgcgatcggatagcgatcaccacccctcccccctccatccctacacgtttccttttttttttcaccgcattaattttttattttagtaaatttatgcacataaagtttatacacctaaagtttatagacccaaagtttataaattaaaagtttatatatccgattcaaatttaaatttgaattcaaatattttttatatatagtatttctatacatctaaagtttatacacctaaagtttatagacccaaagtttataaatcaaaagtttatatacccgattcaaatttgaatttgaattcaaatattttttatatatagtatttagatacatctaaagtttatacacctaaagtttatagacccaaagtttataagtcaaaagtttacatacccaattcaaatttgaatttgaattatatccaattcaaatttgaatttgaattcaaatatttttatatatagtatttctatacatctaaagtttatacacccaaagtttataagtcaaaagtttacatacccaattcaaatttgaatttgaattatatccaattcaaatttgaatttgaattcaaatattagtttatagacccaaagtttataagtcaaaaatttacataaccgtttcaattctaaatttaaatttaaatatttatgatgtagtaggaaaagaaaaagggaaggaggaagggggagaggagggagcgacgatataggggaggggcggagagcgatcacccgcccattaggcgtacccgtcctatagtcctgtagagaaagatggaaaagaccaaggccgaaacggcccggcataaaacacacaccggtataatctgatccaataaggaataagtccactcgccatctcttaactttgcgttgagtttgtttgacatctttgtctccaataacaaaaattttcacctctaaactatataaaatcgtgtaatttagggtctcgtagtagtataaatgtctgatttcactgacgtggcatcctagtcagcaaataaaaagtaaaaaaaatgtgggaaccacacataagtgaggagaaaaattgtgggacctgtgtgtcagcgccatcttctttctactattttcttcccaaccacacacagtgcttgggtgttggccgtgaggaaggcaaccgatcagtctgggatggagggaggcagtcggcgagcctaggaaggagagggagggggaggcggccggtgagcccgtccgagcttaagcttacttggcctttgtcagaggggaggctcaactcgttgttgccccctgtccccttggttccccgtcgacatgtaggaggaaaccatagatggagaacgtccctgaccaggacacggacaccgatggccacatcggagccactcgtccataggaggagacaacaatgtgggatgtcagcaacgaggggcttcgatgatcttctcccacggatcctcctctacaacagcttttaccattgatttggtcgccgtgtgtgggaacacccaatttaggcttggtgccccaaaaatccactcgtgatcgttcaggatttcgatcacgcatagattgatatacagaacagctttcgattatttacacaggtttgttcatacaagctaattatacaactgttaaagggtgaaaagatccaaactaaaatatccttatttgaaatacaagaaaatccaaagtactaaactcctaaacttcttcaactactagaactacaattaataaattccaaagaacttcaaagaactccacaggcaaaaactcgagtgtagactagcctagaaaaactcgttcttgtcgtagatctcgcttccttctgatctccttattagcacgtttcctctatatgtcaaattatgcaagggtgagtacatatgtactcagcaagacatattataaataattaaagatgaatagatatgaataaataaacaataataaagtaaaggagtaatgaaaaccataaatcatctttatcctcaacaatttaatttttaaaactacttatacttcaggagtaggaatcaccctaatggcacaactccagaaccgggagtacggcacattcgaatgatttaattcacctctgcagagactgtccagttttacccgcacgatgtcaacagtttgcaaggctgaggacaacatagccgttcgagagtcccacttactactagttactgcacagtggggtcttggttcatcatagtggtcgaactcttgctaggcctaggcaaggtatctatatcgtcacactttcatgaatcccactgttgtgaaacactgccgcccaaactccttacgtaagttcaccccaaaaccgctcatagagccacccaatagtctttcatataatgggacaatatactaggctaagtcaaattacttggttgtgtggatggacgcaactatatcatttcccatggtataagggggtaattataatccggttaaaccacccaaaaactttccaaactccccacaccagcatcacaaacttcatcaacattcataatcacaacattcataatctcaactcataaatgcccattttaaccggattcctaagtttgtaaagttatttggaatagtaaattacataaaatgataaccaatgcttctttctatgttctcatgcaatcatgcttaaaagcatttaacatctacccatgagatgttaaaagagtaaggtattatgcatcaaattaaatatgaagatcatataaagttttctatatgatcaaaattttaattatgtcttgccttgtgccttaatatttcccgtggcttcagcgtagccatctgggtccacgtcagctccttggatgccgatagaacttcttgtatggtctaacgtacgaatacgaaaagatagcaaataaagcctataagcaaattgctacaaagaaacgataaagtcaaggaataaataaaattggagcgaggcgaaaggaaaaagggaatgggttcaaaataaattttagattgaaaataaaagagaggtgatggtttctataggttggaaatcgaataaaattgaggaaaggataaaatggagaggtgaggtttatttggtggattggtttctagtcggtgctagggtagggtagcacgacggctagatatttggagttggttagccgatgctaaggcataacagctaattattggctcgtctagtcgatgctacagttaagcagcacaatggctagagagttgagaagtttgtgcaggtttgcagggtggaatagtgttaccctacagccgtgagtggcagcagagcggcttgaatcgcacagagcctgaaagctagtgtgcgacgtgctatggaggttgagggagtagtgaggctctgaccactatacacgtcgaggcgtggggtgcgaagagcaacacttcgaccttaagattaggtgatgccgggttttacgaccaacggttcgatgtcggggtttgagatcatgcgaacgtctccatggaaggcgtaaagttcccacggcggctatttggtagctaaggatggtacatagatggtttaaaaaataaattaatggaatttgaattcaaaaatagattaaaatttaaaatggtattttaaaataaagaaaagggcatttaatgaaattaaaggataatttaaagtttttaaataaaaaaagaaaattaaaatttaagggatgtaaaggtatttgaataaaataatttttaaaggttaattaaaatagtttaaaattagaaattaaataaataaataaataagaaaaggtatttaaataaagaaaattaaataaaaatttaaaaatagaaaatttggtatcaaaagagagggtttaaaattagatgaatttaggtcaaataatttttggaattgggtcaatggttggagagatatgggctcctaaagattaaaaatcaaataaaagaaaaaggaagttactgtgcagtgggccccgctgtcagtgtcttctcctttctcgttttcttcttccttcctgcttcctaggaggggtggtggctggtagagatgaagggtaagatggccggaacggcgaagataatgcgtggtccggtcaggagaaagagagcttcggtgtggctggattcaagaggaaaaggcaggggaaaacgggtaaaatggattcgccggagtgaggagaagctagtggtgcaagggaattggaagagaggctacgggggaggagatcggccagtgacttggtggtgaccattcatggtggagagagagagagggagatcgaagctcggatggggcaaaaacagaagggatggcctcgccttttataggccggagaggcggtggaggaaggatggccggcgacggcacggctcatcgtcgagaaaaaggcggcgacgcgtgtcggcgtttaatttgctgtaatggcggctcggtggtcggcaacggctcgcggcggcgcgtggcggaagcggattggtgcggcaaggtggcggcggcggattggcttggcggcggaggaggaaaggcacgggacggcgtcgacggcggcgcattgggaaggggcgagcggtggcggcgcccatcgagagagagaggaaggaggcggctcggcgggcttcggctcagttgggctggcagcccaagaaggagggaggaaaagaaaaggggaatgggccaaaagaaagggaaattggcccaaaataaaaaggaagtttgataattttgtatagaggatttggaatggaggaatttaaaggagatgaaaattaaaggatagatggatgtggactttttgaatcttggtcaaggaatttgaataggattcaaaggaattgaaaactaggaaaattttgaatggaaggctttaaatagattttaaaggagataaaatttaaaagagggatgtttgagggtcttttgaacttttataaaaggaatttgaatataaggtttttgaagcaaaagggggattgaaatatttttaaaataaaatcaaagatatttattttgagatataaaatttgataaggggtaaaaataaagatgctccaattttataaaattcaataagaaccaaatataaaacttgtcaaaaaataatcaaatgggaaggaaaagcaataacttaatttctaactttggatgaatttgggatggtggcaaaaatagatggaggtaaataactaggattttagcctccaaaatatgtggtatggattctcagtgaattatttgtggctaaaggaaatttatattgtctgaatgaaaaggattggaaataggtttcttcgcacaagagcaatcactctaaatattgtgataatattattcttgtgccgaggaggaaatcaagccataagaattaaattggtggcttgattaaaataggagagtttgggaatattaaaggggtttatgaaaggtattgtataaagaagaaaaatggggatttcaaaggggaaatatttgtgggagtgtagaactggattcagaagtatatgtggatgtgaatttctacaggaacgaaatttgtggtagattgatattcttctaaaggataggtatattgactcagggagattgaaaaggatattttatggactaagggaatatttaggtggagatccaaaggaaaagtattggttctgggaaaaaaataaaaattggtatttcatgtgtttggttagagatcaaaaggggagtatttggtgggagataaaactagatttgatggtagtgtggtaagctctaaatgaaaaggtattaactctaaagagattgatatttcatgtgctctagagatggttgagcgaaaattaaaagggttttgttcggtaaaggagtcaaaggaaatataatctagagccaaagttagagattaaataaaataaatagaaaggttttgtaaaattaaaaagggattttaaagaaagcttttaacttagcaaataaagtttagactcaagtcaaagaaaagatcaaaagtgaaattactgaaaggaagaatcgagaagagcatgacttaaaatatttcgcaaaaaattttccctaaaaatttaagtccattacatcgtggtacggcgagccggccgcccggtggggggggggggggaggagggaggaggggatgggatggtggtggggttggggatgtcaaggggcggtgtgttgcttatgacatgctcgtggtaggacgaaggagggacccaactcggtgacaatggagaagacctctgggttctctactggggtcgttgggggtgtactggcaacgataactgctcaatgtcatacccgtctcagttggtttgtccgctgcaggggtcttttctttgtgggcgtcgtctcaccacaacggcgtggcggtggtacgatgagccgacgtagaggagcatcggcagcgcgtcgccttccttctccttatcttccaactcttccgccaagtgagatcccccacattttttcttctcatttacatgtggactctatattttttttctttttgctgactaggatgaaacatcagcgaaaccagatattcgtattgctatggtattcaaattgcacggctttgtatagtttagggtaaagattgctggtatcagagataacgaatgtcaaacaaacttgagcaaagttgagggattgcaagtgaacttattccatccaataaagacttgtttgtggactttccaaactggcccaatttaaggcccaaaactatgaggttctcatatttcctgggcttcccagttctcaaatgctcaagaagtaacgatgccctgacaagtgacaaatgcccattgagcaggtaccgcgttgcgaattttttttatttctaattttttttattaaaagttttacaaaaataattttccattttgaaaattgacggaagtagtcgcctaccgccctctgggagggcgatttttaaaaatcgccatcccagatggcggcgaaaatgacgtggcagacggccgttcgctctcgggcgacggctgtcaacgaaatttgcaggcggcccccttgccgccctccgctagggcgattttgtactgtgcggggggccgcctgcaaatgggcggcgagggggcatggaattttgcaggcggcccccttgccgccctgggggagggcgatttttgcctcccccctataaagcccagtcccccctctctgaaatttcattatattcactaaaaatccaaaaaaaaacgaaagagagagaggagagggcagcagaaggggagcggcgaagccctgctggttcgctcacttcatcacaggtttgctcccatatatcttttgcatttgtactaatatgttatgtttgagtatatatgttgcgttttagttttagttccatatattttagcatatctgtagcacacagcacatatgtgtagatccagagcatagaatataatagtatgaattgagacatagacagtagtgttaattgtaagatgtagtttagtttgatctggagaatgtaacctacttttagaattttggagaacaatattgtagagaatgtaacttagggcgtagtacagaaatgcgaggttaacgcagttattgttttcatcaggcacaatgtcaaataaggtcacatttcagatagttcacggtgaaggaaatattagatttggtccagatggtgttgatctgtcagattttgtaatgacatctaagggtatcgataggcctgtggagaaaacatttcagtcaatttatagttggttgttgagaggatttagaatagaccaagaagtctacacaatgtcagtatcagttgtagtgagtcgtgcaacagaaggttatttttgggaactaatgccgatggacagcactgctgcttggagacggtatgtgaaaatggcttttgaacggtcatggcccctcgttatatttgtgtcggtacaagagaaagatataaatgtttcaatgcaaaccgaagatgtagagggtcctatcaatgcaagggatgttgttggaccatcgatgcaaaatgagaaaaatcaaccaagggaggagcaggccatgggcatggcggatgagggggagagagtcggtataattgttgatgaaatggagagggaagattcggataatgaggaagcgaacgacgacgcatcatccgatgaggaaggtgatgtaatggccactgattgggcaaatgaggacttctctggacttgttatatcagagggtgatcatgtaccctgggagtataaggagaacgaggtaattgagggtgcaaggtatgctcataaggatgagatgaaggaggcggtgaagcattgggcagtttccttgcagagagagtttagggtggtcaagtcaacaaattatgtgtatgaagtgaggtgcatgaaggaagattgtccgtggcgtgtccatgcatataagggtaaatggaatgattattggaaagttagcattgtgaccgagcacaagtgctacttacaaggggtggagaagtatcaccgaaacatcacttcagcttttgtggtaagtgagatgtacagcagtgttgttggtaacattggctttgaaccaaaatcaattattaggcacatcgagaataaattcaagtacaccataagctatgcaaaggcctggagagccaaacaaaagattattgagatgaggtatggcacatttgaagcttcttatgataatttgcctcgtttgttagccaccattgcccagaggaataataatacttactatgacctacatacatttacatcggttgatgatcgaacaaagagtgtgctgcaaagagcctttttctcattgggtgcttgcatcaatgcttttgtgcattgtcgacctgttctatgcatagatggaacttttatgacaggtaaataccaaggtcagatattgacagcaattgggtgtgatgggaacaaccaggttctacctatggcttttgcatttgtagagagtgagaacactgaaagctggtactggttcctagagagagtgcacattgcagtggtgcgtatgaggcccaacgtttgccttatacatgttcgtcatgcgggtatgttgcgggctattgactacttgcagaacggttgggatgagaagggacttccagctaagtggcccgatgttcggagtcggtggtgcatgcgtcacatgggtgcaaatttctacaagcaattcaagaacaagcatcttatggagctctttaagaggctctgtgcacagaaccaagagaagaaatttaatgagttgtgggacaagttggatgagttgacaacgaagcaaacagatgagcaatctcgcagaccacaagttgaaggtgacgagcctcccatacctcttggtgcattacataatgacccaccaacaatgagaaggaggtcagggtcggccatcagaaattttactcagtggattgagaatgagcctaaggagaagtggtctctattgttcgacaccgatggatctcggtatggcataatgacaaccaatttggcagaggtgtacaactgggtaatgcgaggagttcgggtacttccattggttgctattgttgaattcatccttcacggcacgcaagcgtactttagggatcgatacaagaaaattggtccgtccatggccgataacaacatagtgtttggcaacgtagtaacaaagtacatggaagataaaatcaaaaaggtacggcgacatagagttgttgctcaaggcacacaagtgcatcggtatgaaataatgtgtgttgataggagcaggcgtggtatctatcgcaagcaagccgtgcaggaatgtgtcttgaaggcggatggtggatgtacctgcagttgtatgaagccgaagcttcatcaccttccttgctcacacgttcttgctgctgccggtgattgtggcatatctcccaatgtgtacgtctcaaattatttcaggaaagaagcaatctttcatacatggagtgaggagatatatgggttcgggatctcagaatcttacacaacgctgagtgcccaagttttttatattccagatccatctaagttaagggtgaaaaagggtcgacgccaaactagacgcatcagaaatgatatggatgagtcagaagcaggtgggaggactttacgctgcagcaagtgtgatctgcgcggccatacttacaagaaatgcccgaagaatgcagaagttccaagcggcgcagatgctagtccatctggacaggcaagtgatggtaggcgaccacatggtgaaggaacaacaagcaggcgcgcaaggccaaggcgtcgtcgcgcagcaggcgattccatggtgtaacaatgctatcgatttaggaaataaaacgctgttgtgatgtgatgtgtgttcggactaaatactta

SEQ ID NO: 5489 - DNA, 2739 bp, Oryza sativa
aggggtggggcccttcttcgcatgtgtggtccgggctggaagtatcggtgggcccggcccaagcgtggcctttctggtgctctgatgaggtggaacagcgatgcgtgatgagagcaggtacaatagtaggctataagctagctgtaaatatatttttaatgagataaataaggagagagaatgatagcgagctatagatttatagccagctgtagcatgaactccaagacgcagtatgtgtataataggtggggccaagtatcaatagtgcagtatataactattgtatgaatgaactattagattggctatagatgaattggagccaatagttggctatactattaaacttgctctgatgagagggaaggcaactgccagttgtcgtggacacgtggctggatcccatttgctggctaggaaaggacaaggtcgcaaattgcaattcatactactatcaccgtatcatcagtattttctttaagcccccttttgaatcaaagaaaaaccataggaattctagaagattttagagcccctttgaattgcagggtagaaaaaatggaggagtaggaaaaacacaggattctgacaggaattgaagtgtaaaacagaggattgcaaaacataggaaaaacacaggaatggtcgttttattggagtgcaggaaaaacgcaggaatcggatgagagagatagactcaaaggaaattttccaagaggttggagctcttgctaaatttcctccaaaatccatatgcaatgtgccattccatagaaatttcataggatttggaaaacttcaatcctttgaatcaaatggccaaataggaaaatttcctataggatttgaatcctatgaaattcccacataaattctttgattcaaaggggcccgcaatgtgccattccataggaatttcataggatttggaaagcttcaatcctttgaatcaaagggccaaataggaaaatttcctatagtatttgaattctatgaaattcctacataaatcttttgattcaaaggggccttatcctatgggaaataattctatagagtcctttgaaacaaaggattgtttcctatcaatttctttgaaattcctatggaatgaaccttactagagcaattttggaggaaaaaaagcacgaggtctcacctcatgttttccttttcatgtgtctaaggttcctgcgtttttcctgtgtgctaatcaaacgacagtttgaagactttcctgtgtttcaaaatcccataggaattcaattcctacgtttttcctattcctctattttctcaatcctgcgattcaaaggggccctaattagttcacgtaacacactcacacaaccattaatactacctccgtaccaaaacgttgctatctagatgagattttacatgctgtcctagatatcaacattttgagacagaggaagtacatccttaactcgtgtttagagagcccggcaggtggacactaatgacatcatcttctatagttcaactaaaaaaacacgttttcatgtatacaatctttcaaatgcaattcgatcactagttttcgctgcaagaaatttaagctggctgtggctaccgcgacagtacaagcagcacaaattatgctgcatgtttgtttgtagttgtttgctgctatgcaatcacaaaattctgttcccagtaattaacagtgaatgcattattgaatttatacttagtcatttatatagtttaggactcgtttgattaattaaataaacggcattctgcacttttgatccacatgatggtccaacttgtatttattttattttccaactggattgatattgtactttgcacgcgagtgatgtttttctttctaatttttcttgaagaattcatgcccatgtctatttcattttaataatccctataaagtataaacttcacagtatagatatgtatataaattccacatgaattcttgcaaacatttgaaagaaaaaaaatcaccgtctcaaacctagcaaagttcgaacaagtttgatgtagggcaagagccaaccatcaacttgtttatatcttacttcatccgtaccaaaaatataataatagtgtagtattagattgcgaccaacggagtattgggctgctatattttagacatagaaaatacttttgactcattttgtgtaattttatattgtttgaatgaaaaaaaacactaacatcttagtttctgaaattgggaataagtttgggaaaagttggtagtttggaaaaaaagttaggagtttaaatgagtaggaacgttttagatgtgattagatgtgatgaaaagttaagagtttagaggaagtttggtgtaaattaaatagggcctataataacattgaaagtaatgacatatgaactcattacttaaataaactttaaattgatcagagtaacatcaaaagacatcactactagcagcattaataacggtagcactagtagtaacatccaaactactccactttactaaaaaagcagagataactccaaacacaagcataactgcattaaccacacgagcaattaacatcttagatcacccaaaatgataaagtaaggtgctatctataaaacatgtacatctcagcaatagactaaattaatagtaaaccatctcaatagtatgtctacatgggtatctatagctctctaatatattgtctcgtttttctctatagactatcttcaggttagtag

SEQ ID NO: 5490 - DNA, 3013 bp, Oryza sativa
  unsure (1)..(3013): unsure at all n locations
ggatggaatgagtaataatctttctaagcaatcacattaaattaaacaaacttgcgtatatatgtgcttttcaaatatagccacttaaagttttgagtattgatttgacttgtacttagcaaaagaatgaaaaataagttcctgttgatctttaaattcccgtgtttttattgtgaaacctgtaaataaggaattttttcccacttttcctgtatgctaatccttcattccgatgagcgaatagtttcaatttctatagtaatttaaatactccattttcctctaaaaatccttcaatccgaaggagcctttgcgacctattaactccactgtaacaagggatgaagggaatatgattgagaaaagttctacagatttgctttctgtaccccttccaagagaaaacaaacatgaacagctatatgtttttatttcctttaagaagtcccatgcactctcccctttctctagtatctctcttccacaaaattaattccaccaaatttcctttgttttgtttccatccaaatgctcaaagtcaagactcctaaacattgaaaccatgtagaaatatgaagtgtgtaacatattatttataagtattttttctttcttgcttgcaaatgatcgcttagtatggtctagatgaggggacttgggactgggaggaagacatatgtgcaattgtgacctctattccagttcactgtagtacagcaccattcgggcctatttatgacggcccatgtaaggcccggcacaagtgcatcttaagcccatattcatcactattctaatctttggctattggctctcttgagacatgtataattgcatttatgtactcaacgatataggtaatcacacctatatatgctcaatgaccgatatatagatgaaggctgaaacaggaataaattatctgaattttacttctcaataaaaggtcatcaaaattgggtaacttcttttccttcctgtcacacatatagatggttggagattggtcatgcatatatgatgagctttgtttatttccaaacaaaaaaagtgcttaatctcaaccatttcttattttctcccagaggttatagacaactatttagagtggttcatcgattaagttggattccactatgtgagcctgacaaactatatcggtgtgattaagccgctgctccacttcgtggccgctgcgctttgcaccaataattaaaaaggagcatccgtgcaagccacattcaaaaattagtcaaccattacatacaattttagctgttattttatttgtaattaaataaatatttcacgattcatattgcccagattttgctacacagaaagtaacaatttgagcatagatcatgttctttgcatggtaaacctaatggaaatatacgaagaattgtagaaagatcaacacatcacacattgagttatcgtaaatcattctacaaacatgctgtcagggttatagataccatatacataatagtagtcgactaaatctcggcaggacccactacataccatgtcttatacgaatacaaccttcggatataggaggagttccgcataaggaaggatgaatagggttctacatggaaaccacaaggactactcggattgtatccatattagtttctctagttctacttggacaaaaggacatatgggtataaatacaagactccataggaggagaggggacacggaacaatagatcaagacacaagatcaacatacaagccaacatacgccaagacaagacgccggatatcgacttcagagatagactagccagtcccctatggtgcctacggataccgtcaggagagatatagccgctaggcgctctgtctcttgatctcgccggatggccggattcgagggaggaaaggctatcccttgttgtcgactaccgagtcaagacccttcaagacnncgccatgnntcgacaacaagttaagataaggctcatccccaaatattgggtactggttgtgggattatgaatgaaacaaagaaagcaacngacnncggnnnttcggcccaacaaggttnggtatacccacattgccatagctaaactttattgacaatgcctaaaaaaaatactcgatccaaagtgaaaatattcatttataaaaaagtgaaaatattagttaaatgatagttgacagtaaaatttagtctttttttttaaaaaaaaagacgaagaagagaagaaataggtggcgatgggtatcgtccggctctgcgacggcactgaggttctggaatttcctctttttttttgtctttctttccaacggaaacttctttgctgtctctgaaatggtgtggtataacatattaaataatttccagaattctgtatcattttctttccaaggaatttttcgtatcttctccggacggtacatatcgtcatgaacgtgccgattatagacggccaaatatatacaagtagttgattaaacatatatgagttggtcttatataatttagtaaaaccaaaattatttggaagtaagtacatatattgttgcagtgattgattgagaagatttgttttcttcataaaatcagaggcggatacacgaactcgcgtgccccatatcagtgtgtttagattaagggttatatattttgcacattgcagtgtgcacaattttttaaagatcgatagggagatgcaattaaatcaaagaaaacaaccaaacaaccacattgtttctgttcggatgttctggataaatatgtgagttggtctaaattcagaaagggaaaatatatatttgcatcaagttaaaagaaaaaaaaaggcaaaattggttatatagcatcnaaagttcacgcttttggttttatagcaccgaaagttaccggttcattttatagcacccaaagttcaccatgttcccatttttaacacttccgtcaattctcgatcgttttccgtccgtcttgatccagccacacacacgatatgacgtttctacccctcaca

SEQ ID NO: 5491 - DNA, 3635 bp, Oryza sativa
agttccccaaaatattttccaaaaacatcacattgaatctttagacacatgcatgaagcattaaatatagataaaaagaaaaactaattgcacagttatgggggaaatcgcgagacgaatcttttaagcctaattagtccgtgattagccataagtgctacagtacagcacatgtgctaatgacggcttaattaatcttaaaagattcgtctcgcggtttccaggcgagttctgaaattagttttttcattcgtgtccaaaaactccttccgacatccgggcacatgtgctaatgacggcttaattaatcttaaaagattcgtctcgcggtttccaggcgagttctgaaattagttttttcattcgtgtccaaaaactccttccgacatccggtcaaacgttcgatgtgacacccaaaaatttccttttccccaactaaacacaccctaaacacaccctagataaaatatagaaaaattactttaaaaaaatcatattattatactatcttttaagtaactttaaactaatacataattgcctacttaattaatcatacgctaataaggtatttaaaaaaagagtactttttttaatgtgtggaggaaatatgcttccaagtcccaacctaaaccttcaaacgcacccttaacataaattttactcctgtgatccactccacctctcatttttttctcccaacccccctcaatctatgactttgttttcatgcactatgcaccacgccactagctgacctcccctacttctcctcgatagcaccaccgacgtcccctactctttggctgtgtttagatccatagtttggatccaaacttcagtccttttccatcacatcaacctgtcatacacacacaacttttcaatcacatcatctctaatttcaaccaaaatccaaactttgcgctgaactaaacacagcctttatcgttgtggccgtctcatcctccttgttgtcagagaccaccacatcatcgagcatcgccgccttttcttctcttagggcttgtttagtttccaaaaacatcacattgaatctttggacacatgcatggagtattaaatatagataaaaacaaaaactaatcgcatagttaggggggaaattgcgagacgaatcttttgagtctaattagtccatgattagccataagtgctacagtaaccaacatgtcataatgacggattaattaggctcaaaagattcgtctcgtggtttccagacgagtcataaaattagtttttttattagtgtccgaaaaacccttccgacatccggtcaaacgtccgatgtgacacctaaaaaaattcatttcgggaactaaacagggacgcccacgagcttgccgacggcgatcagttttgctcggactcgttgtcatgcttattatgtcgcctcaagttcgctattgctacgccatcgagcttgttggatccagtggcagatcgagtgtttgatgatagcagggacgaggaatactggttcagatcggacaacaactgatgaccgacatagcagggggcgaggagcttggcgggatggcgacaaccttatactcctccgttcctcgtctctgtcctgataatccacttattctgacaattaatctggtttgcaccggcctatcgtagatctattagacatatatatggtgcgacggggcgttacacaatacagtaagttttactccctccgtcctaaaaaaaagacaaaccctaggtttttgtgttcaactttgacggtccgttttatatgaaatttttttataattcatattttcattgttgttagatgataaaacatgattaatattttatgcgtgacttgtatttttaattttttttataattttttcaaataagacagatggtcaaacgttggatacgaaaaacagggtttgtctttttttgagacggagggagtacatgttagaagtgaggtaggcgtgccttgcagaaggcaaagggagccatgtgaagccagtggcaaagatgagctggcagccacggtccgacttggaacgaaacgtggcgacaagtacgttccctcgttgttcatgccctaatcaactcgtacactaatagggaactctgacgatcgtactaattcgtaaagacacctaatgatcgtgtcatttcatttgagcagctggttactgctgtacgactactaccatggaatgattagagtcatttcattgagccgttggtgtctgtggatctgcgatttgtcctactgacgatgattttaaccctctccagccgaatcttgcactgtttcctacagtaagttgagcctgcctgcacgggcactacagtctactgctcctacagtgcaggggaatctgaagaaaaatttaattggccgcactactcctcagacggcttttcacttcttgcagttacagatgaattttggatctaaacttcagtcttttcatcacatcaatctgtcatacacacataactttttaaccacatcatctttaattttaattaaaatctaaactttacgctaaaataaacacagcctatagaggccaacctctctctcttctcccccatcactgcacgcgtctgcgagaagcaagaagcagaagctactcctactactgatccgtagctggaggagtagatggtgatgtcatggccatggccgcgtgcctgcatgcatcgaggaagccagggctactactattgttaccagcaccatgcagtgcaaagaccagcatcctgcggatgatcagctacagcgagtacagccagtagccatggccgcatgcagtgagctactactccagctagcgaagcagagaaatggaggaaaatttacagtaatcaaggtcgtggtgtcagatggttcggcctattggagagatcagctgcttctctctgatcgatggatcagatcactatactgtgctatagccacactttacaggataggacacatctatgtacagattcgttatactaggatatattccatccagtaaaagattgtcatactttgggacggacgtagtagcatgttgtgatcgtcgtgttgctcctcctaatcgtcgccatcacgtcgatcgtcgccgtccgccacagaaagctgctcgcacacatttatggtggatgcagggctacgcataagtcctcaagtagaagaactccgtaggcgtagtgtggtgtttatgcgatgaatcgatgacacaagccatgaacccggcacaacttcttcgtgccaaatatgccaatcccaatgcatcccatatgccaagatcggttacttttgtacccaagggatttcggaatattttaacataggcgaaacgagaaacgagaaagctactccctccgtcacataatataatactcccttcgttttaaaatggttgacaccgttgaccgttgactttttaagtacgtgtttgaccgttcgtcttattcaaaaagtttaagtaattatttattcttttcctatcattggattcattgttaagtataactttcatgtacacatatggttttacatatttcacaaatttttctgaataagacgagcggtcaaacatatgctaaaaagtcaatggtgtcaaacattttgaaacggagggagtagattt

SEQ ID NO: 5492 - DNA, 8367 bp, Oryza sativa
attattttttaaagttttgtatgaagtttggaaatgcctgtttctcttctttttactaccctacttaacatgtctgtgagtgtgagctgctcatttattctatatgatctggctaatatcttctgcattttcttcaataggtttacaaatcagggtcccttgggagatcacttgacatctccagattcagcagctactgcgagttacgtagtgagcttgagcgtctctttggtcttgaaggccaactggaggaccctgtaagatcaggctggcagcttgtatttgtcgaccgggaaaatgacattcttctcgtcggcgacgatccatggcagtaagcacttacaaacctaaaatgtttcgtatgcaaacacaatatttgtcaatgttcaaagcaaacaaacatgatattctatgccatctttttttttcagggagtttgcaaatagcgtatggtgcatcaaaatactctcgccacaggaggtgcagcagttggttcgtggtggagacggccttctgtcctcacctggagcaaggatgcagcagagcaatgcctgcgacgactattctgcaagccacaacatgcagaatatcgccggaaacattgcatctgtagcgcctctggactactgagatgtagaccagaatccaaactaagcacccttaagactgcagggtcaccattcgtgatcgcctgcattccatgcgatcttcactagtcctgtccgaatcagtagcaactcagtcaataatatagctagatgatccgttgtattccatctgatcatggacatgctgtatgatagctgctttagctctattaaatctctaatggcaggcaactaggcaagaacagttctatgatgaatgatggcagtcgctgtagaattgaccttattctgtagctataatatgatgtctagaactgatgattccaatttccaaatggagcccggaacatattaaaatcaatcatttgtcgccttcttcatgtttttgccataaattgtggctagatgatcttgtttcatgctactgagtcaacattttgtcctggtttgtaggctctgacctgcctgcctacttatatgccattgtgcatgattcacgcaggatcaattttgctggacaaaatcatgattccatgctgcaaatttccaaagtgtggtctatatagttgataggaggaacttttagaggaatcctagtagctccatgtggtgacattaatactgttggactccctacttattacatacttattcaaagatttcaccatgccatgaactttaagacataattatgcctgtttttaacagaatggtctaaaattttccttttgggtttcttggaggctttcctgtgccagccaagcataaaaagggggcctgaagctttgttcttttcgtaacaatgcaactgactaaaaatctctcctctcttgaaatgttcatcagttaaaaagacaagtaggattttcaagtcagcagagcaaggttgctgcaaatccaggtgatcaatgtcaaatactaccagacccaaattcagatcacacaaggcaagcagcagctaaacatcaacaattctagtctacagcacatttgctccaaacaaaccattgcagcttagttccatttcatatacagagctcccatggcattttgagtgacagcatgatgatcatgatcatgatccatcttgagaattctttctttcttttttgtttttcttcagatgttcagaggaacagccagctgcagcagcggcggaggcgcgacggcgcggcgccggtctcccggatgcggtgcacctggcgggccagccgcgccgcctgccggctccggcgagcctccaccctcgcctgcttcccctccgccttgtggctcaacgccgacagcctcctgctcagcttctgcttcgccctcgccttcatctgctctgcctgcacctgatgataacatacaggcatctgtatcattcattcattctctaaagaattctatccaaacttggtttttagataatagatttataaaacccagcctctacatcaaatcagaagtacacgggcaaacctaaacttgtcgtccctcagttccataatataagggataatgggtggatgtaacacattctagtataatgaatttgaacagacggtctaagtttatatataggtttgggtttagccatacttctaactaatgattcaacaaattagccataattgcttgagggatgaataaacattatgcatactccctccgggttgataatacttgtcgttttggacaaaggtacggtttcccaaaagtaactttaacaactattttctattataatatatatgaaaataccaaaaaatatatggttttattgaagtatattttaaggcgaatctacacatatggtttttatatttttaagataaatattttagaaattatttgtagtcaaagattttaaagtttgactttacccttgtccaaaacgactaatattatcagcccggagggattactatattatagggctaaaaatagcttagaaaagatatctaagcatgtatagaaagtttttatttttaatttatgaaaaaccatacttttagaagcatggcacgaataatctgtattctcatagctgattagaacgcccaataataaaggtttaagtttttgaattcgatgtaagtttacctctgcgtgcctcatcttggcttcgaatttggccttctggcagctctcccattcctgaatcttcacctccttcctctgaaacctgacgaattctcgtccaaattttcgattcaataatcaaattccagaccaaaaaaacaacaaaaaaacaaaagttcagagaaccaaaaaaagaaaaagagagtgatatttgctgcacctcaacgcgagcttgcacttgtgcgtcttctgccacgccatggcgcgcgcctcgaactcccttttcttggcctcgccgccgccgtcgccggagtgaggtctcggtctcggtctcggtctcttctccggcgaggcgcgggggagctcgtcgtcgtcgtccttgctggcccacgacgcgatgttcatcttgcccagctgcagcccgagcgcggcgatctcgcggcgcgtcctgatctggagctcccgctccgacgacgccgacgacgcggacgcggcgcccctcgggctcgtcggcaccgagcagagcggactcagcgacggcgtggcggcgccggcgggcgtgccgctccgcgactgctccttgctcgccatcggcgtcatctccgtccccacgtcccgcatcgacaccgccgccgcctccgacgacacgcggagcctcttctgctggcgctgcctgctcgccaccgacggcggcgacgacgacgccgaggcctccggcgcaacgcggccggacacggccgctgctgcggcggcggccttcttggagaagattgggttggagtgcacgacgtgtctcccggcgagccacttctcggcgtcgttccactttgacggcacctgcctgaagaacgtcccgccgaccaccgccaccgccgccggcggcggtggcggcggcctctcctccctgtagaactcgaagccgccgctgtcgtagccattgccagctctcccatggctcgcgtcggagcgcgagcgagaagaatccgactggtccttgggataatctgacgaagaaatcaccggaatcaaacacacatcaccattgccattgcaagctccacaatggaatcgaagaggaagcgaaccttcgtcgagttcttggggcaggaggctgttcttggggtggtcgtcgtcgtcctcgtcggcgtcgagcctcgccggcgacgctcgcggcgacttctttgcctcgtcaaccctgccgatgctgccgccatgggatcccagcagcttcatcctcagcttggttggagacatcactcccatctgcattgcaacaaaattatcactaaatacatagtaaaccttaaccaatttgatggtttccaatgaaaatcaatcacccaagattcaggacaaatttcaaactgtcattactagtatccaagattcaggagtagtactagtttaattaatggcttggtaaattggggcaaaaaatttactacaagaattgactctggcttcctgctgcaaagaagagagagatttttaactgctcatactgcagttgccattggagagcagccacagctttgaatagagcagccatgaatgttggctactttgagcttgagagagcaaggtagaatccacaaccaaaaagtccaagagagagagagagagagagagagagagagagagagatgtataggaaccctgttgtggtagtagcaataataaatcaaaagcaccataaatggacatggctagagagttcaatattggaaagtaaagtaattagtggcactatgccactactatcttgacccaccaaaaatgttcatgatagatgagaaaggggagtagtcacattgcattatagcagtacttagcttcaagaaggggttaaaaaagagagatggatcaagcatagtagtacatggatattggatgatacatgaaaaatgaaaatgacatacctacagacatgagcatgaacttaattctacaaaccaaacacaacctaaacaaactaaggttgaaattgtagctaagaaacaagcatatggaggaatgaactaccaccaccacgactactactgtaatggaatactcggatagtgagtttgttacctgaactttgtgtatcctctcgtactccatgacagattataacccctctctctctctcagctttgagcttgctaaactgtactacctctagttacctgcaaattagcaagaaagcaaagaagcagggagggaggaggaagaagcagcaaagcaaagcagaatggctgcgagtgttgtgctttgctttggctctgatggggaagacgataaatactagaggaaggagacacgtagcattgtagcattggtgcacttgcaactctgaagagagaaaaattcagagagagatagaaatactagtattcagaaagacagagagagaaattcagagagcgagcaagcgtgcgtgcgggtgggcgtgcgtgtgtggaatccgtgtggaggaccactcgccggcgcgctcatcggtgtggctcctcttgctgctccacgagccgtccgatccacgcgtgatcgcctgatcggacggcggagatatcatcgctccgactggcaggtggggcccaacggctcggctaaggcattctacagcgagcgcgcgaaaatttcgggacgtatccgagctaaattcaactttaaataaacgagatttggaggaagagatactttaaaaaaattttaagaagaagttgtgaatatcctgcgaattaaacacatgatctcaggattaaaactaaaccctccttgttaatatattattaagtgcatctcctaaattaagtaaattaatgcagtacaagtatgaaattttccagggcattgtctatttgtttgttgttttcattcagacatgacaaaacatcatcaaagttttctaatcaaggttagagtgtgtgttaggaggcgtattcacgagcatgtaattgtggtgtgtgcatgtgtaataatggtgtgcatctctcgtataaccgctacaaaaatactcctttcatctatttttgaaagtcatatttccaaatctgaaaaatttatttttgataggcatattttaatccaacaacctatcatcttaatgactttctcggatttaatgcatgactctccattcttacacacatgattggctacatggacattgagaaatgtaaatattaatgaatcgcttgtttacgatgaatgactagtagcatgtttaaatggatgataagtagaattacttatccttggtctgtgtgccaagatgaaatatgactatcaaaaagtagatggatggagtagtacttagtaacaaattaaacagtttcgacccattcgaatttaatgaagatgaaaaaaccattagcatatgattaatggtgttttaattatttttaaacttgaaaatggacttatatgatattttaaagcaacttctataaaaaaaattcatatgaaatacaccgtttaacagtttaaaaaaacgtgctaacagaaaccaaactaaaaattgtatcttaatcaaaaacagggctttgataaattttaccgttaaaacataataaaaactttgttatggcttattcggttaatccctatatgcaaaagattgaaagggattaattatcctctctaaatcctattcaatcttagtagtatttgagaagggactaaccgaacaagtccttaatgttattacaaaatttcttggttttgggtgtgtttatttcacgtcaaaattgaaagcttggttgaaattgaaatgatgtgacggaaaagttggaagtttgtgtgtgtagaaaagttttgatgtgatggaaaagttggaagtttgaataaaaactttgaaactaaacttggcctttaacaaaaaaaaaattctacgaatttcattcagatttaaagctttgctctgagaggagaggcaaacgagtgtgttgtttgctcgttgttcttcccgagaactgaatgagctgatgagctcacctcacacgaaaccacatcacatgaatgcatgagcactagtaccaaatttttacctctacatatgctagtactggtagaagtatcagtgtgaattccagagtggcctatggcaagtagctacgtgtagttgaacactttttctccctttctgtattgtgcccaactggttcaaaagttctctaggactacactgttgattggagtacaatattttacacatttgtgcatgaaaaaaaataatttcccctcacttttattttgcaaaggacaatgtgatgtagttttatgattaaattagcagtaaacctatagttttatgataaatttgctacttaatctatagttttataaaactctattctaaatatgtagtttcatgataaaattattattaaatttttagttttatgataaaaacatcttaaatatgtagttctataatagtttgatcaaagtatatgtagttttgtaaaatttaccaaggtcaaacacaaatcctttattacatgtatcctttattacatgtccaaagtttctctagtctcgttattttcaattttttttaatgtgtgatgagaaatgttatgtgaaattaggatggaggcttttctaatcttctcccacacagcacaatttattttggataattcttcagcgtggtatcgtttacgcctttctcgctttcacataaccagagtccatgatggtacaatgctttagcttacaaaagtccttgactttgtgttttgaaagaagtgaaatttcctactctcaaaatgcccattgcaagaaggaagcgaagaacatctgagttgtttaatgatttttcaaaaattctcttcacccaacccctatggccctatccaacactagaccccatgtacacccaaagataaagccacaaagaaaggggagggagagaagactccaaagcccaaaacccaacaagaggaggagcacaccacaacaaaagaaaggacataaccctgcttaatttcctaattgtttagcttgctcctccttagaggacacaaagccacaccatcagctgccccttaaaccctttttccttctagggtttggcaatgccgtcagctcatgttcctcaagcacagcatcagtccaccaaaccattttttgttaattacccttttttaggtgatttcttgtcttgatgtttctagttagttccaccagcatgtaatttaatctgaccgttctggtttaggtttttgaggccacattatccaatgcttgatgtcacacttatgcaaatatacatctaaattatgtgcttgtctaactcagccagggtaattagcttcaacagttgatgtgccaaggagaatccagtttgtcttgtggcataaattttttggcggcaaattttcttcaaaagagatggcggcaacttgcatacttaaattaaaattaataagaggatactcctattatcctatacatactatagtaatgttgtattcttgtgtagtgctactccaaaagtccaaatggtgccatgaattgattcttctgctatggaactatggcactataggggaatatacatagatcattataaaagatcttgtatataggatgctatgcttttaagaatgtaatcatttcaattgtgccatgccctaatatgtgaagggtgttcttttacactaacaaatgatagtactagatgtgatcatgtcttttgggtcacaaa

SEQ ID NO: 5493 - DNA, 12785 bp, Oryza sativa
agggctcatctgcaagaacaaaccgggttaagctacggaatctgttagcagccgctgaaggcactgacctactaaaaattatgcaatcgaaggtaaaacagtatattttatttgtcaagtgcaaatgtttctattctgtgaaatttgaaatttgaaaatggtatacagtcaaggaagaagcggctacgttttcaaaggagtaagatccatgaatggggtctggtggctcttgagtctattgatgcagaagattttgtaattgaatatgttggtgagctgatccgccgacaggtaattatgacttaatgaacaacgatcccttcattgatttactgcatttgagcaacatgttataagattgatttatatcccacaggtctcggacatacgcgaggatcaatacgagaaaagtggaattggaagcagttaccttttccgtttggacgatgactatgtggtaggtgtagccagtttccttcaactacatccatctaagatgctatgtacatttttttacttcttttttatgttcgcctattagacaacagcagagttagttggtttttgtttgttttgatgtatggtcaggatagttctgttgttttgtaacctcaacctgttctatattgtgctctttctttaccaaattttatgagtgcaccttgtgctcttctgtattaattgtgcctattttcttaatctttgaaggttgatgctactaagcgtggtgggttagcaagattcatcaaccattcttgtgatgtaagctgtttaacatgaaactttcagttgtgatgcttattctatgctaaatgacgtcttgtttttcctaccagccaaattgctatacaaaagtaattactggcgagggccagaagaagattgtcatttatgcaaagaggcgtatatatgctggcgaggaactgacttataattataaatttccactggaggaaaaaaagattccatgccattgtggttcccagaggtaaatctgcttgagatagattttcaagcatgacaaacttgtgccaaaacataatgttgtcttgtcctgaagtagtcactacttaatgagttttagaaagaacagttattttattttatgctatgtctgaagtatgacgtttctatggtatacatacatgccaaatccaattttttttttaaaattaaatgcttagttcgttaccccttttttcataaattttgctaacagcattctgttatatatgtttgaaacgagcttgtaaatgctgttgccaaggttgcatattttatatttaccattgattatctcaactgtggccttggcctagcctagattgctactctcatggtacagcattttgaatctttggagttgcataaacacatttcttgttcattgaatgcaatcacttgtgctattattgatgcaatacatatttttatttacctctcccgctaactattttccggttgtttaggtgccgcggatcaatgaattaggaagtaaagtttataagtcaggtaattgttacagttaatatttgcaatgtaaagctcatagtcatagatgagcattcagatcattccttttcatatgcttggccgtctctcctgatctgagcataaaaaacttgtgttggaaactagaattgttgtttggttcagtaaatttatagtgttcatttttacagtaagcgaaaattctgccaacattaaacaacatatgtaaatttgcctcatatggaccaaaattcgttgaattccttccattgtgtattctgatcacttgttatctttggcaggaggtaactgcaattgggtgctaccccagtatgtatgtgtcatgcgtgcttgtcgattgtactgggcagaagttcactgcagaaatgttcttggatttactgacaggtacctgtgcaatctgcagctcatgctatcattatgcaccaaaagggaaacaaaaactgaaggtcattatttgttgagtaaattgcgctttgggctaggtattcttgccaaagtttcactttggatcacccttaagtgttattttttcactttgggctaggtattgttggcaaatgttaatcagacattttggaccgggtgacccacatgcaaatgagacatggacaacagagatggttagtctcattgacatgtgggccacccagtccaaagtgcaacttttgccaaagaatgttcccaaggcggtccaaattgaaactttggcaagaatacataaccgaaagcacaatttactattgtttgtttctagtgacataagatccctactaggtcgttgcttacttaacatttgctacctaccctaaatagatacactgtatttttcatccaaatttcgctgaaggttagcacctgttgtttgctaagatttttgtggattttatccaaatcaattgaactgaagaaaattgtttaaagattaatatccatacagtgaatttgatcacttgggcatggagaagtgattccagggtttaatatagcgattttgttcaagaacaaaattattgcactcacagttagatttattaaaacaatcatgggtaatggatataaatttacttagatttattaaagcaatcatgagtaatggatataaatttaccttagatttattaaagcgatgtaaatttactgcagaaaccttatgtcggtatctccagttccttcaacatgtgaggactatgagaaaaatgtactgtgcatgacaatacctgatcttctggccaaccttcaatgctgtttcaatcataaaattctgtacggcttgttgactttaaaatgacttcatggagatggagttctttattctttcttttgtccatttttcaggatggtaattgtgtagcaaggtatgggatcgtggaacatactgtactgcaaaaagatcacaaagttgctgagctttctggcgcagaagaatttgaacacgttatttatttaggttagatggactaattcgggctatccagaggaaggtaaagcgctcaagtgtggactgatggacttgttggttgccttagtgtgtctcctgaacgaggttcatgtttacttgctgacaaggttaatactgccccttcttgtacaggccaacaacattattacattgactggattgaggatatagagtttacacggtgatttcttcccgggggtacatttgaatgaacccctggtcattttcaattttttttgaagcatctaattacctgtaaagttaaaataaaccctataccaataccaatgaccataataatatctgtcttccccttttaaaatgtgtgctgtttgcactaaagtaagtcactctgatgccttgccattctgtgaatatagcgaccggattagccatctcgtttgcacataagaaatttgcagtcctgcttcatgggcctcttctgcatgtgccaacatccagagtcaacatgagtgcagtttgggcttctgtttgtatatatatcatttatttataatcatacagtacccaagatgtggttttagtttcagcagggcaagtctactgcttttgagaccattcttgatgagaccatttcattttcaattaatgtcatgctaaatcacacttccatgcaagcagattttacaccacttgtatgctataaatcacacttgtttgtgtgagccaatcaatgttcatggacctactcctgttgttgctgcaggtacatggatacatttaatctatcatccgtggtgtatgtgtatgtatttcgtccagaaaaaaaaaagcatccgaatcatgtggtatgtgttccattactttgcttgtccggattctttaactgttaagtacggggccatgcgcccatgccttttttatttggactgctcatgcattaatcagccacagaattaccattggcaggtcaggtggatacagacgtgcatgaatatctgatatcacaatcgtaagtatgaattcaagtattttaccagcttatatgtactttgtgcaggctaacaacagggcaaaagcaagccactaacaaccaacccgttccaaaaagaaaagaaaaaaaaaacaaaggtcctggattttgttatatcaaccgacagaaaatgaacacattcttagatatgttaattagttagcgagtactatattgttattagcttgtttgcctagtgggaaccgaaggtgcactcgtagaccagcatgatatacgtcgcataatcatcttcagctcaggaggaaactaggcgtctagaccgtcccaagcaaatcaccagtcgataacatcccttccctcactgttttttgcggtttctttattctttttttttttggctatttggaatagctgccacgttttttttggcaacagtgctccttgattggacgagcgaactggctgcacgagagtccacggtaatattgctgttcacctgataccaattgttgctgtatgttagaaaggttttcactgtggaagaatggaagtgtttagagagtgagaaagagaaaagatgcctcacttcatgaccgcagaaaccatatatattaagcactacaattccaacttgggggtacgtaacgtattattggcacaaagctatgaccctttcttcctaagcccaaaatccttggacagaagaacgatgagcccaaatatacttcggtgcagtacttgtttttagagtgggctacaatacattgtcaaattactgttatacaatttaaatttaaaatgtgttttgtacaaagggaaatgccacttatgagccattttcagtgggtcaatagtaaagcggtccaaaaaactgtttaaactaataatggatctgacgaaatagttcaagggtgactagaaaattctctatgtttgtgttagcccatagcatacatgtccagtgagatcacaagtgaatgcttgttactaaattgaaaataaaaggagaaaataataatggaaaagtatggttcatgtgtgtcaataaggtgtcaacggccttgtgctcggtcggaagagcatacaaaggggatatgcatgggatggaggtgaaattccatgctcacctaatcactttttggtggtcggttcgaatccggcaggccgtcatatgcatgcctatatttatgtcattgctaattctgatttgttattattttttcaaagttatccgtaggttatagttaggtcaatagcattcggatagctcattttttattctttttggcgacaaaggacatgtgtaagtaggagtattactcatttcatcccaagatataagatattttgattggatataatacatgatagtactacgaatcttcacagaaatcgaaccaaaatctcttatgttttgaaaggatggactagtcaatagtcgtcgctattgtttcaacaaaaaagaagtctatataattcatgcaatttttgtgcttttgtcttgggaagatgtattgtaaaggcagtcgaaaaagaaggaaaaataagttgcacgttaccaaagcagttctctttttgttgtatgcaagtgtagcgaggccttgtgcaaacagtccgtgcatacaaggcttggttttctacgactttcagcaatgttaacttggagtcaagttttttagaccgcattgtgcacacagctacactgcaatatttttgtttctccggctgattcctgtatctccactgtgtgctctttctaaggatatagaagtagaactattccattcagttcgtaaacggttcgattttcacataatcattctatatataaattccttataaagaactatatattaaatatattttacaactttttaattctagttaatttatccgtttgtgtcgttgaatagttatcacaaaatgattcagctattcccaaaaaaaggctgaatcattgtagtgaaattttcgtatattatatgagcgaaatccagtttttcaaatataatccttgataatataatcctcgataaaggccatgtttaaatttcaaattttccgtcacatcgaacttttctacatatacaaacttccaatttttccgtcacatcattttaatttcttccaactttcaattttagcgtggaactaaacacagcttaaaaaccttctgtttttcaaatattggccgtgccgtgtggcttctcccacaaactgcttactaattttgtacccgtcttcccctcgtaattaacccaaaataaaataaaaacaaacaaaaaaggaaactgatgcaaccgcccggtgccagaatctgctagcctgtctcgtctgtgctgttttacagctgcgaacggtgggcccagggaatattcaatattcaccccagcacgaatcttgacgcccaacagattcaccacagacttgacctggaatcaaggcaggtgcagatctgaatcggacggccgagattccctccggggctgtgtgtggactggtatcaggcagacgaagattcctgaccgttggatctgaatcgaacggccgagattcccgcaggtaaccccccccccctactcatcagctatatatacgcacactcgcagccgcgatctcgctggctaaacctagtcgcaggcgcgcagctaccttcctctgaaatggcagccatggcggaggcggcggccggcggcgaggtgcggcggcgaggggggtgctgcggcggcgggggaggcggcggggggttgttcccggaggagtcgttcgcgagctggggcgcgtacgggagggcgctgatggagacggggccgcggctggtggagcggccgacggcgaggtcggcggcggcggtggaggtgaacgaggtgagggggcggagcggcgcggagatgaagaggaacctgacgtggtgggacctcgcctggttcggcgtcggcgccgtcatcggcgccggcatcttcgtgctcacggggcaggaggccagggacgccgccggccccgccgtcgtgctctcctacgccgtctccggcgtctccgccatgctctccgtcttgtgctacaccgagttcgccatcgagatccccgtcgccggtcagtgatatgatcatctccgcctctgcatgcaatgacgtcaccttttctggatgattatgccttaattatacgacgttgattaatacactatgtaatatccgatttattattcatgtttaatctggtcaggaatacgtcctggtggtggtgaatattcaaacagaataaaggagattgatgaattaattagggcctttttagaacgtgatcgatactctctcacacatgcactgcttctgtaggccattaattaatcgaattaattctcatcaaactttctaattatcagattttttttttgtgttttatccttggagagataaggaaattatgataatactatatattttaaggcggcatgcatctgagtataaaaaagaatgctagatcacaagtaaacactgaaacatttttttatataaagaacaatttttttatgtgagaaactaaattaattatgttactccatccatctcaaaatataagcattttgggactttaacacaattttcgagataatattttgaccaacaatatctataaaaacaagggtgaatagctaatttagtccctcaagttttaccgaaggctcaatttagtccttcacgtttcattttgtaaatcatccttggacccacttaatatgccttatagctatttctagtcaatatttctattagaaaatgtcccttttgcccttaatttgtatacaactataaacccaagatgaataaacaacattacaaatgtacttttcattatttcaacatgtgcacatgaaacataagcaattgctatcgtatacacttgctagtacataatttatttttgttttatataatttactatgcattatctataaaaaaaatttaagcatgcaattttatcttatatatgtgaatgatgagggggtataagtgtcatttatcgagagaattgttggttattgataagtttgaactaaaataaaaacttgaaggactaatatggatagattgaaacatcagggactaaaccgagcctcagataatacttggaggaccaccttagctattcgccctaaaaataatatgttttagatgaaaatggttgcacagtatgatatttttttagtgataaatttagtaacatcaattttacatgattaatctttttttattattaatagttaaagttaaaaatatttgacttagcattatcctaataacgcttatattttggaaatggatggagtaatttattgacacacgatgtgtgtatattatatcactgtgtcacatacgtttgacaggtgggtcgttcgcttacctgcgagtggagctgggcgacttcgtggcgttcatcgccgccggcaacatcctcctcgagtactgcatcggcggcgcggcggtggcgcgcgcgtggacgtcctacttcgccaccctcctcaaccaccgccccaacgacttccgcatccacgccgcctccctcgccgccgactactcccgcctcgaccccatcgccgtcgccgtcatcgccgtcgtctgcgccctctccgtcctcagcaccaaggcctcctcccgcttcaactacgccctctccatcgcccacctcgccgtcctcgtcttcatcgtcaccgccggcctctcaaggtaggggtgcaagagggtttatccgtgaacccgtttatagacaaaaatagtgtaacccgtcgattgaactagcgggttaattatgaatttgatttataaatggatttataaattgatccacttatatatttagatgcggcaagccagaccgcgacgcgaaaacccataaattattatttatttaaacttgcgggtcggtccgtttgcacccctatctccagggccaggctctccaacctcaccgccgacttcgcccccttcggcgcccgcggcgtgttcgcggcgtcggcggtgctcttcttcgcgtacgtggggttcgacgccgtcagcaccatggcggaggagacccgggacccggcgagggacatccccgcggggctcgtcggcgccatggcggtcaccacggcggcgtactgcgccctcgccgccacgctctgcctcatgcagccctaccgcgagatcgaccccgacgcgcccttctccgtcgcgttctccgccgccggcatggggtgggcaaggtacgtggtggcgttcggcgcgctcaaggggatgaccaccgtgctgctcgtcagcgccgtcgggcaggcgaggtacctgacgcacatcgcgagggcgcacatggcgccgccgtgcctcgcccgggtgcacccgaggctggggacgccggtgaacgccacggtggccatgctcgccgcgacggcggccatcgcgctgttcaccgacctcggcgtcctcgccaacctcctctccatctccacgctcttcatcttcatgctcgtcgccgtcgcgctgctcgtccgccgctactacgccaccggcgagacggcgcgcggagaccggaacaggctcgccggctgcctcgccgtgatcgtggcgtcgtcggtcgcgacggcggcgtactgggggctgggcggcgacggcggcgggtgggcggcgtacgcggtggccgtgccggcgtggctcgcggcgacgctgttcctgcagctgagggtgccgatggcgaggacgccggagaagtggggggtgccgctggtgccatggctgccgtcggcgtccatcttcatcaacatcttcctcctcggctccatcgacggcaggtcgttcatgcggttcggggtctggacggcggcgctgctcgcctactacttcttcttcggcctgcacgcctcctacgacaccgccaaggcgctcgccgccgaggtcgccgccggcaaggtggaggaaggcggcagcaagccggcggtcggcggcgccgccggcaactgaaaaaaaagttactattatactattactatccactgaagttatctatgtgtagatagagaattagtaatatttgcattgtcattgttaattatcatcgggattgctaaaattatggcgctacatttttttactttcagttgttttttttcctcgtgtgattgtcatctctcctgtatgtaaatatgatctatcccattatcttttgcggttggttttatagtttaataatagtaatttatgtcatcatgtggcaaattgtggagtgatttatccttttcctttagtttatgttcataagtaatttcatccaaattaaatatcctggtctaaaagctgtgttcggcaatactatcacattgagtagaaagctcactcgttatctgcacgtacgcttcctaacttttaaatggtaaaattattttaaaaaacatattaattaattattcaaatttaaagtaattaatacttaattaataataagctaatgcctagcttatccagttttacatatcttctcctttctcctcttactctaacgtaggcacgtagcactgtagcagaagaattcgcattggtcacatttaggggggaatcgcgagacgaatcttctgagcctaattagtccatgattagttataagtgctatagtaacccatatatgctaatgacggattaattaggctcaaaatattcgactcgtgcttttcaggcgagttatgaaattagttttttcattcgtatccgaaaagccattccgatatacggtcaaatatccgatgtgacacctaaaaattctcttttcgtgaactaaacaggccataaatgaaaaggagaaatttgtgctattggaatttggacctgacgagatcacgagatgaagaaactggacttttgttgtgatagcctatttgaccacattttcctctgatgtgccgtagcgtggaccaaattttgttattgggcctccaggttaggttttgatcctgccggggcctcaatgatgggccatacagttcatgggctcgttataatgggccaagatgtttgtagacagatgctgagcttgaactgttcctttcttcttctttttattttttattttttaaaaacagcttgaactgtttcaggcttgtggtttgtttgatactctttttctggcagaagctttatttccaactagttgtttaccactttacccacgcgctttgcggctggttaaattgaagatagtcgcaataatattatgttgcagctttaataataataataataataataataataataataataataataataatattattattattattattattattattattattattattattattattattattattattattattattattattattattatgttgcaaatccttgcataccctactagtaacagataacatagaatgtgagatacttttagacaatagaaacgtattacatccccgacagcataccgccaataagtttatttgactgtaaatacaggaaatatgatgaccgggaacccttgtcattgcatgcaataaaattagcaagaaccaattcaaggaatataactagctcagtttctttttcataattcaggtcccatcgtattgtagaaatctaatttatatgtggaaatcgaggttaaccagactctcggtctggataagaaaaagacagtgttgggttaaatcctcgttccttttttcccccctaagagaaggcccttgccccctttttttttttaatatattgatagagaaggtcgttctcgttcttggaattctatggtggattgttgggtcacatagtgcgtagctactctgctggaagcttgtgagactctgtgttgcgtgtagttaatggtatggttttgtaaaattttagaaccgtgatactcatatatcaaaaaatttatgattttatacaacttagactataaatagatccaaatatttactaatctcagtttatttttcacacatcctactatcccacgcataccaataaaaaacaaaatacacatattttatccaaatcccgatacaaatatttcgcactttatgcactcccggtaatattttactttccaaacacggatgcaatgattgtggtaaaatctccctttgtcccacaataagttcaggcctggtttagtttccaattttttttccaaaaatatcctatcgaatttttggacacatgcatatagcattaatatatattaaaagaaactaatttcacagttgggggggggggaaaccgcgagacaaaccttttgagcctaattagtccatgattagcataaaatgctacagtaacctacatgtactaatgacggattaattaggctcaaaagattcgtctcgcggtttccaggcgagttatgaaattagtttttcattcatgtccaaaaaccccttttgatatccggccaaacatccgatgtgacatccaaaaaatttcttttcacgaactaaacaggcccttaatttatctccttacatttgtgccgacacaagttcatttttagagtaatcattgcatcagagtttataaaaatatggaatatattaagagtagataaagtgaaaaatagttacattgagatttgataattaaagtatgtattttatatagtctttttgattttgtattggtatgtgtgagatgtatgaaaaataaatttattttgagacggtggcagtactcgctccattccatattataagttgttttggtctttctatccctcgtgtggattaactataaatttagacacatatatgaagcacacacataaattaaattcatgcatgaatccattaaaaatccaaaacgtcttgtagtg

SEQ ID NO: 5494 - DNA, 12575 bp, Oryza sativa
cggaaaaattgacggaagtgctaaaaatgggaatagggtgaactttgatgctactaaagtgaaccggtaactttcggtgctataaaaccaaaaacgtgaactttcgatgctatataaccaattttgccaaaaaaaaaatatgtacggaatagaagtgagtagtgaatagtgagtagtgagaagtgaatatatatttgcttctgatctttgttagaagtatacaagtgaagggaaaaaaaatcaaaggaagatattcatcacagaagtcatgcccaacttcagagttcagactaatgtactaggacagtagcacaatgcaaagtataagaatttcatacagcttcaaatagctagatggataacttctctcttctttttcttttttacttttcgagatcaattcattcctgacaaaatttttattcttccatatgtttgtttgtttgcttggatcaacttgttttctcatgatttttcatataataaatgattgtattagaaaactatcaagaaacgatatacatagtatcaataaaactatcacttattcaaacgataacatatttatgcattatgaatctatggtgcttcagatcgaacaaattgatcatacaaggatcagatcatgttacaaagattaaggcttcatcataacattgttaatatgaaaagcttaaacagttagcacccccatcaagttctgtttgaatccacagtggaggttttaccttaaaacatatcaacttgctgcaagtaacttgacactttcagtttgctgcagctgatgcaatgcctctttcagaacacccaacacattctgtagcagttgtgcttgccacagctgatccaaattaacaattctcacactatcacattcaaagatagcaacattgaccatggatcggtagcgcaggtttgaattgaatttcttctcctacatgtcactgaaaaaatatttagttcctgcaacgaaacaaaaacgatggaaatctttacaaaataaactgctgatttgcaatatatgataaagaataagaagaccattgaccaaaccaagggttgcttgttgcatgatttaattcttgacaaaactgcatttaaaagtcagattcttatttgtcgaaagcgcgtttttgttttcttggaagaagagagacgaatccctcagtttcagatagttaaaccaaaacaaaattgcatgaaagtcactgtacatgtttgcttacgctgatcccatatatatgaacatgcttggaaacatctctacatataactaaatccaactagtattatactccaaatttgcattgacttgggtggcaagaaatgaccaagataaaccagtattatcctgttgatttaagactgagcctgtgaggtatatatgcaattttaatattccctaaaaaataggtataaatatgcagttttcataccagtacactgagtaaatggcaaagccagtgaccacaaagcacccagccatgcaagaagcattagtccttgcaatgaaggtcataccaagcatcatcttcctcgcagtggcagtgcaggatgcagcttcttctgggtacagtctgtcgttgccaggatgccctgataagtgcggaaatgtttccatcccctacccttttggcgtcggccccagctgtgctgcaaccagcatcagcagctacttcaatctcacctgcagcaacaccttcaacccaccacggcctatggttggggactctgaagcactcgtcgaggtcactgacatctcactggagcacggcgagatgcgggtgctcagccctgtctactacatctgcttcacggcaaataccacgttcaccaagttcaccgaagggtatgagctgaagcacacacccttcctcccctccccgtcgcgcaaccgcttcacagtcatcggttgcaacaccctggggctcatcggtggctacaagggaaccgtgagccactatgtgactggttgctactcctattgtgagagcatcaacagcacatctgatggggcgccatgtgcagggatgggctgctgcgaggccgccataccgactgacctcaccgcctggggggcgatgtttgagatgaaccagagcaaggtatggagcttcaacccgtgtttctatgccatggtcagtgaggttgggtggtacagcttccagcagaaggaccttgttggccaccttgggttcatagatgacagagctcagaggggagcacctgttgtggctgattgggccattaggaatggctcatgcccggaagaggggaaaggcatacctggtgattatgcgtgcatcagcgcaaacagctactgcatggacgcgaacaatggtccagggtacttatgccagtgctccaaagggtatgagggcaacccttatcttctgaacggctgccaaggttaggttcatacttaaactggtagaattctataccatgcacagtgttaattcaggtagagtttgtaagctatacttctacaaaatcatatgaacattcatcaatagacagcaattctacatggtttccaccataattcagcatgggactggaaaaagaaacagtcagcttcatttgtggggtagatttttaattacaaagtgaaaaggtcattttggaacaagtattgaaaggggagttatagcattcttaagtaaattggctggttgactttagcttacctatgataacgaaattaatatagattatatagttcatacaaatttggtctgaattttatgaatggatgtttttgttgctatcttcagacgtggatgagtgcgcattgcgtaagcaagatcccaagtatgaggatatgtatccatgcagaaaaggaatctgccacaacacaccaggaggatacttatgcaaatgcaagttagggaaaagatctgatggtacaaattatggatgccggcctctgcgcactacagccgagaaagtggttattggtaaggtcacatctgcagattttacttctgtttcacctacattaggatgttcttctactcaaagtaacactaatactatggcaagaagaatactaattttgaacactacctagaattgtcaataaaaaataaatttaagaagttagtagcagaaaattattagtatcaatattctgacagagataattttaaaggcaccagtgtttcggccattgcgctaatgtctttggcatgcgtgttggccatgcaagtacaaaggaaaaggcataagaaggacaaagatgagtacttcaagcaaaatggaggtctaaagctatatgatgagatgagatcaaggaaggtagacacaatccgcatactcactgaaaaagatataaaaaaggccactgacaactacagtgaagatcgagttcttggaattggaggtcacggaatggtctacagaggaattttggatgacaacaaagaggtagccataaagaagtccaaagtaattaacgacgaatggagggaagaatttgtcaatgagataataatcttgtcacagatcaaccacagaaacattgtgaggttgataggatgttgcctggatgtacatgtccccatgttggtctatgagtttgtatccaatgggaccttgtctgagttcctccatggcactgatcgtagatcatcaatccccttggacattcgcctgaaaatagccacacaatcagcagaagctctagcatacctgcattcatcaacgtctcgcgcgatccttcatggagatttcaaatcggccaatattcttttggacgatcagcacaatgcaaaggttgcagattttggggcatcagcactgaagtccatgaacgaaagtgagttcatcatgtttgtccaaggaactttgggttaccttgacccggagagcttcattagccaccgtctaactgacaaaagcgacgtctacagttttggggtggttctgctggagctgatgacaagaaagagggcaatctatgccaatagcatcaatgaaaaggaatcattgtcctattcttttctcctgatgtttgatcagaacattcaccggaatatgctggacagagaaattatggataaagaaaccatggttgtgctcgagaaactttccattcttgccgccaactgcctgcgaccaagaggagatgaccggccaacaatgaaggaagttttagagtgcctacagatgataaggagacacccaatgcacggcgctagtgatcacaaaggagacagctatgcacatcacaactatgaaggatcgccatcaatggttgttcacttgaatgagaccatatacgagagcattgaaacgtccagattggttgatgatcttgtgagatgatgaagaagcttgtaccagcacgttaattcttgtgttggcgaatgccatagtaaatactacttggtttagccaactgctgtaattattgtttaagcaatttgttccttgtttgtggcaataatgatctcttctattctgaataaatattcaattgtatacagccaagttgatcagatttcagaagcaaagttacctgaaaaataaaatgcttcgatttgctccccttagcctgcagccacgatgctttgatcttgtaagataatgaagacgaataactaatcttggggatcatgaattgatgccattctgaatagaacgaataaataaataaaaatattcagttgtgcagtccgatttgattcagaactagagtagagttacctgataacctcgcctgaggtcgcaatgctttggagctggagcgccccgtgtcctctcccaccccatgacgcggcggcgtctcttcctcccgccgccgattcaaactgcgaccgccgccaccaatcccgactgccaagaaatgctagtcctccggcgatctccgccgccgccacctgaggcacgccaccggacccatgtccgtggcttcgtcttggaagggccggaccggggggccgctttccgccggcggcgactccgcctctccacgccgccgcggtgtgtggccggcgatgtgggcgagagactccattccgtcacccgagcggattacgagaatagcctgggcgtattctagttttcaaaacgtaatctaatttgacgctttcaacaggcccaacgaaaatgggcctcaatgacgagccatgggcaatttggggcctcatcggttactaacggtttatttattagcgataaaaataatttatacgaaaatttttatatacatgtattcttagcgaattaaagtcaataaaaaactatgttaaaatattttaaaatcatcttctaaattgaattttaaaatataaatttggcataatttgtcttaattctttttaggtgttgttcttttttcttgaagatgaagttttttatgcaaaacgaggtggtataaacgtatgattgattaagttttaattattacaaacttgaaaaatagattaatataatattttagagcaactttcatatagaaaattttcgcacaaaacgaaccgtttagcagtttaaaaagtgtgccacgaaaatcttaatattcatccagcccttgttagagaaaagaacgggaccttagtacaaccgatggggctcctgaagttatcaagacttctaaactccacggtaggacaatgtcaatgtggagtactggagtccaagagcctcatccgttccatcctgaaaagcaacttcaaatcggatcagtttaacaaaccccattgagtaatttttgattcagtaaaacattttaacttgctgcaaatagctttgagttcccacttccaatttgctgcagctgatgcaaatgcctctctcagaacttaccagtggtggttgcaacaattcacccaaattatcagtcagattatgcttgctgtagctgattcctatttaacaattcacacctcctacctaaaatatgtgattagagagcacgtagactactgctactgcttgattagttgcgactatgctaaatgttctagaaaggcatcacctgtcctctcccaggataagttactttttggtccgtttaaatttctagaatttttatggttttcttcctaattaacttcttcaaactgtgctagaactatgtatttgagatggcacttcacacatctcccatctgagtgagacatgtttaacgcggttggttatgagagtttctgattaagttcacattgaaaaccacatcgattctcaacgtgattctaatagaaaggttgcactaatactccacatattgtaagcttgtattctcgccgttacacaaaatgaaatctaaatttatgtataaatactaagaaaaaaattgagaagtaaaaatatattaaacatacatttttaataacttaactcaaaattcaggtattaatatgatatgataacttccactcctcctaaaattcaggtattaatatgaacatctagatctccttaacgggataaaggaacaacttccaccccttcagaattagagtacgtctgattcaggtattaatatgaccatctagatctaacaacttccacttccacttccactcctccttaacgggataaaggaacaacttccaccccttcagaattagagtaagtctgattagagtgataatgtcctcccaattgaaacatggtgctactttgcatttctccaatgtctccaaacaactaaataactatttacattgtctgaaaaacaactaaataattattgatctcattagttgattgatcctttatgtttacttatttacttcgatttactatttatatataagcataggctgaacagaaattaaacgctgcaatatagtttcagcgagaggtcatccagattttgttcttccatatcatcccgattgcatgtaagtggccgagatgacctttcagaaagagtagagagatggacacgactagaaatgattatattcttggtcatgcatatatgatgggcaacggtttttccaaacaaaaaatgctactgtgtccttcactttttcgcaatacttagcactaagctgttgagatgattcctgtcatgttataagtgttttactgaaccttacgatctcctggcagcatggattagcaggcttgcagcacctgattctaacttacaaatccaccttctcatattgaaaattagactgcattaatcatagaggagtagtttcccgcgtcgactttttatttcagtgtttaatcaactagtacaatacatgtcaaagttaggtactaaaactttacacatatatgcggagtggattttgatccctcgatgggatatcccctcgttgtttgcatgtcactcaaattgttatgaaaaaatttaagaagatgtattaacatgtgatatatcactccacaaacatgcaagtttaaattcaacttctacatcttgcaacgaaaaaaaaaacaaattaatggataaacaaattcaacttcataaatatagaaatttacgtaccatttcagaaaaaataaaaaaaatatatggcaaaatttatcccagaacaacaaaatttgtgtaattggctaggagacatcgtaaaatcgtgtcgctgctgatggacaccacaaaattcgtatgatttgttataggacactcgagacaatattttatcatttccaggcaaaaataggagagataaaattcaaaaaacacaattgtccagccctatctaacccccattggcacgaatggtggcggtagcggcggtggcttggacggcagctagctagcctggtggcgtttgcgatggtggtcagcaagttcggcagtggcaacagctttgacggcgacgataagccctgcgacagcttcaacggcaattggcaagctccacgacgacagctttgacggtgactagcaaacctggcggcgatggctggcaaacccagtgtcggtggcttcgacggtgactggtaagcccacaacggcttcaacgacagctggcaagcccggtggcggcggcttcgactgtggctggcagcggctttgacaacggcaggtgagccctgcggcggcggcttctatggcggttagcgagcggcactgtaaagcaggtgatgtcaccgaggatgaagtcacctgtcacctgtggggattagatagggtttagggcgattttgtcttttttaaatttctttcttctcttttttacccagaaatgataaaatattgccttgatgtcctataacaaattatatgattttgtggtgttcatcagtaataacgctgccactttaacaaattttgggtgttttgtggtaaattttgcaaaaaaaaaaatcgtttctaaccatttctgatccttttcatccctatttggatgagtctcatatgcaagctgcaatagggaaagaaacaaaactacaatttagtttcaccaagagctcatcgaatttgtgcagctttgtttcttccatgtcaatccatttcgtaggccgctctctgtttaggggagagagagagagaggggacaggaggcaagaacataagagattgttcatgtatatgttgtgatgtgcttgttatttatttatagatctcgcaccgtgatctaatttcattcgtttcttcatcagaagactcgtttgttttagtgtgctctactccaggtagttggtaccaggttgattaatgagcagtgagtaacttacggaagtaagaggaccaaattcgaatccatggctcgtaattcaaactaagaaattcacatcaagctcttgatcactaccagaagtataatatgcatatggagacagaaaaagaaattatcagaagtggatatatatcttagaatttgcgccatatatgaatgtttaggttgcaggttatatttttgcacattgcagcatcgtgcacgggtagaaaagagagatgtaaatcaaagaaaagaaccaccattgttttgttctcattctaaattcaaaagggaaaaatatttgaatatgagggaaagcaagtatagttgccttatgtctcagatgtatattggcataatcctgctaatatgtttgttatactcttattctcttcttaactagtgtaaaagggaaaaatatttgaatatgagggaaagcaagtatagttgccttatgtctcatatgtatattgccataatcccgctaatatgtttgttatactcttattctcttcttaactagtgtaaacaaattttaaaaaactagaacacaaccctaacataataactgtttttattatgccaacctaacataataactcttactatgcatggcaagaaatagatcagttcaaaaacagaaaataaactggttttattgcttctgattcgacttttttggattagacaagagagaatttgaagccacactagcccacaccaagttacactagaattgagtagaaaaacagttagaaaaataataatgttacatttggttttctccaatccctcgaaaaacttaacgtatatttatttgcttccatgtactatagtaccatgccatttatatgcctaggtcgaacaggctgcatatgtatctatctaaatattaaagtttcagtaaggtcatcaacgttgtgcagcttgatttcttccatgtcagcccatatgcatgtttaaaccacagagatcgagtcatgcacttgttatatatttccaaacgttctagtgtgatttaatttcatctatccgtagttcagacttcagaagcctcatttttagtgtgctgcactccagatagtcagatcaggtacctggtacaggttgatttctattattaattagtgactacttgttgtgccgcatatagtacgagcatcaaattcaaatccatggctagtaatccaaagtaagaaatttacagtgctcctgatcactgttagaagtataatctataaattacaagtggaggaaaaaattcagaggaagatatacacctcagaactcatacccaatttcagagttcatacactaattgtctgggatattcaggcatcggtgttaattggagtcggacaatgactatttgtggaaatgaaattttctttctgatccaatacaaataatgtggtatacattggaaaaacaacggaaccttaaaatttcgaaacttcggtaaccatagtgtgggttggctttatatgtgctcagaatttaggagctgattaattagctgaagctttcatcgttttccccttaactaagtcagccttacatagagcatcagtggttccaacttccaagacaacttcatgtgtagggagctgggaagaacctatatatcaaagtgaaattataagtactaaaaagatcatgcaaaagtaaaagagaattcacaattcattcagccatgataagaatgtaagattgtgctacagctaatgcaaagaatcatcagataagttcatagaataactcttgacacaacacacaacatagcggaaggaagagaactgattgattagtcaccacaccacagtgccacacacgtagtctaaagtctagcaaattcaggtcaaggatatcaaatttagtcaagagttgacttcaactacatacaagaaaagaaaaccttaacatcacctttgaaatcactcaaataaacatcaactttcttgccggctaaggaaccaaaatgtctgatttactaagcttttaaacacaaaatgatgtagtagtacttaccaaccgcaccagctgagcttttcaatccaggtgaatgaataaatttttcacattaagggaaatgtacggggtaattgttgcctgcatagcttttttaatccgaaaacgtacgggaagtattttcagttgcagaatgcacttcttaattaaagcaaaacagaatgcaaggtaaagtttcctgtcaaatgctgatctcaccaaagctagttaagtaacaatcgttgaaatcaactcatatgtaacaatatccatttgatcagcattagaaacacaacatctgcaatggaataaaggagttgaccttacttctttaaaaccctattacctgtctcaatctagtatagataatcacataataaagcaacgtggaagttgcataagcatgaacgttattacatgtccaagtctagtatagttaatcacataatagagatacatggaagttgcagtagcatgagctagtatcacctgtcccagtctagtactctagtatataatcacataataaagagacatggaagatgcagaagtacgaacaagtaggttcaaaaatagtgccacagcaactagcaagtgatcaccatacctccaactccgcaaccatgcaagaagcatccgttctcctcatgctcatcgtcttccatgcaatggcgatatcaaccaccacctctgaacctgcaatttcattgccaggctgccctggcaagtgcggaaatgtatccatcccttacccatttggcatcggcgctggttgttctgcgaccagcctgagcagctacttcaccatcacctgcaacgacaccttccagccaccacggcctatggttagagacctcctatcagaaacagaggtcatcgacatctccctggagcgtggcgaggtgcgcgtttacggtccagtcagttacatctgtttctcatcaaacaccaccataccagagaaccataccacagggttcaccctggagggtacgccgttcgtcccttccaccacccgcaaccgcttcatggccatcggatgccataccctcggcatcattggtggctacatgcacagcaactctaatctatatgtggctggctgctactcctactgccagagcatcaacagcacatccaacggtgctccctgcactgggatgggctgctgcgagaccaccatcatcccagacctgaaggacttcgcagcgatcttggtgatgaaccagagcgcggtgtgggaattcaacccatgcttctacgccatgcttgtggaggccggatggtacagcttcaggcagcaagacctcgttgggcacctcaggtttgtcaatgggagggccaacagaggtgttcctgtcatccatgactgggccatcaggaatggctcctgcccagaggggaagaaggtgcccaaagactatgcctgtgtcagttcaaacagcaagtgtgtgcaagcaagtaatagccaagggtacctgtgcaaatgctctgaaggatatgaagggaatccttatcttcccaaaggctgtcaaggtaacatacatataaactttctctagattatatttggagaccaagataaacaactccaggaataacaacataaccagaacataattatagccagttttaatgctgctgcgtaatatttattctttttgttactccctccatcccagaatataagtagttttagagttagacacggttattaagaaagtgtgtagaattaaataggaagaggttgtaattggttgaaaagtggaggtaggtgggaaaagtgaatggtggagggttgtgattggttgggaatggaatgttggtgaagaagttgctatattttgtaacaaatcctaagtgctaaaagttgttatattttgggacggagggagtacctttttttcagcttccgtaacaagccaaaatagt

SEQ ID NO: 5495 - DNA, 11941 bp, Oryza sativa
  unsure (1)..(11941): unsure at all n locations
agctgcatgtactttgcgtggggagggtaggccagtatctcatagccttttataacctgatccgtcgcatccggacaaaaaaaaacaattacgtaattctgggtctttgtatgctacttccactctctgttaaaatgtttttgtgatgttccttttttcagatgcatccaccattggtcgggatgcatccagctggactaccactgcctaccgatgcaattgaagagcctgtctatgttaatgcaaaacagtacaatgccatattaaggcgtcgacaatctcgagccaaagctgagtctgaaaagaagcttgtcaagggccgtaaggtaaatcttattagcaccttttacgaaaccatataacatggaatattaattagttatccttttcctgatgcttcattatagttcgagttggtcagaagcacaagtgaacaacaacttgcttcaagtagtcgactaaattctccaatctacatatcccacttccatactaagatcaatctgctctactgtaaatcttatggtgaatatacatccaatcttttatcatgtctagcataccaagtttccaatgtcttctggctattgctcattngtaaacattaaggatctgggaattggataccacacaacaagaaatttgtgtcaaatatggatgtgggnntgatntgctctctatttccatgtaaatttgtaagttcaagctgtgcctttttcacttctttttgtaccaaaataatacaaactcttgttacttggatcactgcattggttctaatcttgacagagtttaaggttggcactttctgtcagaagttaagttaggacttccacaaaattataccatctctgggtgttcttataggtgtttctcactatcaggaatgtacagttcttgcagctgtcaagttctttgtacctatgtttctgtatcttctaaagattttgattcgtctgcactgtgcagccatatctccatgagtcacggcatcaacatgccctgaaaagggctaggggagctggaggccgatttcttaattcaaaatcggatgacaaggaagagcattctgattccagttccagagataaacaggatggagttgcaccccgtgatagtggccaaccgtctacctctccgtcttcaaagggtgcatcatcagctaaacaaaataagaagtcaaaaaccagtaactaaacgggatttaagcacctggtgtgaaacatggaaacagttttgtacagtacatgctagtgatcgacaaagaatggtgtcattgggtgttgtaggataatgctccatagagaatatatagacagggcaacagattttgcagcctttggttcggtctgctcagtttctttaccttcttgtacaatgagtagttttcgtcagttgtgctttgtcatggggatagctgaatttcttcagaagtcttgtagttttaaagagttcattagcttgccaattgtttgctttggattggattggtctcttactgcctttgcatcatcatctgcagtgcacagaataaaacattggctatgtgtatgttcatgacaataaaccttaaatgtaggacaagcagtgacttcatctggagctttatctcttctgcacacactccagatgccaaatgatattcccatctttctcttggaatatcatgtattcatgtgatcttaacagctgttatggcaatccatgatcttaggttatgtcttcgcctctttggcttgttgatatgatgcttgcattgcatacctgtaatgcatgttctccattgagttgcctgatgattatgtgagactaagaacatatctctgaacctgattttgataggcctattacaatccaggcatgtcttctccatcatgttgccattacatgagcatatgcttttctcgagaagatggaaattagcagccattaccaagaagaatatactttctcgagaacactgaaacattttaatttgtaccttttctcgcacgagcacatctcgcttttttgcttagaaagaccacaaggataaaggataatactgaggaagaaaggataatctgaatctcgactttcttcaaaggttctgaacttactttgaatggtaagggttctgaacttaatgtgaacaattctgaacttctgaatctcaactttcttcaaaggttctgaacttctttgaatggtagggttctgaacttaatgtgaacaattctgaacttctgtttggcttctgggaagctgggcacaaaatttcctctcgtttttctagaaaatagtttctgaactttttctctgaaggatacagtagttctgaacttcttctttgactggttgagttctgaactttgtgtcataaatccagctaatctcaagcatgagctttctgaaaatctgaaccaaaactcgcatgcacaccctctctgtaattgaaaacttttgcagacattggtgacccacgtgattatcttaggcaacactctgtgattatgtcaggtgcttaccaaagtccagacacaacactgccaagtcaccatacttcttctcccttagcacacaagttactaacaaaagcatagatctcctcatccgaatccttaaacaaatcagctcacacataaacatggatatgagatagagagagagatgaacgaattaataatcaattgaggcagaaagcaaatgataatgcttgttaattgggaccctcttctgaagaattatgagtgaggcagagcaggcatgcagacaagaacccagagggtatttgcatatttgcagttgcagaattgccagaatccacacaggttctgtgtgtacgtaccgaacattaatcatgtattcctgcatgtagttatggaatgcaaatttaggtcaatcttataatcatttcttggctagattgatccatctattcagatttaaaaagggcacaaaaaaggaacttgataaagactagttttggatggctaattattcctcatgcattagtttgaatctgcctgcacatgaagcagttttggatggctaattattcttcatccattagcctgaatctgcctgcacatgaagcaatctttgtaacaatctgttcttcaaaatgcaactgaccaatcagaaattgggtgatcaagtgaagtgagcttcagtgttgttactgaatcaagatctagttcatgttaatcttttgatggaacagtgagtgggaggatcaagatgttgatgacaccccccctaaaaagaacacaaaaaggaggaggaggcatgcatgagctacctcctcagagaacagtgaaagggatgcttgacatgctttgcttgcactacaaagccaggccccattcctcctccatggacaagaatagtttttatttatactaccatgcatctctctacggtgggaagcatatttgttgttgtgaagttgtgcgtgcagagttcaaatcttggtgcccacaattaaaaagctatcgtgcatccgtaaccggtgcagaggctggaaattactttcattatctaaaaatgcgatctatatggttctcggtatgattctatcactttgatgtaatcggctgaaatcaataaagcttcattttatcttaaaaatgcaatgtgacttctaactggtgcattttgtttccattatctaactggtgcatctgtaaattgttgtgaaagaacaagccatgcaagaagaaattcaggagagaaggacatggagggatggcaaaagtgacatgagctcttatcatgccatggcagggggacagaaacacaacattggtgtaagacagacagacaggccctttaggcccatttgacctcccacacttacccaatatccatcagaatttttttcggttttagattttttttttttaatatttacagaaataatctatcgaccaaaaaaattgcagaaatagcccctgccgcccacctctggggcggcaagctgacgtggcaaacgggggaggaacgggtggtgacggcgggagggtttttttgcaggaaaacccttgccgccctctggtggggcggcaaggggcccgaatgcaaaaaagccagtcggggccggctattttgcaggcggccccttgccgccctctggccgggcggcaggcctcgctgcctataaaaggcctgctgcccagcccccagccctcattcttctcttctcaattccagtgaaaaaaaaagaagagaggggaggagaagagaagaaggggcgaagccctgccggattcagacgccgatttcaggtaatattcatagatcctatatgtgactattgagttaaatagtgtgtattctttaaaaatttgtttgaataaatgcattatatttttagggttttagttgtactaatctagaagtgcgtattgttgatatcggtaactacgtagatctgctagtttggaattaatacattaccgttgcattggcttacacaagaagatattacgttgtagatgtttattgcatgaaagagtaatatgatctagttatttcgttgacagatatgtcgaacaaacaaatattccaagtttaccatggaccaagaaacgtccgttacaggccaagtggggtagatctgtcagattttattgtatcagaaaggggaattgatagaccggctgagaggagtgtaccttctataaaaggatggttaatgaggggcttgagagttgatccacagacaagtgacataacaatcaatgttatagtaagtcgggcaactgagggtttttattgggaactaatgccagttcaaaactctcgagtgtggagatggtatttggaaaatgcattgcaacgcgggtggcctctagctttggttccgtttgttcacccgaaggatctaggtgtgcagacgaacatggatgatggcgagggaccaagtgctgaagtaaacgagacttctgtggaggaggtcaacgcacgagaggacgggggcgtagtagctccagtgggcattcaaccaggtggagtggccgacgagggggagactgtcggtgccattgtggatgaaatggagagggaggattctgacaacgaacgtgtagaagaaggtgattcgtcagatgatgagacggatattaatccagcagaatgggctagtgaggatttttctgggctgatcgtctctgaagaggatagtgtgagatgggagtacaaagaaaatgaggttattcagggagcgatttatagtagagcagaagatatgaaggaggcggtaaaacattttgcagtgtcacttcatagagagttttgggttgccaagtcgaaccggtcgcaatatgaagtttggtgtgttaaggaaaaagatggttgtccctagagagtgcacgcgtataaggggaaatggaaggattattggacagtgtcagttgttaccaagcatacatgttttctacctggtgttcagaaataccataggaacattacatgtgcatttgttgcatctgagatgtatgcgcatgtcatcgataacctcacatatgaaccaaggtcaataatccgacacattgaagagacatacaagtatactattagctatgccaaggcctggagggccaaacagaaaataatagagatgagatttggaacttacgaagcctcgtatgacaatttgccacgcctgcttggtgttatcgaggaaagaaaccctgggagctcttacgaagtgaagaaattcccctcaattgaacatcctggcaagagtgtgctgcaaagggcgttcttagctctacatgcatgcaagatggcattcgtaaactgtcgtcctgttctctgcattgatgggacattcttgacaggaaagtatcggggccagatactaacagcaataggggtagatgggaacaatcaggtattgcccttggcatttgcttttgttgagagtgagaataccgacagctggtactggttcctgaaattggttaaaacaaaagttgttggtatgaggccaaatgtatgcctgatacatgataggcacgctggcattctgcgagcgataggagagttgcagtttgggagtatggaacgaggataccccggtgtttgggaagatgtacagagtaggtggtgcatgcgtcatatgggagctaatttcttcaagcaattcaagaacaaggagctcatgaacatgttcaagaggctgtgcaatcagaaccaggagaaaaaattcaatgagctttggaagagattagatgagttgacagccaaatgcagtgatcagcgtgcagcagctccatcgaccgccgttgctgaccctcctcaagctcttggacctctcccaacggataatccaacattggttagaagaactggattggagattcggaaattttctcagtggattctgcatgaaccaaaagagaaatgggccaaggcgtatgacacaggtggtgctagatatggaataatgacaacaaatttggcagaagtttacaactgggtgatgcgcggtgcccgtggactgccactagttggcatagtggagatcattttacatgggacatgcaggtattttagggatcggttccaggcagttcttccctctatgccgaacaacagcattttgtttggagctttcatgcagaaaaagctagaggagttgcgtaaaaaggccatgaaacatcgagctctagtgcaaggtacccaacagcacaggtttgagatactatgtcaagataaggcaggcaggggtatctaccacaagagagtgaagcaggagtgtgttctcaaagccgatggcacatgtcattgctcttgtgcaaagccgaagctgctccacaggccatgcacccatgtcattgctgccgcagcggagtgtggcataccagatgcagtatatgtgtcacagtacttcagtaagcaagcaatatatcatacatggagcggcgagatttatgggttcggcatagctggggagttcacagagactaacgatgaagtactcaatattcctgacccatcaaagctccgaggcaaggctggaaggaggaggactcgtcacatccgcaacgatatggacgagtcggaggctggcagggtgaagcgttgcagcaaatgcgatgaacatgggcacacctacaagcattgtcctaaagacaaggagaaaccaagtgcggcggaggcaggactatcaggattagcagcagatggagctcgccctacgggtgaaggcactacctccactcgaccacgtcctaggcgtcgtcgtgccacgtctggctacgtggtgtagttcttatgttctatgtcggcatgtggatttgcttgtaattcgtttcgaacttatcgatgtgtttatgtttcgtcgtgtaatgtcagacttcggcatgtcatgtctttaggtctcgtgatgtaacgtcggactaaggcgcctaacgtctttaggtatgctgatgtatgtcggacttcgacacgtaatgttatgttatattattgaactctacatatatgttaaattgcacgtcatcgttatgtaccattagtaacgtttgctatatttaaatagcctgtactcttgttgtacataattaatctcatgattttattactatttcataattttgcaagttatcttttgttttacagtactattttttgaattgttctaacacgaaacactatatttttcagagatggcacgtcaggatacacctcagttgttggacccggcgatagatcaccgacaccggtctcaccttactgcggtgcagggggctcagcttgggacgttccgggcatggacgtgcggtgagctactcacggttcacgactcctttgtcgagaggtacgaacagtattttactataagttagttgcactgtaatattttttataatgacatattaatttgttattgcaggctacataaggccggcctcctaccgatgtgtcggctggtggaggctgcggctggcgacgcggacccggccagacgatggactgtggacaggtccctcctagcagctttggtcgatcgatggaggccagagacgcacacttttcacttgccgtgcggtgaggtagcccctaccctacaggacgtatcatacttgttggggctaccgctcgcgggagacgctgttgggccagtgaccacggctgtggactggcaggacgatctgacggcacgtttcgcactagtacagcgcgcaccgcaccttccgctcgagccgttggcacaccaccgcaacaccggacctacgaagaggtggctgcttcagttcaccgtgagtgtttttgtaccgaaatgacaatcgtattacatatttagtccgcagttaaggtgcctaacattttatcgacggcttgcaggttgagcagctataggtggaggccgacgagtactcctacagccgatgtttggaggcgtacttgctctggctttttggctgggtgatgttctgtggcggtcacgggcacgcggtcgacaagggactcgtgcactacgccaggagcatcgccgacgccgcggtaggcgaggtgcctcagtggagctggggttccgcgttgttggcggctctgtaccgtgcactttgtgagtcttgcacgaagacggatcccagcgcgacctttggtgggtgccctctctttctttctatctgggcagctgagaggattgcgatcggccgccctgaggtggaccagcacgcgtacgaggagtcactgtacgaggagcgacgagaggtcgactaccctacgatgggtactctatggtgccgtcgtcaggtacgttgcatcgatcttatcgtattgttaagttaattgctaagttcattgtacatcacatcgatcgtctcgtattgcagcgccgatgggctcacgtccaagttaggcggtcgtatcctgagtttgttatggagttcgaccgccttctgccgactgacgtcgtgtgggagccctacagtgcagcggctacccaggctcgtgcgccgttgggtctgtccacactctgcaccagggaccaggcgtactggatgactacggttccgatggtcttcgacatctgcgttgagcctcacgcccctttccgcgtgatgcggcagttcggcttccgtcagccctttccagtaccgtttccgaccaccgtcccagctgctattcaccggtaagatcttgcactatgctttccgttgttgcattaaaatctgcctgttcacaataatttgtaacatctgtcgtttcacactaatattacacattaattcgcaggtactcgcgcaagggtcagcagtcagctggcgactggcccgccaagttggcgacttttgttgaggactggttgctcacaaccgaggaggtcgtggaccacgagggagagccacacactgaggagtcgtaccaggcctacctacgctggtaccagccacgcacccgtactagggtcaccttcgctcccttggagcagcagccccacgttgcgagcactagagacctctatgccaggcaccgtgaccaggacttcgctcgtgctgtgagtaccctgcatcgcaccattcctttatgttttcatgtctttctcttcgtcaaattttacgaatatttacgaacaaattaaccatgcaggtcgacgacatcaaccgggtcgtcgttgacggttcaacgacgatccaacgtttaggcgcggggattccggtacccgtagaggagcacctgacgacgtacacgcggatggtggagtcgatgcgctcgattctccgagttctcacctgtcgtgcagacaacgttgctcgggcagacgcagctgtacagcggccacccgtaccgactggtccccgtccagctgcgcacgttcctaggccgactccccctccgcacggaggtaagtatttttattactatttctgtacatgcctcgcacatataagtgagccgtttcacttgccgattgcttcagggtttcgtgcaccgttcaacaccccgccttcctcggctaggccttctgttgtgcccctcacaggtacttaaaaaaacaacattacttcgacaatcaatttacatacattttatgtcttagcttacaagggtcccgttgtcgatgtgtaggtttcgcccagttcgctatgacgcaggccgcccacttctcccaggctgcagggtcagcgtctcaggcagctgtgtcgacctcgcactcagcgcagttctggcagtacaccgggacttcgtcacaggcagccggcacgtcgagtcagggtccaccactggaccatgctgggacctcgtcggaccacttgttgccttccaccttcctcttcgacatcactgacttcgacttcgcttcaggctcgacagaggacgtcatcggcccctcacagctgggaggcgcaccgccgttgcagacgcaggaccaggcgcaggccactcctccgcaggacactcgtgctacccgtgctgtgccaccggatcgtttcacctactcccaggaccacgtgcgagcacaggcccggaggaccaagcgtggtcgcggcgcggggcagggccagtagagcagtcttctctttgtttacttgcttcactttccagtactgtatgcttgtgtaatgactacgttgttgttatatgtgcacgatacctttcggcgcatgcactatacctttcggcgcatgcacgactactttctgccgcaccgatgcagcctcctttattcgcgtgtgatacgagtatttgcccaccatttggcgcatacgaccaatgtaactttcggcgccgatcatgcatgtatctttcggcgccaatcaggcgtacccaccataccccaccacgttcacatgtcaggggtatcactcgattttttgcgcctatataagtcgccttaacgagtgaggcctcacaatctttcagaactcaatcacatttagtactctcttccccacttgcttcattacaaatccgaccggctttcgtcaatggctagacgccgaggtgttgaggatccaaactggcgtagcgatccttgtgtatacctactaccaacttggtgccagcgtcctctctgcctatgcggtgatcgatgccaactaatggcttcgaggaatcctgatattcgaggaaggcgcttttttaggtgccctaactatgaccgtgaggtattttattatctgcatatgcttattcattccgtatgggcaatcgctttattcttcgtaacactactctattcggcagacccgcactacggcttgcgcatacatcgagtgggtcgatacagaaaatcccgttctcgacctaaccacttgtttacaagaaggtcgctggtatttcacatccgaaagtactgagcaatacttacagagaaaagcggcttatgaacgacaatgtcgtgaacaacagagcgattggcgggtgctaactacggcactccctccatgggaagcccgtccaagatgcaggtgtagtgatcgttgtcaggttcttcgttccataaatcctacaacattgggtcgaaggttctttgtttgtccaaatattcttgacgacgatttcatggtaagaatattttgattacatgaatccttattttctcacaacatttactaactttgcttgctttacatctattctttcctcccaggaaccaccaagcagatgtcaatacaaagaatggatagacaccagaagggttctaactccacctagccatgttgtgcagcttgaactaccagagcaatacagggttactaaagcgcggtttgagagaggagagggatcctcacgtaggggttagctattatcggacaacttggcatattgaaatttctactgtcatgcttccttgtcccattactacatcgtcgttgtgttcaactattgcactacctccttcctagttcgaatctaatatcatctatgaaccgcaatgcaaatagttgtatcatgttcaaattgtactactatttcttcatgttacataattctccttgtt

SEQ ID NO: 5496 - DNA, 22970 bp, Oryza sativa
  unsure (1)..(22970): unsure at all n locations
tgctacagagagaatcaaaggagatttgagtcattgtcatagtatgttcagagtttgacagccaagagtggccatctatatgagccattgtcatcgccaaaaccaaaggagatttcggacagttgaaaggagacgaggagcactcacggaccaagatgcagctaagccagagcaagcactgtagatgctgctggtctcgctcctttcatgttttgacatgatcatcagccctctgcctctctgcagtctgcatgcatgcttcacaaagcaaatgctttcttcctgttgattatctgctgctactgtaacctgaaactctgacgaaacaaaaggaaatcctcccctgcattgtgatttgtgaacgaaaatacacagaagacaaacatatgcattgcatgcatcaacatggatggatgcaggtagccagccagaaaggcaattcttccaagggtcaggtatggctacagtgcatgcaacatgtcaatacacaatacacacacatcacttggaagtgacctgtctaggttatatagtactcctaggctttactaggttactgcagtggcacatctcctggcctggttttggtctgtgaggatcttgactaccacttcaaaggcatgaagaaagttggaaggaggagcagcagctgtagcctgtagcagactggaatcagtccatgtttttgactgcattttgaatggaccaagttcaaaggagtgagcatccactcaaaaatgatggtgctatcatcatcttgttcatcatcatcatgaagtgttgctgtggtcatgaatcatgatggcagtcacagaaggcactccacaaagcagcacctgctgctccttgagaacttcttctatccttgagcaaactgggcacctgtaaagcccaagaaaaacacagtcataggacatgtctttgnaaatcaagagagcatcttggcncagcncagtatgtatatatcacaaatgtactatgtacacatgctatatgcattctttcaatgcacaaggccaaaaggaagagcacactgtatcagcagtaaacaagggagaagcctagtgctgacatatttatcagctggaggccaccagcaagcccaaaaaaaagtaagatgtgatgtactaatactcttgcactttgtattagcagtggcaaaatgatacatctcagtgagtatcaatacaaaattttgatgatttagcagggcacccagcactaacaaaatgggcataataaagcaatttcatgttcctcctgaattcgccacacacgcagcattccctccagttcattctttctgaaggctgatcatcatgtaaacgatggcaagaatggtaaactgtgagcgactcgcaaaattgaagcgatcactcgtcatctgaatcgttgaacttgattgagtgggtttgtaaatcgatctgcccacccctgtaggttccacgcttcttcttggtcttctcatgtctaaagcccctgcaaaggcaaaattgaacaatgatgaaattatgttcggcactaagatgatcacaagtgggaaagaacaaatgactcgattagcaaggagtatgaaggtcagaaggaaagaagagcatctaaccttcctctaacttgcccaagaacctcttgtgcctttgcaccatacccagagtctgcaccaccctgtcataagataggttcaccactcggttattgtcaagaacagttgaaatttctacatattactagctaaatgcccgtgtgacgtgtgttgtaacagagttctaaaagagaacatctttctaaaatcattccccattgtctactcccgagactatacttgcatcaatcaaattctattggttagctggcatcatgtacaaaatgatttctaatcatgatcataatctaaggtgatattaatttttcttatggattttttttactttcatagcctagctatatttacataaatacgaaaaggacatgtaaaatatctaagtaatttttcttaaaaatcaaacgttaatctaataaagttgtgcagatacgactgttgctcctaatgaagaatggacaaagatcaaagaacatctttttaccagctagtccaaacaaatttttctttattttgtcctttattataagaccattgactgtatgtgggcccatataacagtgggtaggtgccaccaccaccattggtgtcttttataggagtatagatatggtcagtgcaacgcaaaagaaatgtacattaccttagcccaatatgagttatcctgaagcctatcatcagcaaatttaacatcctctagtttcacccgttgaaatgcattcacagttttgggctgcagtggacagagatggcatggacaatcagattacaagcatttcccagacatcaaagatatccataaccgagacatctataaaactattatcagaagtgaatgctaaatagtaagatcaaaatgatgttattgttagtcaatatacaagacatggaaatgataaaccaccttaatgtcagggcatcaccagaacgtatgaggaaatcaccatcgcaatgatagtaacaaactaactacaaatatccactgtccgatacaacattatttggttattctgaaatactagtaaatgtcagaaaagaaagaagttgatccatgactaacacaaaacatatacttactgatcatgtcatagtttgcctaaaatttctagatgacaggctttgtggttcataaacataacaggaacaaattgcactaaagtaggaaataacacaaggcaacgaaagaaacagactataacatacttcagatgattttttctgccttttattcggtttggcaccatcatcctctgaagaaccattgctgagcttctggctagctgtgttatcttctttagcagggaggttgcttccttcgacttcttctagtttccgctttttgccaactaccgcattatcacttggaggcattccattttcccccttctcagtctccattccactattgttctcatcatttgatttaggagctgaatctttccctgcaacttctttgttttcaaccacctcaacgttttccttggacttcttcagcttctttttacttttcttttcattggtgtctttctccatctctgcagcatcaccctttcccttggcacaatcagccccagcatctgtacttcctgtgtcaaccttatctgatgtctcaggagttgattttcctttcttctttttcttccctttctccacaggagcaacatcaaccaaaccattcttgctatcctccttcaatgtgtccacggtctcaaatttgttaatgatagccgattctgccttttccagcctagcttcgacatcctcgtcgttttcttgtttcttgcttttcttcttctgtttcttttctttggtctcgacatccgcattttcactgggcttttccacggcagaaggctcagccaccttgttctcagcttcactcactttcgtgtcactgcctttctttttcttcttcttgccagcatcttccgcgacaacggcggctgttttctctgcacacgattaagcttcaaatcagcgccaattacgcgagcctacgccaaatcattacgcgacgtaataatgaacatcgacgctaaccgtgctcgatactcccattgatgctggctcctggagcataattgctgcattccacaaccaaattccaataagaaaccaatcatggcacagggatatggatcacctacgaaatctatcttaagttcttaacacgagatttgagcatcgtgccgttgattctaagtaggagtacctcgagtcctccaagaatccggaaaccaactcttccaggctcaccggcgacgaccgccaagaacccgcctgcgaacgcgcaaaaatcctcattcacccactccaacacaaccgaaaatccgaaatgacaagcacatcacgagccaattgcggggccgttacctcgaggttggcctcggactggagcgcggcgagcgcgcgggggaagccgctggactcgaggaaggcggcgaccgcggccaccacggcggccctcctcgcgtcggggacggcggcggcggaggacgccgccttggtcttggccttcttctccttcctcgactcctccttggccatggcggcggcggcggcggcggcggagagggcgagttggcgcgggaggaagagcataaagagggggggaggctagggtttggaggggtcggggtttatacgccgcgaggggcgggctacggtaagaaggtgggtggatgggtggatgacatgtggggccgggtgtgtggtggggcccggttgtcagtggcggtgtgggtgttgactgttcgtctgggcgtggaagcttctggaaggggaagaaggaaggtgctagaagacgactgattgatggactgatcggccccagactcctagtgtcagtgtctgcggtatagtggtgtcaaacgttaaaattgggtacgattcgctagtggattcggttaagaaaataagctgattggtagataagagcttatctagatcaagctaaatttaaagaggaatcatgaagacctcgataatgtatactcccccgtcccaaaaagaatcaacctacgacaatatatgtggacataggggtgtccacatacatcaacttaggagaggtcctcgcatcccctcctagtttgattctttttgggacggagggagtagatccatatattagcttatgctgatgatgcttatcagcataagcagcctgatgcttatcagcataagcatttccatcaggtgtagaaaggtgtccggaaagattgtgtccactaccaatggctaatgcttattcagcccaacaagctaattgatgggcttttgctgaaaatagcctcagcaacagcaaatcggtgaggctgacaaggatgacagttaaagtattctcatgtccgatcaggacttttatcaacccgagggtataaatatatatttcccgggatatttgtaatctatctttcgactaatacataactttcggtacatcgctaccatctattccggagagttcatagtttcgagcgacgctgcattagttaagttcgatcttcggcgagaattaagttccgctaacttcgcttgtattagcgtggctagaactttatcagtgaattccaatattctattcaagttaatgcatgggttgtctatctaatatatagattttgtccttaactgcatcattgtttagagtcgtattagcttagttacgactttctcggttaggtttgctatcctgactaagtgatatttctataaatcacattattgttttagactgaccgatatatctatcacgtttgtgtagatctatcggctaaataggtttttcctattatcttcaatcatatattgtcacagttgatctattagatcatgtataataatattgattcagtcggcaacaagaatcactgcatgggtattgtcatacgtggaggatggaggaaacatgagaaataacagagcaagtgattctgcaagtgccggacgatgatacggtaaactaggcaagatgaaatattttagtttagtttagttgatcttttgtacatatgcatactgtgtggctccatgcacggattattttcatgcttaggcaggatgggccacttagatggagtctagttttgatcacatatgcatgcaacaattaaacccattcatgcttccctaaagccaatatttcgtactacttactttcgctattgactttgctcttagattgttactaaaaagtttatttatatgctgttagttgtaggatcgaactaatgggcacgctcgattgataggaactttattggagctccacgaatctcccaggccttcgcgtgaacgacgaatttcacgtcaacaagttgtatagtctaaaatgttcgatcaaatacttaaacaatgtctgcccgaagccattttgaacccaagaattggaatttcatatggctgttttaaaactttaagtgaacttcatattcaattgctatgtttagatagcatattcaatagaatggcccccactgtttggtatattggagaaaaaaccgtaatgtcaattttgcaaatgaaatattctatgaataaaagttttatatacgtattcttaacgttataaacgtactgactgaaaaataaactacggtgaattttttttccaaaatcacctctaaatttaaaagttgaaaaatttaaatttggatgataattataatcgaaaagatgaggaggacggaggacggctggccatcggcgtgggtcccgcccccccctctctctcaccctctccccatccctccccgcccaacgccgccgtcgacccgtcgtcgtactcccgcccacccagcgccgccgccgccgccgccgtcctcccaggccgcccgcccagcaccgccgtccatcgtcgccttccccgtcctccccatccccccgctcgagttgcgggtgaagaggggctcgaagcggctgctccgccaagcccctcctctcgccctcctcccctctcgccgagcttgccgtcgccgccgtcatcctgctgcatcctggtgaggaggatccgcatctgtttccgattcatctctctctctatcgagtagttttgtctcgaatttgcttgctcgcgtgaaccctagcttctcttgtagatctgtggaagtaacaaacagttcgtttgtctgtttccccgtaaaattccccaagctggacccgcccctggaagaagaagaagtagcttagtgttgatttgagcataatatgggtgccccgaagcagaaatggaccgcggaggaggagtccgccctcaaggccgggatcgcaaagcacggggctgggaaatggcgcaccatactcaaagacccagacttcagcaacgtcctgcgctaccgctccaatgttgacctcaaggtttattacagctgaatgagtccggttgcttcagggaaacgaagttttatagtaacttgttcctgatggattgattggttttggttgcaggacaaatggcggaacatgaacgtaaccgtgaacgcgtccggtgcccgcgacagggtgaaagcgcccgtcgttaagaagccaagatccgctcctaagcatgaaggccactctacctctacagctattgccgcggtaacttcagatggtgatgatgatgttgcggagcctgtgcctcttgcaacgtctacttcatccaagagatccctctcgaggtaaatgcccccaatgctctggtactggcctcagtctaatgtatggataatggtggtatttccttctttttgttaagccagttcgtttactttcgtgtggcattcctgcaggctagacaatatcatagtagaggcagtaaggagcttgaatgagcctacagggtcatacaagacagccatagctaattacatagaggtctgttttcatcttataagtttttctgtgtattatgattgtgaggtaccaataataacccatcattggaaattcctttcatcctttgcgcaacgttctgccgaaccaacatttcatttgtgtatacatgtctaaagtcagttattgttatcctgttgatccacacactcttctacggtactatattgcgtagaattggagacttaaattgatgagcacaatgcattgatattcaggtattttgcatcaagtgcatatgagattctgtgataatgatagccttgaaatgatctcatgaaaaccagtgggttctatttcaatatagctgagtttcacttgatctaatttgctgttcgacctccttaacctttgtaggagcaatactggcctcctgctgattttgatcatgtcctgtcttcaaaactgaatgatctgacagcatctgggaaattgataaaggttataatcccttctgtttgggcatgttttattatgcatttcgagtaatggcagctgatacaattttcatgcaaagaggtgaaccaggatgttgtgctctgatacggtagcaaattcagtaaaatgttaccaattatcattgctatgacatgttaaacttttgttgtgtactaaaatataatgcgccctccaactaacacattctagcaggctagcagcaattcctccttcattcattctttcagtgttgtaacatatctactgcacctgtggatgcagcagttgaatccaaaatgccatcccatattttgtagaaaaatattcttttgtacttgttaagttgttgttagtcctttttggtgtctcatggcgtattctcaatccttaaattcttgtcttgtccgccttcaaattccccggcttacaggctttgttctaaatgaaaactgtagaaaaaagtattatggattttgttggcatgtaagggccaagatggataatctttctttattatttaagcattgacacgtatagctaggcgctaggatcctaggactaccattacacacatcatgactttatagcattatggcacgcaactcattactcatgttcaactattttaggtgaatcgaaagtacaggatagcccctagttcatctttgtcagaagggcgaagctccaaagtagtgctgctcgaagatataaaaaaagaaccaacaaagttagatagggaagatgttgcagtcctcactaaatctcaaatcgatgctgaattagctcggatgagaaccatgactgcagaagaggctgctgctgctgctgctcgtgcagttgcagaggcagaagctatcatggctgaagccgaagctgcagtaagagaagcagaggctgcagaagctgatgctgtagctgcacaagctttcgcggaggcagcaatggcaacatttaaaaacagaagttcagcaaaattggtaattgctctaagtacctcagttctagtttcaaatggttcaaacgttttacttttgcatatttgcactttaaattccttgcttcctcattttgtatatttcaaactcaacaagtcattcactttgaccgtacactgtctatacctgccttaaagatccctctacaaatagttagtccttcatactaatgaaaggtatagatgtacatagactatgagcattccaggtagacacttctcatcaagaaagttatctaggaatggggaagtggagaactgtaggactatctgtcttatttctttctgcaaattctgaatgcctccattcgcttgcagatcattcgagcttgaagctacctgtgggagctggtgcagcatcagtttcctccgaccttgttgtatgtacacttgtcccgcgttccaatgcaatgcaattgctactccagttgggctagggacgaccctattccatccttaacttatgcaagcttattacagaaccaaattgcccaaagccccaaactggaattgcaccgcatctgctgaatttgccaacaattttgttacgcctggatctgcacaggcattgcggctacggcatcttttgactcgctcatggtagtaacccacatatgctgggataatcagggagtgaccagtagaagtacatcatggttatccccattcctccttgggtgattgtaattcaccttgtaatcggttttggcatcaaataatcagagtattgcgttgttgttgcatgtacagatgtaacagtgtgtgtctggttgactggttcacttcattgtgtatatcaactggcttttttttttaagctctttctcatggataatatggtaatgctgcagcgtgatgtattcaatcttgtttggctcctgtttaactcaaaatcgttgaaaggaccgtgcatcctactttttgggtgcagaagtagtactaggattggtacgcatgcctttgaccaaaaggagggagaggaatcaatggtggatgtacaaaaagatgaacaaatttcggcaggtctgtcgaaatcatcatccatggcggcaaaaatgtgaacactggtctgctgcaacaagtgtctttctgtcggtggatgctgcaagtgtccatcctagtactccataattctgacctagtatactcctatgtttatagggtttataaaaccaaccaaaaccggacatcccttggttttccagttaggttttaaaaaaaccaagctaaaattaaaaggcctctttgaattgcagggttagaaaaaatggaggaatatgaaaaacataggattctgataggaattgaagtgtaaaacagaggattgcaaaacacaggaaaaacacatgaatggtcgtttgattggagcgcagaaaaaacgtaggaataagatgagaaagatagactcaaaggaaatttcccaagaggttagagctcttgctacattttctctacaattcacatgcaatgtgccattccataggaattttataggatttggaaagtttcaatcctttaaatcaaaaggccaaataggaaaatttcctataggatttaaatcctatgaaatttctacataaatcctttgattcaaagggccctaaattgttgacaaaatctgaccggaagtcaacgtttttcatgaaaactgagaaattttttgtcccgttttgctgcctctaacactgcaagtctgcaaccccaaagcttcaaccatgtggccatggcagatgctggcttcactccctgtactacttccatgtactcacaagtcgcagcagcagcagcaattcaccaaatctctctccaagagtagtagtgctccctctcccaaagtagattttgctcatgtaacctcgtagacatttttttatatattttaggactaatagagtactacaataaataagagcatgcttagtagggttttatcaaatttaactctagcaagttgggtctggagtgaaaatggagcagcataaacacattttcacccctctaatgtattttgtgagaactccaaccaattcactctgaatggagctggatttgggctctagttccattgagctgtgccaaagaggtcctaactcctaagggaagagaaagaagctgctaattactcccttttcataatgagcaaagttaactactagaacaggattcagatttaagcataaataatactgtggaactgtactgtactgtatgcagtaatgcactgtccttgctcctgcacaagtgcacaggtcccccacactctcactcagctcagccactctccatgatttcatttcactcccatggtgaaatactgagaaatgaaaaccaggataggactagtagagaggataggagtaggagaggatctctgtgcacttggccccagatttccagaacacacacacacacacacagagctttttgagcttttgagctttgagcccctacaagaaccggccacactctcactttcagtttttttttttcttctcttcaccctctctgcatgcggacaaatcttgcaggctctcgtcgtcgtcgccactcgccgtcactctcttgtccccagttagtctttttcttgcaagtcgctggctttcggtttcttggcaaagcaaaccccccttttcattgcgttttgttgccttctccattgctgccgcatttgagtcacaaccctccaaattgcagtcaagaacacactgccaagaatgcagctaagctgctagcccgaatcttaggagatttctactaacttgttttttcttttttttttttactgagttcattcattcattcacagagaggaagctagggctttgttgttcatcagcaagagagcccccacaccagtttggtcttctcttctgtctctggaccccattgaaatgatggtgtcttcttggctgctccggggagattgattagatggccagggggggtggccattgctgagctttggagtgaagtgaagtggagtgtactctgttcttgtgtgctctcttggtgtgtgtgtgtgtggtggctcttcctcttctcctctccggagagagagagagagagagaggcagcctagatccatttgcaggatgggttccatgaagctaagctccaagccggatgcattcacaaggcgagggcaagcatggtacgggttttctctttgctctctctctctctctgagacaggttcagttttggtttttgtttagggttagtgtcatgtatggatgcttcttggccggataaagaattggtaaatttgatggtcttgtcttcttcttcttgttgtggttagtttgttgggggtgaattaaggaaaaagaacacatttttatggggatttgggaggatagaaatggaaggttgtttccccccttgtttcttgatctagtttatgtgtctaatctggtgtgagtgagcagcttatgctgcttcaatgtgcacattgtgatacttgccaaacaatttgtttgtgttgcttttgaaagctatggggatttcccattctacttttgtgcatttttcctgtcattggtttaccactttagtacctattgtgtccatgagggaggagctcaagatctttggagtaattcaaatctacttactgaaatttgcttgtcaaaattagtttttataggtgtgttggaagttacagatgccatacatgatacatttgcgcgaatgtttgtcaaatgtgaccctctagttgttttaaaaaagacgcttcagtgaataaactgctaaattttaggcataaggacattgtgaagctccagaatttacgagcaatacttatgtcgcatcttgttcacaagtcagatgcctcaagactcatgcctatgctcacctacatacttttttttcgataatggaagctttggggcacctacatactaatcactgatgaactgtgtggttaatattaaatgtaagaaggatttaactattccatcaataacgaagataaggttgactgttttgagtatgtagtgttaaaatgcttggggagggttcctttgtgtctcttgtgcatcatattagtcaaagattctggattttcaaactaatctatcggttcaagttgcattatactcacatgtgccagccaataagctagtatgctggtaggctgatagcacatatttcggtatggtgcatgaaaaatatagtaatatacacgtgacatgatacctcactctgatctcaattggatggttgtacattttttgttgggaaaagatagtgcaagtatctcagtttgaatagtttattgttagcctgcagcaatgttctgattctaatctactggcttatgcaggagctgtactggtttgtttaattaattcatcagcaatctgtatcaaaatatttagcacaatcactctgttttccttttttttttaacaatctatagtttcttaaaagaatctttacaccactgtagcaaatgcattttctcacttggttaacttagactgtatgaggtaaacgattaatgattcgttttactaatcgtcttcttcttgtgatcatcataggtactgcacaacagggcttcccagcgatgttcttgttgaggttggggagatgtctttccaccttcacaaggtaaattgctacacattgtaaatttgtagatgcatgaagcaatatgtacaactttgcttgtgattatggagaattttgaagaaatgagctttaatgaacaaccacaacttactttttgcacccccagttactcaagaaactttgatgaaagttattcttacagtcacagttactggctgattctcaagaggggcaaaaatgcttttataagtgatttttttcctctgtacttggtatgaacttgagatttgaaaatttgtcctttcctctaattgttctttatctgcttgcagttccccctgctttcaaagagtgccatcctgggaagattgattgaggagaattcagacagcgatgaatgtgtcatcatattgtctgacatccctggtggcgcaaaatcattcgagttagtggcaaggttctgttatgggctgaagatagagctgtcttcagaaaatgtcgtctacctacgctgcgctgctgaacatcttgagatgacagaagaaacatctggggataatctgattaatcagacagagtcattctttaaccaagtagtcctccgaagctggaaagattccctggaagcgcttcggacatgtgatggccttctccctcatgctgaagaccttcacattgtgaagagatgcatcgaatcattggctggcaaagctagcatcgatccggacctcttcggctggccagtctcggaacatagtaccatgcaaagccccgggggaagtgtcttgtggaatggcataagcacgggtgcgaaggttaggaactgcagttcggactggtggtatgatgatgcttcctccctgagcttccctacatacaagaggcttatttcttccatggagtcaagaggcatcaaacaggagatcattgcgggttcgctcacatactacgccaagaagtttctcccagggttgaataggcgtcaaagcaccggaccaatgcccctgccggctgctaccctgtctgatgaagaacagaggcgcctgcttgaagagattgataggatgttgccacttcagagaggtttaatatccacaaatgttttgctctggctgctccggaccgccatgatcctgaaagtcgaccgcgcttgcatttcaaacttggagaaaagggtcgggatgcagctggacgaagccacattggaggatctactgctgccaaacttctcatacaccatggacacgctctacaacgtcgagtgcgttcacaggattctcgaccacttcttggcaatggatcagaccatgggtggcggtggcgcctccccatgcttggatgatgtgatggcatctccttcgttggcaccgatcaccgctgtcgcgaagctgattgatggctaccttgcagagattgcacctgatatcaacctaaagccactgaaattccagtctctggcagctgttttacctgaatatgctcggccactggatgacggtctttaccgcgccattgatgtatacctgaaggtacactttcgagccgctattcttgcataaaaaatgccattgcgcgatttcatcctcttcatatgaatgaaagctatagtttctgaatctgatacttctccagtagtccagtgacaaaatgacactctatgtcactgtgtatactatcatcgaattcgcgatagaagttcttgagctgacaattgatcatatcatcataccgaaaagccatgtgccaagtgctaacatgagttcttcagacaagtcatcatttgcacttgtttccattctttcatacctgaaacccacatgaaaattgccatcctcactgtcttgattcttgaacaacgatggcgctgatgtgttcgcttcctctttttttttttttggcagtcgcatccttctgagcccgctattcttgtgtcaaaaacgctattacatggtttcctcctctttatatgaatgaaagctatatctcttgaatccgatacttttctccaaaggcaaaaaatgacactctatatcactatgtgtatactattaccgaattcgcgatagaggttcttgattacagttgatcatatcatatcatactgaaagccatgtgctaagtgctaacataaattcttcagacaagtcatcatttgcatttgtttacacctgaaactagccacacacacaaattgtcagtttgtcatccacactgtcttgattctggatttcttgaacaacaatggcgctgatgttgtttgcttccatttttttttgttggcagtcgcatccgacgctgcctgaagctgaacgggagcagctatgccggctgatcgactgccagaagctgtcgctggaggcgtgcacccacgccgcgcagaacgagcggctgccgctgcgggtggtggtgcaggtgctcttcttcgagcagctgcagctgaggacgtcggtggccggctgcctgctcgtctccgacaacctggaggcctcgtcgaggacgctccgcggcggcggcgcggtggcggcgtccggcgaggccgggtgctgggccacggccgccgtgagggagaaccaggcgctccgggtcggcatggacagcatgcggctgcggctgatggagctcgagcgggagtgctccgacatgcgccaggacatccgcaagctcggccgcggccgccgccgcctccgtggcggtggtggcatcgtcgccggtggcaaggacggcggcgggtgggcagcgcgggtgcagcggatgctgacgccgaggatgatgaagctgcagatgtgcagcgcgcagcatgacgccgccgagcagcagcggatgaacaatgagcacaagaaggtggagaaggtggccaagaacaagaagcagctgtccatggacgacggtgacgacgaggaggaggcctgaaacctgaaagatttcttcttcttcttgttgttgctgcgccatgatcgtgttggtcaaggtgaagtgtcactgagccgaagagggaagagattgatggcgtcatcagtttgtagttagtaaaagtataagtaactctttgagttgactaagtgactagtgagagcgagtgatttacctgtgagactgtgaatgacttctcatctctcaatctttgactctttttctcctgaaagcgtgcatgcagggagtacacagttcttcatttcgaatgactcccattcttattctcccaaattcagatactgcagtatccaatcttatactaagtttttactcccttcaggttaataatattagtcgttttaaacaagggtaaagtcaaactttaaaatatttgactataaataattcctaaaataatatcttaagaatatgaaaactatacgtgtagactagttttaaaaaatacttcaatcatatttgtcaaagttactctttggagaccgtgctcttgtctaaaacgacaagtattattaatctggagggagtatattttaacgtaacaagtagcatgtttacttattatttactcttgtttgttccgataaataggctccctccggtctaaaataagacgtattcaattttttttccgtccatgccaattgcaagagttgggccgagtttagtttcaaactttttcttcaaacttccaactttttcatcacatcaaaaatctactacacacgtaaacttccaacttttccgtcacatcgttccaatttcaatcgaacttccaattttagcgtgaactaaacatacccttggctagattaggccagtcttaacacttcatctcagctagtatccatagcattaaatccactgctacataagtaaaaatctgatgtggtaagagaattaatgagaagaggagtaaatagataaagaaatcatttctcatgcaataacccatctatacacaaaaagtaagaattaaaacaaggtaatatgtaaaaaaatgaaagagaaaagaggtgattgataataatttaatttgatgacactatccatacatagtgctatatgacttagcaagtatggaaactatttcaaagtttatgagttaggattggccttagaaagttatgaaataatgttctaaacattttggagctactagtagccaactatactactactatcttagtcccaaagtaattataattttgtttagcatatattaagttttggaagaaagactatggtgcccctcactaaatggtgtatagataagagtggaaaggtggttgaggatatatcatagaaagttttgaatgagaagtgattaatgtgataattaatacttcactgtgacagctattttaggataaatttgaatcatagaaaattaattatatgagacagagatagtattaaacttgctcttagtagcacaactgcaaaactgtacaaaatcagagaagcctcatcagactttggctttgcttggaagcttaatattacgataatctgctggttggtagttagtttctgaaaatataaaaaagatgggtttttcaacttatggtttctattcattttatggatactatcactatggattattagaatctaaactatctaagagagcctctgattttagaataagctgtagctagcagaaactctccaaatagatccattgttgccttgtatagaactcctactactagaggccagatcgaatccgttggggtggcaatggacggtggatgcagcgcgaaccgcacgccaatcaaagacacacatacatccaagagtcgcgaacccgagaagagagagagagagaggctcatcgccaatccgaccaacgcaaccactccaacccaccggcggcggcggcggcggcggtggggcgcggcgacccggcaccacgcgaccccggcgtcgccatgccgcactcgcgctccgattcggtaagctccccctctctcccctcccacactctccggccggctcgtcgtcggcgtgttagagatagattctagggttcatcggagctcttagatccgcgggttgattggttcttcaccctaagaagaggaggaggtggaggaggaggagatctgctggtactgacgcgatgattttgtttttgcgggtattgtcggtgttcaggggtcgggttcccgcggcgctgacccttgccgtgggaggaagcgcgggaggctgttgatgctcgaggaggaggaggaggaggaggagtcggggatggaggggtgctcggcgccagcatgcggcgatgtgcggggggatttcgttggatggtacagccttcactgatcctttccttatctgattcgtcatcagttttacagttgatcgaccgatattttggccttcgccatctcacatggttggttgtgttgctcaggtgttcggaccggcatcaggtggcttcctgcagcggcgaccagacgcaaagcgccagcatgtttgccgcgatgcaggagaacgcctgctccatcgatagcaaaggtgtggtgtgtccgcagtccgggctagggtattcagctggccagaacgggacgcacggtggtggcgggtctatgctgcatcagaatttggaaggctgcatgtatatgaatcagcttgggcagatgtgcggcccttatccacctgaacaactgtacgatggattatccactggtttcttgcatcgagaccttgctatttatgccgtttttggtgggaaaatggccaaccctgtttccttaggttccctgaaacagtttctttcacaatggagttctgattctgtggtcgccacaagagacgaatcggtggagaataagaaaatggcccctgttaacaaattgattcttcctgatgtatggcttttatttctttccatattagcacatcatcctcttgcttgtctaccttccttatttgtgtgattcatgttctctctgccagaatctttcaagtgaagaatcatgttggatgtttgaggacgcagaaggccgcaggcatgggccacattctcttgctgaactttcttattggcatcacagtagctatctacatgacctttcaatggtaagaaaagcatcagtcgaaaccatgtgttctggatccactcttacgctttgcttgcaaatgttctattttattggactgttaatgtgattaatgtgacgtgcatagtgtttttaaacaagtaatgaaatggctgttgtagaataaattgaagatattgtttcaatttggccctaactaaccactacatgtagaatatcaggctgttacaatgctcttatgtactagatgataaaatagtacaggagatttttacggtgcaccaaattagagtgctgcttggtttggctgtttttctccacaatccattgacactgcaacttgattaagttataatttatttggtttgcgtacactagtattggatactgcagtatacaatacgggcccaatacaatctcgttaccactgaatatcgagtgcatttggaaagtgttactgcaaaagcgatcgcccactcaatccaaacaatatttgttattcctcatcccgtttccattagctgtcagcttaattggaaaatgttacggtgtttcaaccaaacatctatattgagccatccattctatgagatctaatggttagtattactattactatctataagaggtaataaagagtattactattaccatctataagaggtaataaagactttctgaccgcaccataaataatgaaatacatgtaatctttagctggtggaatcatttaagtgatggataataaatgttggtttaacttttatgattcaatttaattatttgacatttaggactagattcgatttgttgtcttcttttttttaaaaaaacctcttgaaacataattcatttattggttttggtagatagcatcacaaaaagaatatttgatgtgattgttcttatacatattgtgattgttcttatacatatctttttccctcctggtggaggaatttttttaaggtatctcaattaagttggaataaatcaataaattaataggctatgtgctgtatggaaatcatttaggttcacccaacttatgggtaaaggctaatatatgattatggtggaacttctgttggttaggtttttttgagtatcttcttgtaacaggatgacagatcagttataacgtgttatgtacacagctcccccaattccagtggatttacatttgtgaattattcttggttcacactagtacatgatctgaacaataacacttctttttttaacagatttaccatgttgatagcaagtttggcccatttacacttgtatcactaattgattggtggagtggaggcacagagcattcagaatcttcagccaatgattctgggtcactgaacgctttaatggatgatgtagttgaagatatcagccatcagctgcatgctggaattatgaaatcagcccgcaaagtttttattgatgaaatatttagcagcgtacttccagaaatgattgcttgcaggaagacagagaagcaaatggctgcaaaacgtaagagccaagctgctaaggtgtgttttatctgtcatggtttttgggacatgaacttcttttgtattacctacccatttgcaaattttaatcctgtccaagatggttttatttttccagactgacaatgtgagtaacaagaatgctttggtacttaagggcaagggtgatggaacatctactcgtccaaaaagcctaaactcgtataataataaagtaccggaagatccttctgtggctgttcaatcaactgcaatgcagtatgaatttgctgatatattatcggcagtttgggaaacaatttataacaaatccatgaagagtatctgggatgaagtactgtatgatcctgtcatggactactgtgatgcatggcttaaaagaaaaaatgagtcgaatcttctctctacagttgttcctggagcctctgataaccaaaagatgcaagacacagatgaaatgtcaccaaaggtttctccaataggactaaacacatttctttctttgaaagatgggtttaacatttaagatgtaaatccttctttcgctgcagatatgattttctgacagtttcatggtttgcaggcaatttgtgattcagatgctcctgaaagtgacatggatttccctccaggatttggaccaaatcaggaatctgctgagcattcccactctgcgtgtgttgagtatgttactgaaaaaacagatgggaggtctggatcaagtatcacgttgttttctggccccttaggacgagttcaggtaatgctggcaaatgaactatatgtggcagcaaaggaagctttgttccagcattttgaggaggtcatttcagaggagataacaaactgtttgtgcattggatttgaagatgatattaatcaagtgagatgacaataataactactttttattgatagctgttaatatttcagaatttgcatgatttttacatctaagtgttgtattgcaggaacgaattcgtacgcctgttcacgcaccagaaccatccagtcctcctggaatatctgtgcatgaaacgcccagtcctgctgaaatgcctcgagatgaaatttcggatatggctgaaatggctcgagatgaaatttcagatatggctgtagatacaataccctgccctgctgatatggcggcatctggaacatcaactgttcctgaagtgacaacagacaaactgatcattccttacggtaaatgaataacatcttctgttgcattgccttacctgagcaacattaaattattctaattccttaatttggatgcagtggaacatcaatcgccctctgcatctcatgcaagtatatttgaaaagttggatgcacatgaagaagctgaattggatgacagttttgatgaggtgccttctggaacagaggctggcttagcttcattggtgattatggagaaaaacaaataccagccctcaaaatcagtagactcagtgcttgacatttatagatatactagttgggcattcttcaggcaaatactgcatgagagtgtaatgaaagagtgggcatctctcttctcaggtgctctcagcaattgttttgactcatggtatgccaggaaaaatattgtggctaaaaccatggatgatacattgagacccaaagaatatacttactacaggaagaggaaactgaggaaaaactgtgaagcatcatcatcagaaaaaccaatggatgagcagctctccagacctcttcgtgatcttgttgaatgcaaggttaatatgaaaaatatccatcgatcaagcaaggctgggatttcgcagagagtttctgttgtggagaagccctccaaaaagcgtgccaaaccttcacataatgataatattaatctgaatatccagcaggacttgaaactcctttccgacaaggtgccaaagagtgagtcattcagtcctcatctccatctcctttttaatataaatacatttcacagagtt

SEQ ID NO: 5497 - DNA, 23166 bp, Oryza sativa
  unsure (1)..(23166): unsure at all n locations
acgtcactatatatcagaatggaacgatcatatggtgacgacactgttgacgaattaatgaaacgagtgctggaataaccaatcaaggttgtcagtatcccgattcgtatcctagtatcttacgatactatgatcctaccaagtcgaaatgataccgatcgtatctagtatcctaattttcatagtatctcgatcctactattcattactacaattactacatgatcctacgaaatcttaggtagtatcccgattctatgattcatacgatactacaaaatattatttaaaataagatggtttaaaaataatgtaaataaatatgcttaagtttatataaaaatcagttaaatatatccaaaccaacgtggtttctcttgataaatgtctctatttgcatgacatatattattactgcatttttatatagactggctatatgtaattaatataaatattaattaaacttaaaaaataaaatctcatagtatcctgatactacgatacgatactactttgagcaaaacgatactacctagtatcccgatcctaacaaccttggaaccaatgcacctgttggctaaactgattttgattttttaaaaatttaatatattaattaggattaattttagagacattcttagtcacttcctttgcatggttcacttttcatgattgctaagaagatgagggaaaactctacctacaattatttctaaatataaaactttaaaattcaaaattgttttatccgaatggcagggcgaaagtagttgagtcaacaagtaggtgtgtgtcacaagactcagtttactcgtatatataaggccttgtttaagtgtctaattttcttgcaataagaagtccactttatgtcactatatatggatcgagtttcattcacatttctcaaccgaaaaaaataggtacaaaagcatccccaaggccccaactgtcttaattgtcaaaatcggtacaaatcaagctagtttaaggcaccattggggtcaacaagccacatagacgctgagtaaactaatacccctcaatgctgccaaggtacttgatttgcattggtattataagttggggaagttccatacctaattttgtgtttgaaggtgcaaatgaagtttattaactcatagttgaggggcaaaagtggaattttcatttccttgctcatacttgtaggctgtagacaacccttgatttttggcttgtcaaatactagtaaagacaggtatccgtctttatatgctatagttcgaaggagaaattcttcaattgcnnnnnnnnnnnnnnnnnnnnnnnnnnnngtttcttttagaaaagctttagtaggtcagaatcaatcaatagaatcttttttcatattgcttctagttctagtttagtttgtccatctttgtcgatttgcgccgtaaatcatccgccgccgctgcgagagtgcgacacctctttgtaggtttgtcctgaaaaccttccgttttgcccacgagacaggtagttatctacggtttcatctagatcggctccgctagccggtttagtttatcaaaacccatcttgatctagtgcttactagattagggtggttgacgactctactattaccgcaaagcgttaggtgctgcgatcgtgcttgtcaacttgtcacaaaaagttgccaacactctttatcttgtgttggcgtttacgagtttgtgttcgctttatgtttggaagagtttttttttaagttctctttaagttgtactcgttttgagtgatttcgtgtaataattggctgtaactcgtttgagcaaaggccgggatgaattactattctattatcttaaaaaaaagatgaagtccaaaggatggttaggcacttaggtcgaagaaaaatggcctaggtttgtggattaaggcccatagaactccgcatctttttgaactcttggttggaccatgcacgcatgcatgggccttttgaatggattaggtccatgaatagacgaaccttcgaaactgcacgacacctttcccacaaaagatattcccatgtgctaacaatatagaagagtatacatttatatgtcttatatagttgctttgcactaactttgccagttccattaatttgaaaaacaaaatgattttaccagaaaagatctaacaatgcaacaactgttgagttaagatcaaatccacttaccaaagtgacacatggaaaaaaattacatccaactattataaaacaactggcaacaaaataagatgtcccctcgttttgtgcatatcgtttaaaaagtcatcaaagaatttggtaagagattaaaatagaggagagttaagggacgacacagaaggggacgctggcaacagatgaagcttgtggcctgacggttcccgaccgggatgaccagcctcagcacggtgacaaggaggcatacatgcatgcatactgtacacgcgcacatgcacgtacagatcgtttaaaccaatcaaagtgctggccatgcgccatcccgtgccgagtcctccgtgccgatggtcttcaccgagctctcctgctgtcgtaagcaacatcaacacacgttcgttttctccgacacaacatcaccgatggtcttcatcaacatggaaacacacgccgccgccgactcgtccacatagatggacacctcgcgtcctctgacggattaatctgcaagatgcttcatcgatgacatcgaccgcgtcctctacaacgacaacgaccgcgacactgacggcagcatcgatcacgtcatctacgacgataacgactgcatcaactcggcgtcactattgtgatgaccgctacacggcgcgaaaggaccagccaaaatggtggcctcattgccaacgacgtcctctgacatatgcaagacgtctccaatggcatcctctaacatctacaaggtgcaagatgctaacaattccagtttcgtcttcacaccatggcgtaagtatttttttttcgccttcggctatttgcggctacatcaactaccgcgactacggctactacatgatcggctacatcgacgaacgtctataacaagaatcatctacggcaactccagttaaaacgtccgtgtcatcgctatcgtccatgacactcccgctatgactgcgggaggaaatagaggagagtcaactgacggcagcaggagagctcggtgaagaccatcggcacggaggactcggcacgggatggcgcatggccagcactttgattggtttaaacgatctgtacgtgcatgtgcgcgtgtacagtatgcatgcatgtatgcctccttgtcaccgtgctgaggctggtcatcccggccgggaactgtcaggccgcaagctccttcctgagtagatgcgtcctggtgttgccgtcgctcgggcttcaatacaaggacttggacggtggtgccgtacgcgacggcctcgtcttctgcttgatgatgctggtgagcgacgacaaaatcgtcgtcgtgtttatttggtgtatctaatagaagaatcgatctatggataatctgtagtggctaattgatgcggcgccccagggaaattataggattgatatcatctccccagggcgacgcggggatcgaacgacgttggtctctaaggctctgataccatatggaaaatctaatatgttatattttggtattttctccatgtattgcatcgaccctctcatgtggtatatataggagtatatagggatagagacttggagtacaatacaagtaatagtagatttatctctaggattctatctttaggactctatcttatctctaggattctatctctaagatatatcttatctctatatttgtatttgactcttatctctaactaacatattatacttctaacaatcaatatgtgatatattattctataaacatacaagttcaaatgtgacttatacaattagaacaacaataaaaaaaagactgcaaattacgtgttctattcatattcatattcttattttttatttgtataagttaaatttaaacatatatatttgtggagtgacattaatctatcttgctattttttttaaaataaaaggtgatgttttaagtaagtaaaaacaatgcataggatatctccataagggatgaacagagtttcactaagttaacaagatatagtttcttaaacacatatgattttaaccggagaaagcacacgcaggataacatatcttgtgtgagcctggtacgtagaaatagttcagttaatttcctgggaaaattggagcttcaagcctttatttggtgatgagcttgtccagctcggacagcggcagccgcttgtagccgtcagcctcctcctccatctccggccacttgttcttcttctccggcgccacctcgccgccgtcatggggcgccgcgaaggcttgcccgtcgtcgtcgcacaggcgcctgaacaggtgcaggtactgttccaggctgtgcgacgccgacagcgacatggcgacggcggcgtcgtcgacgacgagctcgacgactttctcggtgacctgcacgtaccggtggcccggcggcagccgcggcaccaagtcctgcttgacgacgagggacaccacgtcgacgtggcggcccttgatcagggcgtcgcggaacgccccgtcgccgacgcgcggcgcgccgaaggtcacggcgcggacggggacgtcgtcgtcggccagcgccgccgcgacgtcgtgcgcggccatcagggcgagcgcgccgccgaggctgtgccccgccatggtcacgcggacgccgacgccgggatcttctcgccggaaatggccgaccaatcgcctcacctcctcgacgacctgctcctgtgcgctgagctcgccgcgctgacccttcccggccttgtccttggacgcgtacaccttgtggaagcccttctccacctcgccggcggcagcggcggcggcggcgccgcatccgatccccttatccttcgacgtgtacggcttgaacggcacgagggggaactggatgttcatcgaccagtcggcgacgttcacggagccgcgccacgggacgacgacgtcccagtagccgccgcgccacgcggcggcgacgtaaccgaaccagtagggattgtcgacgccgcggaggacggggagcgccgcctcgagcggcgccgggacggcgtcgatggtggcgtagaggttggtggtggccaagtacaagtagccgccgccgccgtagtagtgaacctccttctcgtcgtcgtcgccggcgaaggccttgtaggcggcctccaccatgtccccgtacatgaggatgtcggctttgtggtcgggatggttgtgatcgatcggcagctgatagtcctcgccaccgccgccgccgccacagatgagctggaggaaggtggcgaagccggcgaggaggctacccttgtcgccggcggccatgtcgtcgtcgatgcttaagagtgtaagatgactcggtacacccatactccaccatgcatatatagggctcgacgtcgtctcttctctggcagtagatgcaggtgcatgtggggagtggattttgatcctcgagagtagtgtttgcaagtcgtttgaatagtaataaaaaaattaagaagatatattattatgtgatatatcattccacaaatatacaaatttaaatttaattaacttatacatcttgcaacgaaaaaacaaatttaattataaatatacgttaactagttgtagtttaatttggttttttttattacgagatgtagaagttaaatttgaacttgtatatttatatagtgatatatcgcatgttaatatatattcttaattttttataattatttaagtgatatgtaaatatctaagagacatcctcgagagataaaaaaaaagtttcttatgcatgtgtgcaataattgtgcatgcttgcagtatggggcggggtagaccaagtcaacgtacgacacacgtacatacaccgaactttcttggggtttggtgtttaacttgactgatctcgtcattattttatctaattacaggactcatatgatgacattattccatctagacgcaggcagggagtacaggttatttgtttttcttgaccagcataggctagaaactggactagacttgactaaccaatcatcctgggcatttgttgagtagtaactgtattttattaagcacttgtttatatatactctcttttttcctaaatgtttgaagccattgacttttttaaacatattcgaccgttcgtcttatttaaaaatttttatgaaatgtgtaaaactatatgcatacataaaagtatatttaacaataaatcaaatgataggaaaagaattaataattacctaaatttttttaataagacgaacggtcaaacatttttaaaaaagtcaacgacgtcaaatattttgggacggagggagtatatatttgcagatgttttcttgactaaccaaatcggtgcatcccttcactgttcattcacgcattgcaccgcattttgtccttctcattgccgctggtcgtcgttgtcctcctcgccaaacttcgctcatcatagtgccgattgccgtccacctctctctcctctagctctatcatcactgttgcccctcgttcgatcatccgttctcgtcgccaactgttggggattaattacatgccatacaaatgtatgaaacgaatgtttctttattttttttctctattataagtgatttagaatatattgaagttatctaaaatttatatttgaaagtttattgggatagttttgaaatttttttggtatgatttcgctgtcattttatgattatcttttaaatttcagtgaaacattgtaatacaacctttttcaacaaaaaatttaagaactctactcaaactttgaaattttcaactcaaatacccatttattgttttactatagaaagtgatgaacatatatataattaatcgtgacactaagcgcgtccgcgagcatgcgcaaactaacccaaaaggactgattcgcgaacgttcgcacacggcgaactcgcaagaataccctacactttccttttttttttggcactgcttggtaagtttacatactgaaagtttatacgtgatagtaattcagattcagattttcttatgtaaagtatataaagtttttatatataaagttttatgtataaagtttctacgtagaagtataatctttggagaccatcgtctcatggtggaccaaacgtgttcacgcaggatgcacgtggacattcacccattaaacttacccaaagtagccttctccaggattttgggcttccaaaatattaggccctaagagatgaggcccaagaggccgtgaacatgcttgggccttgaaaatccatggcttgtcgagtaggattactctacaaggcccataggttcccagcgtccaaagtttttaacccttggagacttttagaccaatgtactgtgttcatctctttgagtacagtatctgataaataattaaattttaccatctcaggaatcattgtatggccgaaatcctggtcaatccagagttaggattttaattcaatttcatggtttatttctttaaaccgggattaggatccaaagaagctgattttttttatttatcgactctcttggaaattgaattgatttactaattactgatcaagtactagcaagcatccacgcatccatgtttctcgccgtcgaatgctgcaattttttgacagtgcacacctagctacgtgcctgtctcaaattaataaacactcagcttagtactccacctctttaattaaattaaattaataatgccctctagctagtactgcatcactcttaacataacataatcacggccataatgtggccactaatgcaacatcatccttctctgaatattataagaatattcagtaatctatacacattttttatattgtactatagtatattttcagtgtactagtgttccagccatgcatgcaaccattgtttacatttatattttcaaaagaaacagcacattgttatataggctcatgtgaaaaattaaacataaataaacaatactataatccatataggagtacttgccctaactaatattagtgtcacccatgtgagcatgtcaatagctggccaggcaagcaagcaagctcgctctgaatgtgtcctgaaacacccagattaattaattaatctaatcaaacaaaagcacagcaaaagaggagaaagctcaagctgagcaacacaagattcgttccttaattagggttccagttcagctcgagacaatggcgatgctttgcttagcggctgtagggttcttaggtgatacggcctctgccactgtccccctcttaatactattgatttaatttcagcgagcagcgccctgtctgtctgatgacaagttaatcagcttcttgtttaattagcttagttttctcttgagattcttcctggtttcttgggctttgaaaccaagaaatgcagtgacgatgcatatgcacacacactgtgattagtttaattaagctgggctttgatcttgctctctagaacaagttgacagtgcatgtgatgcatcgatctgcaggtactggctgtctgtatctagattctggagtctagaacacaaatcaagttaacaattgttacttctagtgtgctacttgtagttcttggaagttgaaacttgtatctgcaggttcagagatgttcttgtataattgtatcttgtccaaactgaacattgtggtccatgctttaactatagtgctaattaatgaagtttcaacgatgtttttgctagtgctacattaagggtcagtatatgtagaatcagcttcattttgatgattaatttactgactgaattgggttttctctgaacagactggactgaactctgccaccggaagagaagaaagaaagaagctctgaacttttgtgaacaaaacaaatgctctgaatatgatggcatgattacctccctcaagagattggcaatcatggctacagttaccagagaggtagtaattcagttacagatgctactgttagcttctaccacatgagcactaatcaaaagtgtaataatcactggccattcatcctacctcaaattcaggttcttcagttcttggacataagagtcattgtatcctctgaactttcctgctactagtaatagtacatacagtatatgatgaagttttgaattattagtactaacaatttgttgctcaacagtaatgatcattcatcaagccctagaacacaaggggacacatgagggccagcatgcataattctgtcctttgcttgttgatgacctactgacccatgggcccggcctgctctgctcagaaagcaaattaaattactattaggtcccaataattaccaactgatactccctgattcacttgcagcttcttatcatcttcagcagcttttcattcccttaccttttatgctgcactagaatttgtccaatgtgttcatctcctccctgaaattaataaagcagtcaaattgaaagaacagacaaagccaatcgatcggttgatccacatggtgattgtgcactataattgaaaattaagagctctaatctttgtttaagaaaaggaaacgagccctaaacatatgtttaatgtttaaagaaatgatctaactgtaccaagctatattcagtagtagcatagattaatcaggtgaaagatacataggtcgtatctttggttgcacaacaagaatcttccagagttaaagaagatggagagaaaataaaaatccaggtgagttcttggagcgacttgggagtacttttggttggcatttgggcagacaaatttgcagcaagagtgttccaactaatgttagtttaattagtttaatcatcctctctagtctacactctgcactgatcactgaagaacagctatctttttaagttaagtgtgcaggtagtcctactttgtcagtttggcactgccgcttgttgctgcaaaatgacaaaatggagcagtaaaaaatggccctaaaattagtactatttctattaagaggatagctgcagattagttaatcacctgaatttgcagagaacactttgcaaaaggaaaagaattacactgaagaacaaatggtactacagttctagtatgtctgaactctgaaatgcacttcagttcttgtagcactactaatttaggcagatatagcatcacctgaatttgcagaaaacacattgaataaaaagagaggagaaaacaacatggaagagaaatagtttgtctgaaatacacttcagttgctgcacttacaattatttgtagaaagatcgtggatagaacatgcaaggggcccatgcatgcttaatttgctccagctttaggaccagtggcgctgattaagctgtcttaatctttccgaacagagattaaagtggggttgtgctaatcgggtagggagaaatcatgagcatcagcaaattagttaaataatcctgaccaaaatcatacacatcagcaaagcaaagccctttgattaattatctgcctttgtatacatcatgcatgcatgggctagcaaaagctaattctgaccgaaatcattagctctaatctctgtcattaagtatccatccatacatgcgtgccatgtagtactatatctatcaagtaagattgcatatatctgcagaaaatcccaaaagttaagaacacaaaagtcatggtgatcccggtttcttctccgagcatcaagatactaactcttacttaattacactctattactcttacttaattactctccaagttaattactattcatgtctgtccgacaataatttggtccggcacatgtggcacgtgatcacaatcttactctccgtttcttcttgattattactatgagaatgcttagagtttaaccttttgacacatagacctctgagtaagcctgcatataagcaaaaggcttgactaattaagccattgccaacttgtggtttcggtaattggagttaatttacagccggtcatgttgacattgtcgcctctacccgacatggttaccaacccactgcataaactaatcactttgcttacgtatcaagcagccttcgtcaacttctgatcataattagtggcgtctaaccttgacaccggttcatactgtgttcttgagcatctcatgcatgcaagaaagtcgtcaagatggcaatgaaagttgaatctttttcgtatatatagtactaccatatgcattgccaaacatggggaacatacttgactcagtttttagggcttgttcggattataggataggaaaaacgtaggatagaaaaagtataggaatgtaaaaggaatctaagtataaaacagagaaatgaaaaacagagaggaatgaaaaacaaaggaatacaaaagttgagagcattcgaatcacaggaaattgattgcttatgatttgcatgcaggaagcaaacaaaagagctcaaggtggatggatttttcctgtacttttcctgtgaaaacagcattaaaggaaactttcctttagatttcctacaaccagtttttatgacccgaatgataggaaagggaaaattttctatgcacagtattcctccaaaaatcctgtgaagttcctctaatccgaataagccctcaatgtcttatacttgtctgaatagtttcagttactgcgcatgcagcatggtttgatgaaaatggcactaaaattgaaacatacgtacattcgccattcgtccacttgttagcttaattaattaccagccacggtaggaattgaaattctaaaactcaactttagttgattttggtttttgttcatcacaatccacttaccagcattggcttttaaactgttaataacaaaaatataaagttttactcataaattattttatttctttgttcattttctcatagtttatcggctgtatctcaaacaattagatttatcgtgtagggacctttgtatggacccttcagaactgaaggaacatcatgggattttttttaggaaagaaaaaggactattttcaaagataactctacaaaactcctatgttcttttcaaggaaaaactgtagagaaggatcctacagtgtatacatatattaatattatataactacatattttcatacaaattatctagccattttgtcatcagaggttgtaaactatttcttgctctatggaaaaccaagccaagttcttttcggaatcagtcttttatgaacataaaagaagaataggtggaaaacaaaactcctgtatttcaaaggagttggcatcgtgcgtagtggtatgtgcgcgtgtcccacccatgtaatattccatgaacaactctagaaaacacatatgagtaaggaaacaacattacatggggtccgaggccgtgcaatattctgtcacaggtgaaggcagcacaattgagcaagttgtcgcctgtggtaccgaacaagcgtccgatctgcatgaaaacagtacacgcactacactctttgcaaacgatggctgaacatgcaaggtttcttggaagaaattcggagaaaactttggtcttgtgcggcaatccacagatctaggatggtgacattgtctcatgtagatgatgcatctccatgacaaaaacaaaatgcactagtgtggcttgcacagtagtggtggactggtggtagagtactcatgtgacaaggccaagaaattccacaagaattgaactatttatgtcagataaatttatatcaccacagcaacattaattcttatttatctggtttgtatagttgaggggataaaatgtctggttttcaaattcaggagagtaatttaatttaattgatcacgatagttgagggggtaattcgtatttttttccttaactcaatgttactactactttttgaagcatttgttgaagtttgttcagtgcactcgtgctcgtcgcgtgtttttggtggcttatcaacagtaaccaagatttgaattttgaaaagtagaattgattcaggagctttttttatcgtagtctattatctagccttggcttttgaatgcttgtaaacttcgacaatggattaaaaacttttgaagcacaaattatataaaactgataataaattttaaaaaaacgaatgatgtaataaattttttttttgttacaatggatgtttttcttcagattgttagccgtgagcccgtgactcaacttatatcgaagcatatgtcaggtgagaccaaaggataggtcagatttgatcaaactaagcaaatatgttcgaacggatctgaacgtgaaccccatcaaactattgaaattcataaattcagctcgaatttatcgaattttcaattatactatcgatttaaactaagtaatgggaattgatgggtagaagcacgagacaacattggagtagaggagaaaagagaccgtagcgtccaacagggcacttttgcctccagtgagcagcagtaaaacccaaaagttactgtcctctcttttttcaccctgatgtcacagccacagcagcagtagtacaaaagttgcagtaaaaaaaaaagtctacggcgccgtagaatgacggatctacccctacccaaccaggagacaagctcacgagcctatgcggatcccgcacacgcctcctccccccgccacacactatttacgattctgccactcatccccgccacgtggcaccgccacgtgtcagatgacgtggcctctccccgccggtataaatcgcccgggaaaccgctcctgccacttcaccaccgcacagcgagctcgccgcggagagctttcgccggagaggtagacgacgacggcgacgacagtgtcacgtgctcacgttcatggtggcggcggtgcgcgcgccggtgaagccggagatggtggagctctcgccggcggcgatggagaggtactcctccgacgccgacacgacggcgccgaactcgagccttagctcggcggcgagcagcacggggagcctcgcgcggtgctcgagcctgtcgcgcctgtcgttcgactgctcgccgtcggccgccgtggcggcggcggcgacgtcgtgctcgccgccgcgggcgtcggtgctgttgcggccgcacaggtccggcgacgtcgcgtgggcggccatccgcgcggcttcgacgacctccgcggcgccgctaggcccgcgggacttcaagctcgtgcggcgcatcggcggcggcgacatcgggacggtgtacctgtgccgcctccggagctcgccggagagggagagcccgtgcatgtacgcgatgaaggtggtggaccggagggcggtggcgaggaagcagaagctggggcgcgcggcggcggagaagcggatcctgcggcagctggaccaccccttcctccccaccctcttcgccgacttcgacgccacgccgcacttctcctgcgccgtcatggagttctgccccggcggcgacctccactccctccgccaccgcatgccgtcccgccgcttcccgctcccctccgcccgcttctacgccgccgaggtgctcctcgccatcgagtacctccacatgatgggcatcgtctaccgcgacctcaagcccgagaacgtcctcatccgcgccgacggccacatcatgctcaccgacttcgacctctcgctgcagtccaccacctcgccgtctctcgacggcgacaccgacaccgacgacgaggccagcggtggcgcgtcctgcttcccggaccacctcctccggttcaagcggcggcggaacgccgtggcggcgccgcgtccgcggttcgtggcggagccggtggatgcgaggtcgtgctcgttcgtggggacgcacgagtacgtggcccccgaggtggcgagcggcggcgcgcatggcgcggccgtggactggtgggcgtacggggtgttcctctacgagctcatctacggccgtacgccgttcgccggcgctacaaacgaggcgacgctccgcaacatcgtccgccgcccgctcgccttcccctccggctccggctcgtgcggtcccgccgacgccgacgcgcgcgacctcatcgcccgcctcctcgccaaggaccccgccgcccgcctcggctcccgccgcggcgccgccgacgtcaagtcccaccccttcttcaagtccctcaacctcgccctcctccgttcgtcgcgcccgcccgtcgtccccggcgccggcgccggcgccgcgccgctacaccggtcgcagtcgtgcaaggcggcgccgacaacgccgccgccgccgacgacgacgaagccggcgaacgccaccgcgcggttcgacctcttctgagcatattgaccgttgctgtctgctactacctacccgcgtcgtcgccgacatcgccggcgggagacacgctccggccaccgtgacattaatttctcgttgacccttagctaccgcgttgaatgtacacactgttaattaattactactcctagttaatcactgctaatcaccttgctgttagtactactaaactaatataatctagtggcttaattaatcagcttgctttgagtgatatgatcactggtgatgattgcaactgtttctgaatcaactgagcatccattttctaccacttcttcggtcctaaatactacgaatctggatacgatgtttatttaaatttataatattatatattctattcaactaaaattttttatatttttaattgaagggagtaacaaacataggagtaaatagaagtaattaaataattatgggggtgggtaatgttggtcgggtggtaattaagcaggggatcacatggatgctggaattgggtgggatgcaggttagcgcggttcatggattagggggttatggttggtgattacattaatggtcggagttgacctgtctcgtctccttgtctgctctgctctcatcttctcgtcttcttttcttccaaatagtggagtggttttggttgctgggaagagaggtgacattccagccaggttgatgtccattttaatatttatttttggatgcattgcattttgcaaacaatagcgtagggtgaggataaaaacggtcggaagagatgtatggtactagtatttcttttatatttcttatcacagaaatgtagaaatgtttttggtatggtaggatatttttttataatttttgaatttaactatttagtggtggcattgatacgacgctgacatgacagaaattaagataaactgaattttatatacagctaggaacgaaaagggcagaaacgatatactagtaaattttgttctactttaggggggaaacggatcgatacaatcgggaaattgattaaaaatgtttaaaagttctttgaaaaaaaaaactccaacgttgttattctttacacaaacctgcatcgtttatgagattttgaagcacaccccgtaataatccattagcaagttaagtagtataaccgctgaacacatgtgtataatgtttcatttggaaaatatctgacacgtgtatatctgctacgaacatttatgttgtgttctttattccttctgaactcatacaccctcgttttctgaatcactaaacggtatatatatttttaaaaatatttagagtttgctttataaattatattaatatatttttctagttttttaatctaacatttaactaagaatatgctaatccctccttccaaactcaatcttactctctctgtagttgtcccataaaaaattaacctaataccagatgttatacatcttactactatgaatttggatatacatatgttcagattccagattcgtagtattagaatatattctattcggttttaaatttattttccatgggacagggagtatttgtttacacttgatgcacggaagacgtgcagtatataaaagtactgcttgaactctcaatagagtatgcccttttataatttcgaacatttcaatgtagggtatgcccttttaaaagcagaaccgcaaaattaagattcaaaacatctccttgcattgcatggcattgcattgctgggacacgaaatcatgatgatgaaggtgtcgagctttggtgtttgaccaggaggtcccacaaggcaggcagagatcgatcgagacggtggctgccatgggttgggccatgcacgcgtgctgctgtttctttgttcgttcgttgtcgttgctctccatcaccttccttctcgtagattagattggtagctagccttgctatggatcggggatcatggctggaggagcatgcaaactcacgggatcgccagctactctagctttaacttggaccagccagtgtctttcaagtttaattgtttagttgaccccagagtttacattaccggttgaccactaaatttcgagtcctatcattatcacggttttcgataaattttgacttaattttgatcaaatctattgtttaaccttcgaaattccaatcgaaacttaatcccaagccgtgtcaaaacattgaaatttcacgaaattcgaccagtttttatcgaaattgtgaaccctgttgacccaatgacaaagctagaattttttttgggccgaacaaacttcaatataattagtagtatttgttatagaaattttatcaccaattcataaatgtcgagctcgggtggtggctccgctactaagctgaccttaaactttgcaatttgagaagatatactacaatacgtacaccatgtgtgtacgaaacctggtttatttttcctatatacctatacaattcatccccgctaactctaattctctcatctcacagcttgccacgtcactctaaattagtctgaccattagatttgcaatggatgtcttagattttcactgattaggatctgcagcaaaaacatctagctctacttgagtacctccacgtctcccaagcgctttatctttcgaaactgccaattttattacccactatgattacttcttaatgtctgatgtgttcacagaatcaactggtagcatttgtttcctcttttcttgcttttcctttgcctcttccgatcgttctcctttctactcctaatcttggtttccttcgggatatgtttcccctcgctaacactcttcagatgaatgcagaaatcttctcgattcaagattgaatggtgaactctcgagcatgagaaaaaagcccataaaggatagttctactaatctctttgtttattaattttgcattgttttagacatggtaagcgtaatataggtctatccatgttctcattttcttcaagtcctatttgataaaatagacatactttatcatcttacctgttttagaagagctcttcaaacaaaccgaaaagagaaaatcccttgtgtgcccatgaaaactcatccaatcccttagatgccctcgaattttactcgatctcctctgtacccctcaaatttcgctttgatcccttccatgcccctcccgttaggtttccttcatttggcagttaagtgtggttccaaatgtccaaaatacccttctgcaatagggtgagcaatgtgtatcttccgtatgagcgacagctagattgaaaaaaataaaacaaatggtgactgaacaatgtgtattttgaggctaaatgagtgtataacaaatttattgtggtactgaaaaatgtaatatatctttttgtttaggaaaaataataggatgaggaaaagcaacatgcatgagtttcctctatagaagaaattggatcctctgtacaagaaaatgattctaatacaataagagcatcaatagcttcatacataactatagaaacatacaaaaaatcctttccatacataacagttcatatcatgcacacacaattccatttccatacccagtagtgcaggaaccaaaccaacttttcattccatacatcaggagcacaatggcataaggtccataatagtatgtccataacagggacattttatgagaaagcaatccttacaatagcgaaatgagatatcaactatgactagagcactttgcagggcatcacaacaacaaaacccagcagcctccacaagagaaatggcagtaccaaaataaaacctaatcagtaagccatatatatgatttagtccataagctttcttttgctcctagtgcccattgcaggactcttatttttgctccttgtgcacatagctgggctatcaggagtaccagaacgtgatggctttccctttgttttgctcttcgccttttttggtgcaacggtaggtgttttatctccaatacatggcaaggctacaacatgttagatggctcaggttgattagagccagtaagtgatcttgatctagaaaagagagttgagaataaattgtatagaacaacataatgccagcaaattgacataattgatctatgtctcttgatctaattacttacctaattgatatacttgaacatgagctattgttccatgtactattgtcctcagtgaaatgaaagttttgactgtggaaaataaattgttatatacctaactgatctaaatccatgtagaatgaaataaagaaatttgcctaacctaggagagtatgccattattggtgtaactattggagcagccatgataattaaaaaaaagggctcgctaaagcactaaatcattcgatagtttaacacattaggggaaaaaacgctgctcttgtcgtctcggctgttgttagcttcagctactggctgtagcgctgctcttgccaaggcaatgcgagtgaccaaaatttgtcgatgctagaaacagcacaagcttgcaacaaacagcgcggggaatgcatgggaaattccaaatagaggttggacaatgtcgctgaactcctagtaataaagtgccctaggcctaggcagtgttgttggtctccaagcgcttgcaaggaagctccaggagaggcagatcattgggatactcacgcgtcgattaggtatggtagatccacccccaataagaagtgcaacaaaccaacaggaaaagaagatgattaacttaccggctagatgatccccaactgataagatccccaacttcctttggggtttctcctcctgctccagggagggcggtggccggcggcccgtgtggcgggaagaagacagctggacgacgacgtgcgcggcggggagggcggcgcgcgcggtgggagggcgacgcccgcgcggcaggaagaagacggctggacgacgacgcgcgtagcgggagggcggcgggacagctggacgacgacgcgcgcggcgggagggcgacgcccgcgtggcaggaagaagacggctggacgaccacgcgtgaggcgggagggtggcgtgtgcggccgaaggggtacggaacagcagcgctagctactgcaagccggcggcgcgggaggccgctcgagtcgagtggataagaggtaggttgaccaaaaaggggataagacttagggttggaggggcattttggcattttttaaaaatactgacaatactacacacggtttgattaccatttctaacggaaacctaacaggaggggcatggaagggatgaaagcgaaatttgaggggtacagaggagattgagtaaaattcgagggcatggaagggattggatgagttttcatgggtatacaagggattttctcaaggaaaaaagactactaaaggtaactccttgcctggcttcatgaaatttctgctttccctagaatctcactttgggataattacgtctacgcatcaacatgtaaatcaggccattagtattaaattacattcatatatgtgccacgtgttgctatattatttcttaaatgtatcgtctgattccatagattctgttaacactgacacttcgatgcaaatgatagtacaaagtgaccgttattttgcgtgcttttgctatataacacattctcttcggatgaatatgtgttaggctttgtctaatatttttagataatgctataggcaaatcatcgaactgagagatacaagcaccatatttaatcttgagtcaatatatgtttaatgtttagaacagagcatgagagcatcaactatttggatattcatgcagcacattcacaacaaactagcatctacgtcaaagagcaattgccagaccgtacttttttttttaatatacgacgctgttgactttttaaatatgtttggttatttgttttattaaaaaattacgtagttatcatttattttttatggcttgatttatcattaaatgttttgtaagcatgacttatattttaatatgtttgcacaaacaaattgaataaaatgagtagtgaaacgcatataaaaagtcaaatgtgtcatatatttaaaaacatatatagttatttttagcacattagtatttttcttctgtaatttagttaataagccatcttacattttcataagttcccgctgcaacgcgcggggtatttttctagttttaatatggaaggagtaccacatattatatttagactactaattttgtttataacatgatatcaacaactagtactatgaaattaacatagtgtgatattaatttctttcaaacacggatataatgatatagctaggagtaatatgcatgcagggggtgaaaacggttggaatcggttgcatctctttgaaaataacactcgatcagtcattgatcattggccatatttatcatttaaactattcagtgttgatattaatacgacgtagaaagaaattagaataaatggaatttatgtatagccaaaatcgataacttaataaccatgctataaatttaattatttgggtggcagtaaattatggtggcagctataacctggcatgctgctaggtgtgaaaatggtcacgaaaattccggatcgagtgagtatcattttcgtataaagggtaacgttttccaacagttaccattttagctatatataattttttttatttcgttttctcaaaaaaatcacatcgaatctttaacacatgcatagagcattaaatataaataaaaacaaaaactaattgcacagtttgtatggaaatcacgagacgaatcctttgagcctaattagtccatgattagctataagtgctgcagtaacccacatgtgctaatgacggcttaattaggcttaaaagattcgtctcgcagtttctagattagttatgaaattagttttttcattcgtgtccgaaaacccctttcgatatccggtcaaatatccgatgtataacacaatttttttttcgcgaaccaaacacacccaaaggcacatatggtatacagtacccaggccctgcaggctgcaagtagagacaacagtttactcgtactccctccgggaaaaaagacaaatcctgggtttccgtgtctaacgtttgaccgtccgtcttatttaaaaaattataaaaaaaaataaaaagacaagtcatgcataaagtattaatcatgttttatcatctaacaataataaaaatactaattataaaaaaatttcatataagacacacagctaaacattggacacggaaatcagggtttgtttttttacggtgggacctctgtggatcggcaccgtcgattctggatccaacgggcctgcagtcagcaatggcgtcatcacaggcgcggtacgtggagatcgaggtgaaaagggttgacgttgatctgaccgtcgggcaggcaggggtaggcatacacggcaagtcagcgtctgtctcaatccctcaaagctgacactcgccggccggcgtttgcactggaacccaaatttcccaatggaaactgcatctctgcgtgcattcgatcacctcaactcaccatcagtatctttccaattaaggctctcatcggatggcctattcagaaaaaaataattaaaatttaaatttttaaatttaattttgatattaattttgagatattttcaatgtagtttctttttcagcattggcttttaaatcaccaagaatatatatataaaagttttacctataaatttatttttattctctaataaaccgttttggcttattagaaaaaagacaa

SEQ ID NO: 5498 - DNA, 33935 bp, Oryza sativa
  unsure (1)..(33935): unsure at all n locations
aaagtttttatgttttttctacaaatcaaagagacatgcttcttaatttgagtcttttttttggataataataggtgataaaaatagacgcttgtttgagcctatttggctatggcttgtttgagcgttttagttgcagcttaattataagctaaaggattcattacgtaacaaaaattaaaaatgtaacttgtataccacgtattcttagaggttttaaaccaaaagttccatgatgagttaaaaccatgtaaaaaattaatggattaattataattcaaaattattttctactagggcaaaagttatagatccaatccaaagaaggccttaattaatatatacttacttcgatacttgcaacacatgatggaagtcttccattagagccagcgaggagatacctgatcgacctcttaattagcacacacaaaggcgcgcatatatttactacttctctccgtagatatatatcatacgcctattaatataccatgatgactaattaactaataattatataaaattaaggtccttcacctaacactttgtaagagcaccatcaacaggtcactcaaatactaaatcccaaaattccatttaagaatttctaatatgcattttggattttagaaaaaaaactttaatccaatagactgcctagaatattaactctctaagacaaaacaagtgaggttactccgatcatctattagagcaggtacaatagcatgctataaaccaaccataataaacatatttaaaggagataaaagatgtagtcagccataataaacatatttaaatgagataaaagatatagcacggactacaagaaccataataaacatatttaaaggagataaaagatgtagcacatctattagagcaggtacaatagcatgctataaaccaaccataataaacatatttaagggagataaaagatgtagtcagccataataaacatatttaaatgagataaaagatgtagcacggactacaagaaccataataaacatatttaaaggagataaaagatgtagcacggactacaagatgtatgtgttgtatgtgtgctgtaacaggcctctctctagaactatgtagccaaggagataaaagatgtagcactgtaacaggcctctctctagaactatgtagccaaggagataaaagatgtagcacggactacaagatgcatgtgtgatgtaacactctctctagaactatgtagccaaggagtgtagccaaggagataaaagatgtagcactgtaacaggcctctctctagaactatgtagccaaggagataaaagatgtagcacggactacaagatgcatgtgtgatgtaacactctctctagaactatgtagccaaaagatgtagcacggactacaagatgcatgtgtgatgtaacactctctctagaactatgtagccaaggagtgtagccaaggagataaaagatgtagcactggaacaggcctctctctagaactatgtagccaaggagataaaagatgtagcacggactacaagatgcatgtgtgatgtaacactctctctagaactatgtagccaaggagataaaagatgtagcactgtaacaggcctctctctagaactatgtagcaaaggagataaaagatgtagcacagactacaagatgcatgtgtgatgtaacagacctccctccagaactgtgtagccagcccatctaacgggctctgacaggtggacccacttacacacaccaccctgtttacactttcgtcttcgcttcgtgtaaaagagttaacctgtgagtgacatggttggagggatgaggccttataaattggttccacccttactagactagcaaggtggtactaaacatgcgcacacagtttacatgggccacacatgcctcattctaattgggccaggatgtcatatatatgtgtatgagaggtgggagcaggtattgattgtgtactatatgtttataggtaattattgtatgaattggctataaaattgactatagatgatttgaagctggtagttggctatactattaaacttgctcttaggagttgctgcaagctcccgagctgtggggagtatggatatgaaatttataaattttggacaattaattaggaattgttgagatttgtttgaggggacagtgcatcataccacagttgttaggtaggtgtttgtttctctgccacaccttactaacttaggcttaccatactttcttatactttgggctcacaaatcattcactcttttatttttcaaaccacatgccacgtactgcacatttgtggcttactaattcatgactgcacttttatatcatattgtcatgccacactttagctaataaggttagttgtggcaaagttagttactgcaaccaaacagccgctaagtgcttattagctccctatatatatctctattgcggtgtggcatcatatcacacgcaaaactaattaagatcgagattgtccgtcccagcgtacctcgacatggtcggcggtgagcagagccaaatccaaggcaacggcggaaatggctgcagcggtaaggtggtacatcagcggcgcctagtgatcaacctcgaggataagaaccaccgggccgatctcctcaggtacgcggtcatggtggacgccgcctacaagacgttcgatgaggtgaagaagcaccccggcgagtcctacgagaccgtcttgtccagccgcctcgccaccaatgctgggtacgtcgtcaccgcccacctctacgccaccgtcgagccactaccactcccgccatgggttgtcgactcgttgccggccgccatcgccggcctgaacaagccgtactggttcggctacatcgccgtcggcgccggcaagcagcagggcgacgactgctgggacgacatcgtcgtcgtgctgcgcggctcggcgacggtcgccgacttcatgatggacatccatgtcgaacgcgtggcgttccaagggttggacggcgaacccgccggcggtgaggtagccgaggggttccacaaggtgtacaggtccaacgacgcggacaaggagcacggcgagctcagcgtgcagcagcaggtcgtcgaggaggtgaagcggctggcgaggcatctccgccggaagcagcagcagcccggaaaactgatccgcgtcaccatcaccggccacagcctcggcggcgcgctcgccctgatggcggcgcacgacgccgcggtggcgctggcagacgaggaccgccaccgccgcagcagcgagccgttgatcggagtccgagccgtgacgttcggcgcgccgcgcgtcggcgacgacgcgttccacggcgccctcgccgcgcgccgcgtccaagtgtcccgcgtcgtcgtcaaacaggacatagtgcccaagctgccggcgaacaatgtgcttgacggcgactacaacatcgagctcgacgaccatgatgccagcaagtcgccgcgggagctgatcaaggcacacagcctggacatgtacatgcacctcatcctgatgaccttgccgaacaccgactactactccaccatgttcaagatcaacgagaccagtaccgatcaggcgccggaggcggatggcgaggccgacgacaagcccaagtggatcaaaatgcgagaagacaatggtgacggcttcatgcgtctgccagtctcagatctggacgacgctttattatagactgtcggtactggtagcaatttttaaactttggctttttaaaatgggacaccttcttcttttatataaaatatgtcgacaacggcccgacggtttgaaaaaaaaacttttttccaaactttggccatatatatgcttccaccgattcacctgcaaaaagtactgatctatttttcatgctttcatactatttttattacccggcctctcaatcataatggcgcatatcgctatttaaaatgtacttttatatgatttccggtgatgttatcttttttcgagcgaataatttccagtgatgttttctgtaataaagttaaatgtgaccataccatgtcaatgacagtctgacaataaaattgcatgcatttctcagtggctgaagattaaccatttcccttgctaacagacacagaagaatagaagaatatattaatgttctcattacccatttcccctcagagaaatgcatttctagatatatattatccaacactgttaatgccaaccagaatcctgatctcaaagtgtaccacgcctaatcttaaatttcacagttgggagtcatcgacaagtgttcctacaaccatttggccagttaacaaaagaattgcgcaataaatgaagtggtttagttccttttttacgagttacatgttccccatgatcgacgctgcaagaccaacatatatagctgcaggcaagacgcttccgaaacagcttcaactgtcaaggagatgtttttataaaatttagtcatctacgttagttcatgattgtagctacctatcaaggagatgttcttttaccttcaggcgatgtcccctcattcttagttgtcatccgaataattatatttttttaaaagaaaatcacaatatagattaatatgtaatatatcacttcataaaatgtaagtataaattcaattcagctattcagttaattaaaaaaagaaacgaatgtgattataaatagtgcatgtactagttcagcttttttttcaacttatcgtaggacatatttaaacttacatatgatgatatatcaatttttttatctaagttgtcaatttctttcaaaagcttttaatatataacagtttggatttcataccagaaatgagggtgtaaaatcaaagcgttttttattgttattctgtgatgaacaattgacatctgtgtttattggttttgatatttggagattattggcgaagtggttttggagatgactgattttttcaggtgataaacagggttactgtttcttgtcaggtccggtcagaccaggcagtggttgcctgtcagaccggcgctatgcgagcggtcagaccggtttagcccacggtctgaccggccgactctgtgtcggttttagtttcagtttgtttgtttggatatccgtgattgtttcgggtttatgacttctagatggatactatgtgtatgtaatactgttgtttgctactaatgagtcaagttggagatagcttggtctcggaatatggtttctttgtttgattcatgtgtaggtgacttgatgcctcgggagagtattgccggtgatggatcgggagttgacttggggataaggcgacgtccgtgacggtcagatatcatatgggatacttaggctagagttcaatgcacgtggttggtgaagattccatatagcatacgatggaggtattgtgtgccccgagtttgtaaagtttgtttcttgtacggaaaggtttcctaggtggattagaacttctagtatgagtttggttcgtggctttaggctgcctacctcatgtataaatagagagggagcgtgaggtttcccggtatcgcttttgagagcattgagttgtgagtttagttagggtttcgagtttagtcgagattttcgtgaggagtgctgttgttgcactttgtaaacacagagagaagtaaaaaagttgtcatctactttgagagttcttcgatttatgttttctcgagttcggcggtctaaccggcgaaacaccggcgatcagactggcggcattgcggcggtcagaccggcggcagctatacaagcgacatcggttgatctcgcggtttgaccgaaggttcaacctcggtcagacggtggtatccatgcggtcagaccggtgcgactacttcggtcagactacgatccgtcaaatttgagggtaacttttaattccgcaaaaagtttgggtttttgggtataccaaccattcatccctctctaattggcttagttcttgtgtttttatcctacaaagggtacatccccttgatcattcatgattttccactatcatgaatatccgtgtttagttattcttaatctgattcaccgttacttgatcaaccttgatagctcacacgcatgtacattgtgtccatgcatggtgatgacttacaatatttatataaataggcatggtacggtggactgtttggccagacagtttcaactatatataccttagaaaagaagcggaacgggttacaatgctcttacaaaataaattagaaaagtggaattgatttcaggttactttactccatatctaactcttaaaattaaatttagaagttaaacccctgccacctgatcntaagatggtcactcgataccaaaccaaacccaaccaatatgagtacttaacttagtatgtgagttaaactttggcttggtatgctccttttatgttggacctatgcttaatgggacaattagttcttaccactattttaacttgtaattttaccctcattcttgaactgcaatttgtgtttgcccactcctatttcgatcagacttcacggtgttaaaactcatctatatatgtctttgcagatttaccactacttccctaagaactttgtgactttgcccttgttttgacattaaaaattttgagatgaactttggccctactttaatagcaatattcacttattcaagataaggacaagtataagcttgacatgaactttgcccctgttttaacatgaattttaacaccattaaattcccctaatgcaataagggcaagtacaagcttcgtcaaaatcataaagttggaaaaacatgaggaaaatcataatttgaattcaaaacatgataataacgcaaataccccatgcttaatttgctccgaatttaggcttcgtttagttcagcttatcagttgattagctagtaaatgaatataaggatcaattaaatatataaattataaagttaacaaataggttagaaaaaagttatctgcgcaatgctgatgaatttttttttttgaagaaatcgtaattataaaagcatgacacagataatagatatgcctccattagttaaaaagaaaggttattgtttagttattagttaattcatgatttttcttgaggaaaagttaattgacaattgaattaattaagggaatatcttcaaaaaaaaactgccacaagttttttttagtcaaaaattttcaaatgtaactatagtataattgaaatataattacattataactatattgtaactacacttcctgacccaatatgcatactcacatctctagcaatggtggcaatgtatataagatccccataaaaaatgtggctacatctaatcaatggactagtggtttcaaaacaaccaaattatttcccaaccattaccactagctcggtagttgcattggatcttgccaagaaagcatattttgcaccttggaagattaaataggaagacaggaaaaagtgactacgaattcctctttttgtttgtgaatccctgtttgtatcctttgagcgatattagataagtatagaaaaatcaatttaaaactgcaagtgcatgtgcacctacaccctttatcattattttctttaagatatatgtatgtaagtatagatttcaataaagtttaattatcattatattcctctttttgatatagcatgaatcacaataaagcatccaatgactcggtatgtaatgtaggtgcatatgcattgcgttgtaaaaatcttcttctaataagtagaacataattttatattactacaacaaatgcaaatggcagtgtgagagcatcaactcacgattgccctgtcatcacaaattttcaatatgaagattccttgtgcatgagttcatatatacacatcccgaaatgcttttttatatccaatggatggtttccattttagtaaagtacatgggcatgcataaaaaaataagattaggatgttaataattagggtcgtcaaacatccttagccaatcaacacaacttatagatgagacaacatctaagttggggaacaagacagagtagatcactagggaaataatttcaacaatattcccaacataaacagagagtcataacctctggctgcctccgccaacccagcaagcaccacgccacgcgaaggggagaaaaaattaaaatcacaggagtagaaaaaatagagaagcatgtagaaatgtggacgagaaacaaaagattaaaaaacataaaaaaactgaaaaaaaaacaatcgttcggatagggcataagaaaaactcatgaatcttgattctttattagaaggtataacgtggtagcatatgttatctatttttttgtgcttagagcacctcaagtataatgctaaaaatcgaactatgcgtaagaaaaaccgaactgaccacacagtgagaaagctctaagctagctgcatccgaataatgatgaactaatgcatgcatggttccatatactccctccatcccaaaatgtttgatgccgttgactttttaaaaatgtttgaccgttcgtcttattcaaaaaatttaagtaattattaattctttttctatcatttgatttattgttaaatatatttttatgtacacatatagttttacacatttcacaaaattttttgaataagacgaacggtcaaacatattttaaaaagtcaacagtgtcaaacatttagggaaggagggagtatataattatatattcttctccatcttatccattccaatgacaaattgacaatgaatctcagatccacatgtatatatgcacgaaaaaactatacacacatgtggttgtgtccagtgcggagccagggatgcagccgtccacctaattctgggatgttgatgagtggatcttgccaggagtaagcctgaaattagaacggttagataagaagaaataggtactagtaagtactattacttaatccaacaaatgcatgtgatgacgactgattaatcaattataagtcaatacaatgttacttaaaaaaagaacaacaatcgatttttcactagatacatgcatgtgctaggcagcttaattacacatggaacatgctaacatttttttaggcaaaaatctaaatagtgtgtaggcgatgttttgcttaactattgcacggttttttcagttaatggttttgacaacctatatcaaggtaatatttttatgatccaattatatcactatattcattacaattaaatatttataacatgatctgatctcatatgattatattccgatgaaagaatttctagaaaaaagtataatggtgaaagaatttacttttatcatatatgtaaattagttttggaattgaattaattacttcttagacatttatgaaaataacttcaataaaacttaaaagtaatttatacaattttaaaagtaacttaacaaaaaaaagttataacggcaataaaagtaaatcctttgtgggattaatagtatactcacacggagaacgaagaagtggccgttctgatgctgattaaaatttagcctaaagacttaatgatcactatcatgtactcaacaacaaaagtaggagatgtataccatttttattattaaaaaaaactccattactttatactcgctccatttcatattataagtcgtttgacttttttcttagttataactactttacgtttgatcgagtttgtagaaaataatagactaatattttcaatacaaaacaaacatattatcaaaatatatttaacactaaatttaatgaaactaatttggtgttgtagatgtttctattttttctataaacttgatcaaacctaaagaactttaacttaaaaacaatcaaacaaaacggagggagtactttagcaaggtcggaccggctatatataatgcatgctgcattgcagtgtgtttacacacacactccaagcctttgccttgcgttgccatgggcagcgtcaaccagagcagcctcctccatggcatggcgggaaagctcagggcctctttggttgccgccaaatgcagcaatcgattcgttcgtttgcctgcagcagcagcagcagtcgactctgctcatcacacgagatcaagatttctttcgtcgcaggttgccacgagtaaggtgtacgagcatccatcatcatcatggcgaaagccggccaggacgtcgaggatgatctcctccgccatggccgccggcgccgacgacggcgacagagacgagctcctcggctacgggctcatggtggacgccgcctacctgacctacgacgccgtcacgaagcagcagcccggcggcggcgagcgctacgaagccgtcttgtccggcgagctcgacaagctcatcgccaccgccgatgccagccgccgccgccgccggcacgtcgtcaccgcccacttcttcgccaccattgagccgctccaggcggtgctcgacgctctgcccgtcgtcggcggcgtggacaagacgtactggttcggctacgtcgccgtcgccaggcgcggcgactgctgggacgtcgtcgtcgcgtggcgcggctcgtcgacgctcgccgactggatgatggacatgcatgtcatgaatctcgtcgacttcggcggcggcgccggcaccgccggccatgtggcggaggggttctacaacgtgtacacgtccaaggacgtgaaggtgaagcacggcacggtcagcgccaaggagcaggccgtcatggaggtgaagcggctggtagaccatctccgacggcgttccggcgccgccggcgagaagcccgtcaaggtgcgggtgaccgtgacggggcacagcctcggcggcgcggtggccgtgatgaccgcccacgacgtcgcggcggcgctggccgccgacgccgacgccgagggcgttcgtgtccgcgccgtgacgttcggcgcgccgcgcgtcggcgacgacgcgttccgccgcgccgtcgccgcgcgcggcgtggaggtgttccgcgtcatcgtcaagcaggacatcgtgccgaagctgccgatggggaaggagtacgtcgacgccagcgacggcgactacgacatcatcaagctcgacgacggcggcaactggttgtcgccgctggagctgatcagggcgcacagcctgaacctgtacctgcaactcatcaccctgcgtaaccccgccatcacttccgtgctcagcaattcgaacagcgatgcgccgccgccgccgccggcggtgagagaggagtgggtgaatatgaaggaggaggagggatacatgcggctgccgctggagaagctagaagaggagctggacaagctagagggcccaagcccaagaaagtgaccaaagtttgaagcccatgactgaaatttccctaacttgggccatgcttcgaacgacttctgcagaaactattacttttgtaatttgtatttgcgttcatcctattttgtttactcctcctgttttgtttaatctccagataaataaaatggcatatatcgctgtttaaatatttgcatttaaatggtttgtagtgatctttttccataataacgttataaattccagcatcacgtcagtgacaatctgacgacaagatgtttacacgacagaacaagaaaatggatatgggttgtacaaaataaatcattgcatttctcaatggctgcaaaattaacaatcttccttgataacagatagaagtatatagaagaattagtttttttttctgaatacaagttaatttctcattcccctccgacaaacgcatttctagatctatccaacactgttaatgctaaccagaaacctgatctgaaatagtctacgcctaatctccagaaatttcaagttgggagtcatcgacaagtgttcctacaaccatttggccaggaaacaaaagaattgcacaataaagtgggttagtccctattttacgagttacatgttccccaggatcgacgctgcaaaaccaacataaatagcaggcaagacgtgttcttctgaaacagcttcaactaaatatatattcatggtatctgcaccatccacataaagtaagtattagacagttgggtgtgatgaaaattcaaagaaagtgaacactgatttgcaaattgcaaaatgttgccgtcaaacatagtagattgattttcatatggcagttgatattatgtatgtatgtatgtatgtatgtatgtattacaacaacagctctgtcatacgcttgaatatttcaagaacagataactaaagatttgcaaatgatgctggatgttttgcaaagaaacaacattaagcatgcagtgtgctgcaagaaagtatttttatgatacattactacatttctgcatcaaagtcttcctctgttatgatctaaacagaaagcagcattgatttctttctctttctagaatagcatcaggtaaattgaagatggtctacaactctacagttacagtatggtttgccactttatcgtgtgaaaaggaagacagaaatttgtcgaggtccaaaattgacttcccacaaagaaaaaatcagggcaaatacatctacacataattactttactatgatgtggataataaatacaaaatgagactattgtttagggagccaagcaaaaggcagtatgtcttattctcttcattgactaatacttcgaattatttattaattaatcatttaatatttaaaaaaagtagatattctgcctgacacattactaaatttgttggtgttaattcacttctttttcatagattggcaagattgttgttcatgcatccacaacccatcactagatctatgggaagtacagaagatatttgaatgctgcaaacaaaaaaagttcaagtagcactaaccactactgcggtgggttttgatgacagaaaccttctgagcctcctttttaaggacatatgacatggattgacaatcgaactaaggaaagtgtagctaactaagtccattccctgtgtcatctgttctggaactcttgtgctgacatacacaagccatgttaacaaacaaaaacgaattactctatgaggaaatttgcaataccagcaaggatcataatggctgtgtgtgctaccttacttttcttgtgcttatgcacatcggctgaatcctccattccctcatgcttccttttctgaaagatgtccaaagcccagcatatggaaagatggttagctatagaagttttcaacatacgaaatttcctacattaaatggacaaaccttctcatgatgtttctttgaatgatcgccaccagaatcatgatgcccacttttatcctttttcttgtccttatccttgtctttgtctttgtctttactcctatctttatgccgatgtttgtgcttcttatgctccttgtctttgtccctgtctttgtctttgtgctttttatgcttcttctctttgtctttggactcacttttcagtttaccagatatagtcggtatacccttttcagcctgatgaatggttcaatgttgtaaagaggacaatgagcaaatgaacactgtgatagcagaagtaggaggataaatggatcttacagagggcaaatctactggagccgtttctcgaagctgaaatgcttgccccagtgtttccatgtcaaacggctggatataagcaggcttgtccctcaagtatgcgttctgaaccagctgatctagctccattccttctcctttacgaatttcagtgtccccaacaacattgtcaagataatgtgtatctgatattgccaatggcaaaggcttcttgcaaaagaaatcatggtgggcaagcaatttatagtggcttattaaatcaacagcaccagtgagctccctagggcctgaaatatcagaaccaccagcatttcaagcaaccaagacatggaaaaggacatgtatcaaaaattatgttacaaaagagaaaatagcttataatgaacagtcgtcgcactggtaggctcaaaagtcagcactgatttaaatcacagcaaaaagaaaatcactgcataacacccccaccaaaaaaaaattgaccacaaatatttcaagatgtttgacagtgtttccggtacatggagctcactcagctcaggacaacaacatgatgtttgcatcagataaccaatacaaatgattatggtggcatcagctacacgccaaataaagcacagattatccctgcttattctttaaacatagttgggacgtttttgctggaaatcttttgatgttcagaaaaaaaaatccttatcaacaaaaaacctaccttttccaaacttcttgtcatcagaatccatcaggttgaatcttagcctaagcacagtgcatattcacctgaaattcaattgaacaaaattttacaactagcgtacaaaagcaaagtcaataggtcacagtatgaacttacactgtggcttaatcgatccctgttcccggaaacagaatatctaccaaaacaaaattgattttcatttcccaaaagcagacccatttattgaaaacaatttatcacatttcaaattagatcatctattatccatctatatattcaaccacataatgccatgactgcaatactgcgtaaatattaataaacagattgataagctaaactccaccaatcctggaagacacttacaataaatattctcatattatggaacatatatcttagttttcttgaacttcttagtacttactgtcgaactgtcaaagtatcacaacgaggaaacttaagtggctctatgagttttaaaactggttttctttcacaatttttacgatactggaaaactgaagattgtgtacatttctatactgacaacataattctcttgttccacatagtatcaaagtaataacagagtagtaacaaagttgggagatggatctctaactctctatttctttgttgaacatgaatgaagcagtaacatagcccaagattgatacagtaaaactggagagacataaggacgtggagcatgcatccaaaaacatctcttggttagcagacagaacctttgtgtgatctactttctagcagatccaagcaacattttgtaaataatctaaagttctactcacaaactttgacattgaccccaaagtctagaagattaatgtgcccaacacaactctgggttagcgggtagagcgttggtggcttggtatgctctatttctaacggaccaagccataaaccgtatgaaccctacaacctttacctacattgtttgaaatcagctcaaatctccaagagcccactactagaaactgaaagattaatgctcgccagaccagaggaacaaatttatcttctccctacaaaaaaagagcaacagtttttactcctcctttcccttttggagttaaaagtcacacaaaacatttttctagcacgccattcttgttgtgggggaaaatgcacagcatatggcggcatgtttctatcgtcactaaattgatgatcatgcgaactgcgctagagttcggcacataacaaaaaaaacgcactcctctgctactgcaagtgtgcaatgaacccagcagagcatagtatattcaactcgaaaaccctagttccacagctcccccatcaaaccctcaactggaattacaccgattggacgtggcagcgccccgggaaagattcggaatcgggttcaattgctcgcagcaacagcgagagaagcaactcagattaggtcaaactttagaaccaagtaaccaaacccaccccaccccacccgcccacccaagcaaaagctagggcttcctcaccggataagggggggaaagaaccggcccgccgggtcgtgtgtgtgtctccgctccacccccgccgagctccgggcccgaagaggagcggggagggaggagaggaggcgtcgagtctcgtcggcggcggcggcggcggcggcgggattcggggagaggcgaggcgagtccgaccgaccgtcggcccgcacccgggtgggggggctccttatgatgcggtgcgacgcgacccggcgaccgagcccctcccgtttcgcacacggagaggggcagtatggtaaataggcgagataacaatggggagataaaaaaattgaatatttaactatttgtcactcttaatatatgacaattaataatttgtcacttgttgtctatgacatgtgggcccagtgacgtaagagtggaaaatagttaattattttataaaaggggatttttgggaaaaatataaaatcgaaaccaaacagtataccttggttcagtttttatttaagaaaaaggaaataaaaattcgctgtagtacctttgtcctataataattatatttctaagatttaaatttgttccaaaataattatcacatataatactaatggtctcattaatcacttctcattcagatttcttcttattttacactcaactatctttctacccttatataaacaggaattactttgataaggggattcgccgaaaccaaattcatattcaattataaacagtaattgagtcgattatataaagtccatgctcgttttagaccgtggaggatggacggtagaatattctgattttgtgtcgattatataagaacaccaacgaatgaattaaaaatcaatgtttaaaaatttaaaaatggaatttgaaaagtacgccatccattttattttgtttaacgttgattatttcaaaattagacaggtcatacatttgaaaatagaggtagtacttttttcaaaaatcacaccgtataggagatttggtactaggaccagtgacataataaatttggacaagaaaaaaaatagcagttttcgttgatagctcgttctttagtccgtcgaattctatggtcaggctacctggctgacacatcagtacatcacacaagaaactcaacgctatattttaaacagaagcaataatgcaatatatccaaggataacgtctgcgtgaaattcaatcttttttctaccgagcatgcattactaatttcaggacataattgacttctctgttttttttttctttcaaacctttgcactgctatagagttggcacattcaaagaaccagcacatactggcatacaaccaacaaaagaaatgatataatctcatccaaaactgtccacctccagttagtgcataaatagcagacaagaaaatgctttgcccctgtaccgtacttctagcagctaaaatgcaaatgtgatttctgtccctgcctcaggctttcatttccccacccacattcgcattcacctcaatcacccaaacacagctgtatggtactcctagatatataccacatgagctccgggaggtgaagcagtaaatatcccaccgatataatacttatcttggcgtagaagagctcctgtgaaatggtatccgctgtcagtcgagcaagacgaattcaggtcaagcaaatggagaccctggtccatgtatgcgcggcacaaaatattgccttcatggggggatcgatcgatgttgcctgctgtcagttgtgaaatcgaaggagtggatgagtgagcgtcatctgtagttacagcagtgtgctcggcctgatgacagtttgttccagaggcacagcatttgccaaggtgactggtaatgcgccgtgaagtagttatgcacgcagccgaactggcagaacctccagctgtgaatgtactgaactggcgcggtggtgttgaagtcttcgacccacatgcccatgctcacatcttccatcttgaacaactgcagtgccagtcaggtgacaatcagatagcattaacggtatgtgcagggaaaaatgggtgcaatgaagtttcagaataagcctcacccttagggagtgatttgcatggcgtgatacgatgtctcttgcaatgtcgattgaaataacatagcctggtccattggcatatggaggatacacaaattctggccattcctgttggtacccgccatgtttaaagtaaccaaatacatgtcaatccagaaagtttacattttacaaaagtgaacatacctcgtacgtcacagcccatttaccatgccggagaggtctgtgtaacaggtttaggttacccatataaagaggcatggttctgttgtagacggagatctgtttcaatactacatccagcctcacaaaggtgtcatcatcacatttcatgatatactctgcggttacattttgcacctacacacatattgcaatagtatctacttgaggaaaaacatgcatgctgtcagaaacattgttcggagctattttgagatgtatatgacttaccccaaattcacatattgcgactgttttcagaaccaccagctcatatcggtcaataaatggcagaatgacaacatctccaaaataatctgcttctgtcttaagtgctgcatttatctcttttctatgactctacagaagcataatggtcacagacttctgttattgttattttgggaaactattttgaatgagatatgcagaaattatgtataacagcatttgcagcaaatacctaataaatgtgtagaaaattatgagacgccacaccacccaacgtgggggggcgattatatttatatagctaaatacaatagagattacaacaaactcttaaataagatatatatacatatacgagagatacttagactatacaaatctaatctaattctaataaaatgtactataatcttaagttaaaaaaatgcaaaaatagcaattatcctcaaatctaaaattgtatatattgctgcatgcgataaaccaaccacccagctacatatacacgtgaagcgcatgcaatgtcatacaaaacaccttgtaaagaacacatatgtctgcatatatctagccacaaaagatctactagagtgaaagatgagtgtaaaacaaaccattgcccccaaggccccaactactcctaagtcctcatgtaatagtaaacatgtggaggattacaaatttacaatgtagcacgacataccatacattaacaaatgcgaccaaaaaccattgccaaatcatgaaagttatcttaccagtgcaacaaagaaccgagcaaccacatttcccagttggatggcagggaactgcatccagctttttcttatagccatgcgctcagcaaaatggtttgtagcagagattatgccaataaaaacctgaattggttcctctggtactgggcgagccttccacctatcagacatttccaagacctgctggagagagaaactaggatggacctttggaagagaggttgcatatatagagtgaacgtctacgccgcctgtcacagctaaacctgtggcatcttcaagagagaatccctgataaacatttgtaatcaagacagtagttactcagtattttcactcgaagaagctagagttctgtacaaggtaacataatattggccaaagtaacagaaaatttaccatcctatgaggaaatgaggcaacatgacggcctcccacgctaacgtgatatccttcgataccagcttggatggtaagaacaaacatcttcccctctgaaaatgggtatggccatctcatttctggtttctttgctcggccgatgaacctgttcaaccatgagcctgtctttgtttcttttgaatcaacactgtctctccgatcccatttctcacatttaattaatccatccactacaaagttaagggagatcaaacataaatacaggcaaggaatcggcagtgttttaactagaagacagcattattttgggtcagatttgcacaaaagaaaccatcaaccatgaaactgcacatttggcttgcaaggcaattccatttataaatgcgggacagtttcaacttttcaccttacaatgtgcattcactaaataccctaacaacatccagagtcaccaaatacaggatagcaaaccccactaggaattagctcaccagataaaaaaaaaattggtgactggttaaaaatcatgtgaaatgtaatcaaatgccagcaatgctatcttgatccacaaatactactattagttacttccaacttcccaacacctagcaatcttcttttattagatcaaagagttagcaatcttgcttacttgtaacttgtgagcaatgtctgaagcatcaattcagcaactaagcaagcttgagcacgactaattgcaatgcaatttgaaaatcaactgtaaagagtggatagtataagggatgtaccctggtcgtcatccttggaggggttgccatcgcagcggtgcgcctttccccactgcatgcggaagcaggtgttcatctccagcacggggcggtggctccagtcgccgcgcagccgcgggttgaggtggaggatcctgggcggctcctccccctcgacggcgcggaggccgcggagctcgacggcgaactgcgccaccatcaccgtcccgttccctttcccgcgccgttccagcgccttcacgtactccggccgcgccggccgcgccgttcccaccaccgtcaccggggaacccacggcgagcccgcaggggaggaacgccaccgtctcgccgtcgccgccgccgatgttgatcgacgcggggcacttggtctcgcccccgccgtcgcgggagaggatggagtccacgtcgcccgtgaacgcgcacgcctcctcccacgccttgccgcccagctcccacgcctcgtcggccatcctctcgagctcggagaagttcccgccttgtccccaccgcctccgccccctccctccagcttcccaccgccgccgaaggatctctccagtgatgcgaccgtaccccgcgacggcgacaccatccccatcaccccgcgcgcggggcgccggatcctcgagccgccgcggcatcaccacctctcccgcgccgccgctcgccgggcgggtgacagccgccgggtcggcgatgccggcgaggccggagagcttgaatgacacgaacaggaggtacacgaaggccaccgcggcgagcagaggcgccacgcggcggcgcgcgcgcccgcggccgcccaggaagacctcggagcttcgcgccctcttcatggcggcgtcaccggcggcggcgctcgccggcgaggagtgggcggtgggtgggattccgggtccggaaagcgggtcgggatccggaatggaggtgagtaggtgggtgggtggggtggcggtttccgggtttgggattcggaaagggaggggtaaccttagcgattaattaatgggattggtgctgacgtggcagttacttataagggcacccacaatggttatctataggctctctataagagatccatgtcagcatattttcctacttggaagagattaaatgaagagagagagcaaaactatctactaacctgaagatagtctatagagaaaaacgagacaatatattagagagctatagatacccatgtagacatactattgagatggtttactattaatttagtctattgctgagatgtacatgttttatagatagcaccttactttatcattttgggtgatctaagatgttaattgctcgtgtggttaatgcagttatgcttgtgtttggagttatctctgcttttttagtaaagtggagtagtttggatgttactactagtgctaccgttattaatgctgctagtagtgatgtcttttgatgttactctgatcaatttaaagtttatttaagtaatgagttcatatgtcattactttcaatgttattataggccctatttaatttacaccaaacttcctctaaactcttaacttttcatcacatctaatcacatctaaaacgttcctactcatttaaactcctaactttttttccaaactaccaacttttcccaaacttattcccaatttcagaaactaagatgttagtgttttttttcattcaaacaatataaaattacacaaaatgagtcaaaagtattttctatgtctaaaatatagcagcccaatactccgttggtcgcaatctaatactacactattattatatttttggtacggatgaagtaagatataaacaagttgatggttggctcttgccctacatcaaacttgttcgaactttgctaggtttgagacggtgattttttttctttcaaatgtttgcaagaattcatgtggaatttatatacatatctatactgtgaagtttatactttatagggattattaaaatgaaatagacatgggcatgaattcttcaagaaaaattagaaagaaaaacatcactcgcgtgcaaagtacaatatcaatccagttggaaaataaaataaatacaagttggaccatcatgtggatcaaaagtgcagaatgccgtttatttaattaatcaaacgagtcctaaactatataaatgactaagtataaattcaataatgcattcactgttaattactgggaacagaattttgtgattgcatagcagcaaacaactacaaacaaacatgcagcataatttgtgctgcttgtactgtcgcggtagccacagccagcttaaatttcttgcagcgaaaactagtgatcgaattgcatttgaaagattgtatacatgaaaacgtgtttttttagttgaactatagaagatgatgtcattagtgtccacctgccgggctctctaaacacgagttaaggatgtacttcctctgtctcaaaatgttgatatctaggacagcatgtaaaatctcatctagatagcaacgttttggtacggaggtagtattaatggttgtgtgagtgtgttacgtgaactaattagggcccctttgaatcgcaggattgagaaaatagaggaataggaaaaacgtaggaattgaattcctatgggattttgaaacacaggaaagtcttcaaactgtcgtttgattagcacacaggaaaaacgcaggaaccttagacacatgaaaaggaaaacatgaggtgagacctcgtgctttttttcctccaaaattgctctagtaaggttcattccataggaatttcaaagaaattgataggaaacaatcctttgtttcaaaggactctatagaattatttcccataggataaggcccctttgaatcaaaagatttatgtaggaatttcatagaattcaaatactataggaaattttcctatttggccctttgattcaaaggattgaagctttccaaatcctatgaaattcctatggaatggcacattgcgggcccctttgaatcaaagaatttatgtgggaatttcataggattcaaatcctataggaaattttcctatttggccatttgattcaaaggattgaagttttccaaatcctatgaaatttctatggaatggcacattgcatatggattttggaggaaatttagcaagagctccaacctcttggaaaatttcctttgagtctatctctctcatccgattcctgcgtttttcctgcactccaataaaacgaccattcctgtgtttttcctatgttttgcaatcctctgttttacacttcaattcctgtcagaatcgtgtatttttcctattcctccgttttttctaccatacgattcaaaggggccctgcaagtggatcttggaggaaatttagcaagagctccaaactcttggaaaatttcctttgagtctatctctctcatctgattcctgcgtttttcctgcgctccaatcaaacgaccattgtgttttgcaatcctctgttttacacttcaattcctgtcagaatcctgtgtttttcctactcctccattttttctaccctgcaattcaaaggggctctaaaatcttctagaattcctatggtttttctttgattcaaaagggggcttaaagaaaatactgatgatacggtgatagtagtatgaattgcaatttgcgaccttgtcctttcctagccagcaaatgggatccagccacgtgtccacgacaactggcagttgccttccctctcatcagagcaagtttaatagtatagccaactattggctccaattcatctatagccaatctaatagttcattcatacaatagttatatactgcactattgatacttggccccacctattatacacatactgcgtcttggagttcatgctacagctggctataaatctatagctcgctatcattctctctccttatttatctcattaaaaatatatttacagctagcttatagcctactattgtacctgctctcatcacgcatcgctgttccacctcatcagagcaccagaaaggccacgcttgggccgggcccaccgatactttcagcccggcccacacatgcgaagaaggcccccacccctgcacgacacgtcacctcggtccagtgggccccacgcgtcagtgggacccgcgctggcagtcgggccgaccaccacaacacgagccgtcccgtcgagggggtggggcccacgcgcatcggacggcccggccgccgtgcgctccgtcaggtcccatcgtgtcggcgccgaaccaagcggcatcgcggggccggggggggggggggtgtggttgccggcggtggtaaaaccgtaaaaaggtgaaaggaaaaaataaattgaaaaggccttggagcgtgtggtaaaaaagaaagggaggtcggcagggggtgaaactgcaaggctatgttataaggggaaatgagaggttagattgagattgaaaaataaataaagggttaggattaaatgaaagagaaaaaaataaatggttaggatttaaagatgtcttttggtggatgggaaattatttttctaacccattagtcaacaaggcctaaaagataaaaggctcccatcctaatcagccaaaagaaaaagacaaatttaaattttcaaacttaattttaagattaattttgagatattttcaacgtagtttcttttttttagctttagcttttaagtcacaataacacatatataaaaattttacctataaatctatgtttattttctaataagttgttttggcttattaggaaaaaaagacaaaaggccgaaaaaactgaacagccatgcatgcatgggctggttgtactgggaggagtgtactgtagttcagagcattttgctatcaggtgccagctgaagattttgactacctctgctcttaaattggagtgctcggcctctaatcatctgcttgattttattagctacagcccaaaatttaaatttaaatttcaaatttaatgatgaggttttattatagattattttcttgcattagcttttccgtagtaataactgctaagagaacatgctacgcatataaaagtttgcctataatctattttggtaaaatttactacgtggcacttaaatgtacggtctttgttaagagacactgcaccaacatgaatttacccgaagacactgttgttgtgatgtctcctaacaaaatcagtatttctaagtgttccctgacaaattttgccaaattattttatgtgtttactttatctttccatgacttatgatgtagatcaatcaatagtaataagttcttttagttttgactgctcgtccttttttaaaaaagaaatagtatatacttaaaaggttgttacatattagcaatatgtgtcatgtcataaatacaacttttgtcaacaataacaaattaatcgtataaaagttactcctactaatgagtaaggttaagatatcgatggtaaacagtgataggtaaacgagacagcgcaactaattgaaagataagcctagagagtgactggctgcactgctgctgctcagtacaaataggattactactgtacttcggagtacaaaatgtagtagcactagtcatgactactcctacatacttagatgtgtttagttcacattaaaattaaaagtttgatagaaattgaaataatataacggaaaagttgaaagtttacgtgtgtagaaaaattttgatgtaataaaaaagttaaaagtttgaagaaaaaattgagatctaaacccaggccttgggagtactatacagtcgaaggatttggcaggaacagttgaggaaatcaataacacaagaagtccttgtcattagtgacattgaagaactgtcttttcgaggtaattaaatggtgagatttgggaggacgcaacaaaccttccatatggtgtgcactgtacagtactcattagtatttgcgaatagggggttatactgtggcaggacgtcctcgatcgtccaaagcgtgaaacttgcatggagaggtctaatgcaagtttgacttgatcgtttgatgataagccatggtgtgtacaacatttgaacaatggtgttattcgtttatactgaaaatgaaaatgaagataaagttaaagcaaatttaaaaaatattagtataaaattaattaagttttaattattatttacttgagaaatagaattatctgttttttttaaaacaacttctgtacaaaaagttttacataaaatatcagtttgaaaagcatgctagaaatatatgttaatcaaaataaaatagaccaacgtaaatcaaaggcacaaggctgatttcgtttaggggcaacgtttatgtttgaaaacggtaagtactaactgcacatatatatatatatatatatatacatgtatatatatatatatatatacatgtatatatatatatacatgtatatatatatatacatgtatatatacatatatacatgtatacacatgtatatgtacatatatatatatatacatatacatatatatatatatacatatatatatatatataaactacctccgttttaaaatatatcaatttttaactttgtatttagatataattttatcaacgtatgtaatcgtaagttgttttttaagcgtaatcagaagtatgaacagctgaaaattgaaatcagacaccacaagcgaactgcacggagtagaaagctcgcacctgttgcgcagagctacagaggcgatccacgccgtccatctcccgatcggacggtcggcatactccccgagacacgggcgcgaggaccgcattaaatcgtggtccacgcgcggcatggtggtgggccccacactccggtggggaaagaaagggacgaatcctcgtacgccgagaaacgcacgggggtgggggaaaagaccctgctgcccctgcacgtgcccaccccgccagcttgggcctcgggatggctcgagccgtctgggccgtccgattgtactgcggtggtgttggttccacggatctcgaggcggagcgtcgagactgccgcccaagggtggggtggtaatttggtggagtactacttcaacgtcacttgtacaggaggagcgtggcgtgtggtgggttctttggcttgcatcttaggtaggttttttatttgcgaatgagtccttggatacctcgcacacatcgagggcatgtttggcacagcttcagctcagccaaacaatttcagcttcacctaaaatgaaagtggggctgggtgaagctctctcacaaaatgaactatagaggtggagctggatttatacagctcacaacttcactctagacctaactcctaaagcaaatttaggagttggagctctaccaaataaactatgacttgttactctaaacagtactacagaacattaatttcgctatggtagtagagaagcactcgagtgaattttttaaatttttcaagcggtagataaaattttttgtgtatatatcccgagtgacttaaaaaccaatgttgaacaaaattatactacagaacattaaaatcaactccagaatcaattgtccaaatcaaattttggcaacgtcttataagccatagggcaaacgatgaggtcctatgttttgtcgaaacaaactactcgttgtaaaattgttgtgttaattttaaaactgtggcggtaggacctccgttagcacagatgatacttcaagtaaaaaacatgtgataacaaatcgtgtctagagtattagttgacactatctcaatttctttcagaattaacatttgaagcaaagtaccccttggccaattgcaccgcatgctagtttcatctgttttggaatataggataattagagaaatcttggagaattgaaatagtacatgaatgggtcaagtgacttttactaaatattttaaaattcctatgcaaattttagccgtccgtccctcccattcgtcaacctctctccccgaaaaaaacaaaaaagtacccatagagaaaaactaaaaaacactttgagcaccattgacccataaacatataaaatcattgacccatcatctcccgatggacatgtccttggttagcggaaaattagcaagtattcccttcgtttcagattacaaaattgctttaaatttgactaaatttatagaaaaaatagtaacatttttaacccataacaaaattattatgaaaatatattcaattattgatttgatgaaactaatttggtattataaatattactacatccatattttaatgtataacgccgttgactttttttccaacatttaaccattcgtcttataaaaaaattatataattatcatttattttattatgacttgattcgttatcaaatgttctttaagcatgacagaaatatttttatatttgcacaagaattttgaataaaacgaatggtcaaacattggtcaaaaagttaacggcgtcatacattacaatacggagggagtactatatttgtctataaatttagtcaaacttaaaacaatttaactttaatcaaagtcaaaatgtcttataacttgaaacagggtgagtagtaagattttatcgttgtctagtttttatattagtgtaatcaaacaataattttaaaatttcctatgaattcactccacacataatttaaacgacgcatgacctacggggctgtttggttggtggcctcagtttgccacaccaaactttaagcgtgccacaattttttagactagtgtttggttgcgtgccgcagttgagtcaagccacactttattaacacattggcccaagcgtcatactctcatttgctagccaaagtttgccatagttatggttaacaaattgttggccacactttgtgtggcttgccacaattatagtaaatagagttatggcaaagttagcctccatccaaacagcgtttccaaggaacccaactccaaagaatctagtcaaagataccacaacccgaaaacaaaaataacccatttcaaaaggggcgacttgtaatttgtagcagtggtaagaaataaatctgacctttttcttttcatcagatttgttttactacctccaagaagctctctctccgtttttcttctcttcctactaaacccctcaaaacggaaagaaaaaaagaagaaaaaaaaaactcgaccaccacctccaccactcacacctcgatccggccatggcggcctagccctagcacctagggttcgcgcccccaccaccctccccgccgtctcggagaccgcgcgcccccagctcccgcctcgctgtcgcgccgcctgattccgccgccggcgccgaatgctacgccgtttggtggtggtggtggtcgtcgtcgcctgattccgcgatctcgtgagctccggggggtgcgcggttgcggcggcggcgcctgagaggaaggctggactcgtccgcggcggcggcggctgcgggctagtgtcggtggcgatttgagggcggcggtttgggttagccgtcgccgagagtgaaggtgctgtgttttgagtgcttgggatgagctgcgtgttgatctgatgaactcggggtcggcggcgttcttcggtttctccgctcacttgctcccgccgttggcgaaaatccggttcttcggatcgagttgcggtcgcctgggtgtttttcatcagttttgggtgaaaatactcgagctctgaggggggtgattggtttccaagtttgattgatttaaagagtttgtgtggaattttttcggggagatgaaggggaggatttgctgcgacggtccaggttttggttagttgttgagggagaaaaaaatggaagatatttctgggcgcaagagaggaaggcaggtgtttgctgctgctgctgggagcatgatgggaagctgaccagcagcttctccggtatcctggtgcggcggagtttcgtgctctttggcgacgggtgcactggtgattggagatgaagctctctccgccggcgtcggcggatatgccgcaggccttgccggagaacgacggtatatatccttgctcacaatttcgacattgtttcagttctgcactttctcagcttgtgttgatgcctgcattgtaaagtggattatggatcatggagctttgtgattctgcactttgagttgtttgtgcatgattacataatgcataaatgagtctccattgctgccttgcacacactccgcacatacacacacaaagaaaaaagaaagaaaaaaaaagaactactcctacattacttggctctgttcattgccctcatgttataacattatttgatactgactgaacctcctactgtctgtgggcaagtacaaatagtagcttcacatgaacttaactttctggtggtttgctgttcagctcatgtgtgtttggcatgttgcaggggaacaaagatgtctgaactcggagctgtggcatgcatgcgctgggccccttgtgtctttgccagtggtcaggagcagggtcgtctactttccacagggccatagcgagcaggtcagtcacttggtttgtagtctgtgcacatctctttcattatgctaggcatggccggattttgttgactcgaatttactagaatttataaaagaaggtagaacagctctgcttttgcatttgtgcatcagtacataatagggcagaggattgtctttattgtttgctcagtgcatcattaaacttaatatggcagaagaatgaactgaaactgtactgtctaaagtaattttagttctgtgcaggttgcggcatcaactaataaggaagttgatgctcaaatcccaaattatccaaacttacctcctcagttaatctgccagcttcataatgtcaccatgcatgtgagttcactcttaaagaaaccatcatgtagcttcttaataagcagcttatgataattcacctggtgcttttgcaggctgatgcagagacagatgaagtttatgctcagatgacattgcaaccattgagcccggtatttgaccactgctttgcacttctagccttatttcttttaaaagggcaaagatgttacaaggattatgtatttgtcatgtaatcctgttgacaggaagagcaaaaggagcctttccttccaatggagttgggtgctgctagcaagcaacccactaattacttctgcaagacattgactgcaagtgacacgagcactcatggtggtttctctgttccccgccgggcagctgagaaagtcttccctccactagtatgcctttaagctcagtcttttttttggtaggaaatgttcatttgctatgtgttcttcaaattgactcctttagttctctgtaggatttttcacagcagcctccggcacaggagctgattgcaagagatttgcatgataatgaatggaaatttcgccatatatttcgtggtatgtaactatggccgacacacatagaactgattatgagttgtttgtgtacacaaaaaaattgacataaaatcatgtactatgccttttagatagcatttccattagacatgacatctatccgttttgctcttttttctttgttgccaagatctgtttttgcatttttatctggctaagaaattacctggacatgctataatgacaatactgcaactagcctccttctgttcctgccttgcagaattgttgaattatgaaattatattgtgagggtatcttcttctattgaactttcaattggctatgcatttgtcgtgcaggtcagcctaaaaggcatctcctgacaacaggctggagtgtgtttgtgagtgcgaaaagactagtagcaggagactctgttatatttatctggtaccacccactttattccttatttaaattgtatactgttgctagaggttgtactcattgctgagacttaattacctttatcatttttaccaggaatgataacaatcaacttcttttgggaatacgtcgtgcaaatcgccaacagactgttatgccctcttccgtgttgtcaagcgatagcatgcatataggtcttcttgcagcagcagctcatgctgcagccacaaatagtcgcttcactattttctataaccccaggtaaatgtactgcaatcttacagcagagcctttaacgttttattttatttccatatttaattgacatgggcattctttttcagggctagcccttctgaatttgtgattccattggccaagtatgtgaaagctgtttaccacacacgtgtatctgttggaatgcgttttagaatgcttttcgagacagaggagtcaagtgtcaggcggtaagctgatattaagcacacagcatgaaccgtgaaagctccattaattcttatatttacctcttactttcagatacatgggtacaatcaccagcataagtgatctagattcagtgcgctggccaaactcacactggcgttctgttaaggtaatatctgctaaatatattttgtggtctctacagaaatgatgttatcttgttccattatctagtagtctgtcaaatctgttatcacatccctcatggatccctttctgtggatatgttttccttgtgatttttttttcattttggatttatggcacattaggttggttgggatgagtccaccactggtgataaacagccaagggtttctctttgggagattgagcctttgacaacctttccgatgtaccccagtgcttttcctttaagacttaagcgtccgtgggcttcaggactgcctatgcatggcatgttcaatggtatgctgattgatggccggaacactagcacgcataattctaagagcatactctttaaccacttctttttctgcaggtgggggaaatgacgattttgcacgctattcttctctcatgtggcttcgagacggaaatagaggaacccagtccctgaattttcaaggacatggagtctcaccatggcttcagccaagaatagattctccattgctgggccttaagccagacacgtaccagcaaatggctgcagcagcactggaagaaattcgatatggggacccttcaaagcagcatccagctactctgcaataccaacagactcataatctgaacagtggattaaattctctgtttgcaagccatgttctagggcaggtgcagtttcaacctcagcagtcacccctgcaagttgttcagcaaggccattgtcagaacactggtgactctgggttccttcaaggtcagcttccacggctgcagttgcataacactcagcagctgctaaaggagcaagagttgcagcagcagcaaagacagcatgttttacaagagcaatctagtcaagagatgcaacagcagctcccatctagtgatcatcatgttgctgatgtagcttctgagtctggatctgctcctcaggcacaatcatcattgcttagtggatcatcattctacaatcagaacctcttagaaggaaatagtgatccccctttacatctacacaacaatttccacaacttctctaaccaggaagcctcaaaccttcttattttgcctcgaagtagccaattaatggcatcagatgggtggccttcaaagcgattaactttagaatctgctgttcatcctgaagctccgtccatgcaccccaagattgagaaagtaaa

SEQ ID NO: 5499 - DNA, 3888 bp, Oryza sativa
tgaaagcttacctcacttcccccctgtcttggtagccctggggccggagaaaccattgctactctacttggctgcgaccccccatgtggtgtgtgccaccctagtagttgagcgcgaagaaagtgaacgggaggcccctctggctcgcgatggtccctcgtcctccgaaggcctagtgcccaaagcccctagcccccgggagggcctcgaggcccccgagggaggaggggaggctttggcaagtggccccgagcccgaggtgacccgggatccccccggggcccccgagcaggggcgccccgggtcacctgcccctgacaacacgaaccggccccgccgaaaggtgcagcggcccgtctactttgtcagcgaggcacttcgagatgcgaaaacccagtacccgcaggcccagaaaatgctttatgccgttttgatggcctcaaggaagttgtgtcactacttccaagcgcatcgggtttccgtagtgacatcgtaccccctcggccaaattttgcacaaccgagagtgcactggacgggtggtaaaatgggccattgagctggctgagttcgatttgcacttcgaaccgcggcacatgatcaaaagtcaagtcctggctgacttcatcgcggaatggaccccagtggacgaacctgttccatccagtgtcccttttccccccggagaggaagaggatccaaacgccgacattcgtggcgggcactggattatgcatttcgacggctccctcaaccttcaaggtgcaggtgccggagtcacgctgacttcgccaagcggagacgtcctcaaatacgtcgttcgactcgacttccgagccacgaacaatatggcagaatatgaagggctcctcgcgggattgaggacggcagccggaatgggcatccgccgtctcctagtcctaggtgactcccagctggtcgtaaatcaaatatcgaaagaataccagtgcaccgacccacaaatggatgtatatgtccgcgaagtacggcgcatggaacgccacttcgacggactcgagcttcggcacgtgccccaacgcgacaacatagtcgctgatgagttgtcgcatgttgcgtcggcacgagccccactccccccggggacctttgaagaaagactcgcacaaccatcggcgtgaccgaaccccttaagggaccccaacgacacgccctccgccctgacccctggcgacccgcgcccctcggggcccgagggggttgaccccgacccccctcgtcaggtcgtgtggatgaccgatatctgggcgtatcttgacggcaatactcttcctgaggatcgcgcagaagctgaaaagctcgcgcgcatctccaagcggtacgtcctcgtagaagggaccctctaccggcgtgccgccaacgggatactcttgaagtgtgtttctcgagagcagggcatcgagctcatagccgacacccatcagggtgagtgcggggcccattcagcctcacgaactttggtcggaaaagccttccggcaaggcttttattggccgactgcattacaagatgcccaagaatgggtccggcggtgcaaggcatgctagttccacgccaagcagacccaccagccggcccaagccttgcaggtcatcccactctcttggccttttgtgatctgggggctagacatccttggaccattcaaggcggctcgaggcgggtatcagcacttgtacgtcgccatcgacaagttcaccaagtggcccgaagcctacccggtcgtcaaaatcgacaagcattctgccctcaagttcatcaggggcatcacgtctcgattcggagtgcccaaccgcatcattacagacaacggcacccagttcaccagtgagctgtttggcgattactgtgacgacatgggcatcaaattgtgcttcgcctcgtccgcccaccccaagagcaacggccaagtcaagcgagccaacgctgaaattcttaaagggctcaagaccaagacgtacaacgtcctaaagaagcacggggattcatggctcgaggagttgcccaccgtgttatgggcaaatcggaccaccccaagccacgccaccggggaaacgccgtttttcctggtgtacggcgccgaagcggtcttatcctccgagctttccctggggtcgcctcgcatcgcgctgtacaatgaggccacccaggatgaccttcgccacgacaatctcgattatctcgaagaacggagaaggcgtgcggccctacgtgccgcgcgctaccagcaaagcctgcgacgctaccatcagcgccacgtccgggcccgatcactgcaaattggcgacctcgtcctacgccgcgtccaatcgcgcctggagctgagcaagctctcgccaatgtgggaagggccatacaaagtgatcggcgtgccccggcaggctccgttcagttaaccacggaggacagcacagagttgcctaacccctggaatatcgaacacctccgtcgtttctatccgtggcatcgagagtttttgctttccaggagctcgggccaacccccgcacaacccctcagtttgtgcaggcttggctgggggctaccactgtgtatcctttttccttttacaagcaatgaatttttctacttttttgtgaagaccgttcattcccttcctctggcttgtcctggtttaagggataatctgtgtttactctgaaccctaagtgccgtagggcggcctgaaaaccgccaaaagggagcactaaagcgggccacgccccgggttgcgccgaaccccaggggatcggaagggcctacacacggccgtccccgacccccggtcgtcgcagccttggtctggccagtcccgctgggcggctccctcggggcgacggtcttgcctatcaccacttaggtaccatggaccgagcgtggatttaccttcttgctagaacaagcccgagggggggggatggggtcaaaacggcatttcgatcacaggcagattaattatacccttttgctctggtttcttcttctctctatgtcacagacatccgatggaaaaggcaaaagagtaaaggggactaaggaagttttagttgcagaacaagacaggacgacacgatggcctaaatacaagtgcccgctacgggcacacaacaaaaggggaattgaaagcgcgagtagtcacggagtgtctgggcccccgaggccggcgccgctgacgacgtcgtcccagtcttcgtcgcccacgtcgtcgttgtcacccccgcttctgctctcctcgtccgaggcgagcccgaaggcgaaccggggggccgacccatcgaagttcgagacaatcgcgtcggccgcctcccggacttgctcccgggcccttgcctcggtccccgggggaaaatcttcgagcgcgcgccatgggacgaagtcaggctcgcgcgcttgatggctcgcgaggaccagctccactgcagcccgtgccaaagaagctgacgacaactttatggtctcgccgacctcctcctctagcctctccagatctgccgccagctcgtccagccggagcatgagtgctggctgtgtgggcggaagtttgctatcccggcgcacagaaatgccgactcggcgccccgcgcgctccagccggtcgacggcgtcggagagctgcccgggtccgatctcgttggtgaggcggagggccgcgatctccccagcctgatcttgcaccaggcgctccaggtcggcgagggtattttgagccatggcgagctggctcgccaaccccacgccgccgagcggcccgcccgctgccaagtccttctcccgggcctccagctcggaagccttcgccgctattgccgcacgctcggcgggggatcctctagagtccgggccacgcgccc

SEQ ID NO: 5500 - DNA, 732 bp, Oryza sativa
acggccaagtcaagcgagcaacgcttgaatttcttaaaaggctcaagaccaagacgtacaacgtcctaaagaagcacgggaattcatggctcgagaagttgcccaccgtgttatggccaaatcggaccaccccaagccacgccaccgggggaaacgccgtttttcctggtgtacggcgccgaagcggtcttatcctcgagctttccttggggtcgcctcgcatcgcgctgtacaatgaggccacccagaatgaccttcgccacgacaatctcgattatctcgaagaacggagaaggcgtgcggccctacgtgccgcgcgctaccagcaaagcttgcgacgctaccatcagcgccacgtccgggcccgatcactgcaaattggcgacctcgtcttacgccgcgtccaatcgcgcctggagctgagcaagctctcgccaatgtgggaagggccatacaaagtgatcggcgtgccccggccaggctccgttcagttaaccacggaggacagcacagagttgcctaacccctggaatatcgaacacctccgtcgtttctatccgtggcatcgagagtttttgctttccaggagctcgggccaacccccgcacaacccctcagtttgtgcaggcttggctgggggctaccactgtgtatcctttttccttttacaagcaatgaatttttctacttttttgtgaagaccgttcattcccttcctctggcttgtcctgg

SEQ ID NO: 5501 - DNA, 13116 bp, Oryza sativa
  unsure (1)..(13116): unsure at all n locations
tcccacgcgccacgggatcgtttcctggagaggtgcgatgcggcggcgaaagtaaacgccaaagaccattgcccccgtgaggcccaggcttcgtaggcccctgaggcgatcccacaccgtgtcgtattcctcgccaagctccgaaaccgccagccatgcggcggatctttcaggaggaccagcaggaactcgaagtcgcgggtggtctggcaatgcggtgtagaaccagtctgtaacataccaaaaattaaccattttctaattctgtatcatgctgagtcttatgttcttaataacttcctaaacctaggaaaatataattagagggaccttttaaaactatcttgcataaaatatctttctggtatttaacttcttttgtgtttttcatttaaaatacatgtggttgaattgaggtatttcttgctttggtttaaaaccttcttttgactaaaatttctttattcaaaattagtttgaaaaccctttctattttttttatggattatggtccaagaaatcctccaattttgcccttgaacctaaaccaaagtaattccaatctcattggaattaattgttagcccatcctttgatcttaaacccatcctttgattctcgatccaaatatccaaattcctccttttgatttagccaccaatttaatttctgtggcttgattttctcttcggcacaagaatagtattatttcaaaaattgtgaatatttactcttgtgctaagaaaagtccaatttatattcttcactcaacttccccttttagccacaaatatacatcacaccaattttagagttcaaatcctatttattatcttcaactaattcccttctatattcccaaaaatatttgaggaatattattaatttcccttcctatttgagtgcttccaaataaattccctcaaactccacctctaaatattgcactcaaataaattaggaaatctcttttgtgaattctttccgaattcgaatcctttgcaaaacctagttatccaaatcaagtattcaaattagacttcctttctttttgtcatcgggccgaaactccattctttcttccttttggtccaatcccttttcttttctattttcctcctatttcttgggctgccggcccagctaagccgagccggcccaaaccagcccacccacccagccgagccgcctcctcctcccgtgcgcgtgccgtgcacagcgcacgccgccgccaacgccttccctcgctgcgaagtaatcggccgccgtcattcttttcttcacgctaccgtcgtcgtgcactccttgacctcctcctccacaaccgcctctctccaccgacgtccgccgcctataaatagccggccatccctcctctttttcatacaactctctctctctctctctctctctctctctcttgccatgcccggccgtcgccgtcgtcggtcgatctcctcccctatagcttccctcctagtttccttgcaacatcggcttcgcctcgctccggcgagcccatttttcctgtttcccccttctcccccaccccatagcaaccaccactgccacctctctttgccgccgaagacaagctcttgactgcgccgttccggccaactccttcactctctccaacagccaccgccctccccgggtgtgtcttgctcgggaacatgtgtggccgctgacgtcgccgccttccaaccgccggaaaaccggcgcccactctctccctctcctctgtaaccggcaggaagaaggagaagaagagaggaagaagaagacgagagaaggagagagaaaaagaaaagaaaaaggaaaagcattgacaggtgggcccctatacagtgtcttttcgtattttctagatttaattcaaatcccaatctttagaagcccatatctcctaaaccatatatccgattccagtgaaacttggacctaaattcatctaaattcaaactcttcattttgataccaaattttctattttaagattttatttgaatttccttaatttattcaaatactatttgaataaatatttgattaaatcttataattgaatttacaacttaaatttatatttgcttttcaaatattttcttttattccaaattacccctttagccactaaaaagccgccggttggaactttacgccttccatggggacgttcgcggtttactatccccgacgtcggaccgttggttgtaaagcccggcaaaaaccaaacctaaggtcgaagtgctgctcctggcaccctacgccttgatgcgtatagcggtcggagcttcactattccctcgacctccacagcacgccgcacagttagctcttgggctctgtgtgatcctagccgctccgccgccactcacggttgtaagagtaacacttccgccccactaaacccacacaaacttcctatccctctagccgttatgctatctgttgacaccggctagagaagataccaattctagtcgttatactgcccaactctagcaacgactagcaaacacccaaatcccagccgatattcatcctacctcgatatcggctgcttaatcaaatgaaaccccagccagcctgctatccaaactccataccaaccatttacccttctactacccatagcctatgcatgaaatacgagccgatatgctatcctatttcagcatcgactcgagaacaactaaatcctagccattcttctaccaaagcccaacctcgaccaatgctagccacatatccacttaaccagttagattattcggtatatcccctattctccaagaaaccaaaaaccacacataaaatataagtgacaattgttacttaatcccctctagcctccaacccttcagaacctacacatattagcccagtaatccctacaccttataaaggagataggttataccctaaaccctagcccttttagttgtttatcgttttcttgttattttatggattttattgaaattggttcttcctctttcttagtagagtctattttggatggcagcctgtgatatttcgagaatcggataatcaggttgcctatctcggatttatttgcgttggagcaaggcaagttattattcctccccttgaacataattaccctatattctatatttctattctatgcattagccattcatgattttgaatgcataacctaaacatatagcaaaccagatatgctaacttttgctcagccctgcctagttagactgcataaaaatataatgaatttagattgggacagtacgtaagatttggttgatttccgggtggctagtactgtctcagtagatataagtttaccaaatacttatgtcaaacgaacgagtacgaccgcagcttctagaatggggacagacctagatattatgttaattaacaatgtggtacctctgtacagtggttccttttgtaagtcctcgcgcaggaggcaatcttatgccgagcagggcatcttatgatatttaccgaggcgcaggtaaatatactaattttcgctcatgagctgtgtgtgattttatggaaacctggttgagatgacatggggtctctcatccagttctctctaaaaaccccgggaacgccagaactcctctcgccgctgataacattacgttcagagcgcatggggagtagagttcatggaataggtgccactattgttaataacctaatactgggccatgactaagctaatgaatattggcaagtcgtggactgtgggtaaagcgtacatctactgcagtagaatatttatgaaactattcgaatagccgtgctcacgaatttgagcatcgggactcatatggtatttggttagaaacttaattccagattttattaaatactgttgcatcaaacacattgcaggatttctccttctatattctctgctttctgcaagtaatcatagctctactcaaatactactaattcatacattcatattgaatataatagcttgctgagtacattgtactcacccttgcttcaacccccttttcatagtcattttggagttcttatcgaagccgggaattcaatcacataagttagttccctttaaacctagtcttgaaatctagtattgttagatggtttaactctatagcaaaacattagagttgatttattctatagcttatgctatattagttagccacaagtttgtaaatacccatgtatcttataataatatctcctctagagccttgttcaaatgtatgcaatgaagatccagattgttgaacctgtatcaatctactggtccagggcttgatacagtctaaacatgtcggtttccgaatcattaattttgggacccgacacagtccttcttccaatcctcccatttcttgcggagatgactctcgatgtactgccccgccgtgcctggtcgcggctggaagtagcatccccccaccaccgcaccttgcagcagctgcgggatgaagaaggcttggaacagctgcatcgtcggccgtaccccgatgaacatctcgcacagatgcgcaaagatggccagcgtcatcactgcgttgggtgcgagatgcaaggcatggatttcgtagaaatccagaacctcatggaagaatctggagaacggcggaatcaagccgccatggcgaaggacaacaggtgcacggatcgctccggatatcgcggccacgattcccccgccctcacaacggcgccatccggcatgatcttgcgggggaggctaaggtgcctatctaccgtaatgcgggaagaagggagcactgtgtcgccagcatcttgagccatggtggccggcggagcagtggcggagagcgcaccgcgcggaacagtgtgaagtggcgagaatgttagggttcgaggagcgagaggacgagtgggcggttggcgaaaggaaggaggcgaagtccctgcctccgcccccttttatcctcgtctcatccgcgctcacctcctcgtttcacgccctcatcattgcccccacgatcctcgcgcccgcagttgtctcttcgtttgccgcgcccactcatcacgttgcccgttgtatccgtgtcccgcctttagtgcgcctgtcagtggcacactcgaggtggaatacgcaacggccatgagcgcgagctgagcgaaccgtcaccactaccgccgcgggagtagcgggcgagggaatcgaggtgtggtctggccgaccccccggttatcgcgcctcaagcatcctcatcattagcgcggtcagtggtggtcaaaccgctgctatggttggcacgccaacccggctgctaggcaactttcctttcgattccccgacgggcccacaaccccagcttgagaagtcgtgaggcaccatgtcagaccgatctcaggaagccaatgtctgatatggtgccgggggctactatcggagatatgggcccgggggtatgtgaagtaaaggggagttaccttcccgtccagccacgtggcccggcaagctggccccacttacgcacctcgcgagtcgcgaaagcggcggggggggggggggggcctcggggcgcaacgtcgccccctcgggctctcccgttgcttcccccgagaggcccttgcccggctgccacgtggcagggggagagagtgagagggggacgcaggttgaacagccataaatgtgcggcgccccaactgtccctcactgcatttaatgcggtaagggcagacgtgtggtgcgcctaaccgacccctgtcaatcggatgtgaccagtctgtgaccggcctgttgccggtcatgtccggttgaacgggcggccgtgcccccacgtcgcctctgtctccggcggagtgggggtaggtatgacccgtcacgtcatagcgtcactcgaaggagggctgccacaagtcttcactcttttatgagggaatgacagggctgtcccctgtgtcaggcgggggacggcgctgggacccactcaaggaccggttgctgcttagcttccgggggaaggcacggattgaggcccggtcaaagtggagcggggtccccctcccatggaggggtaggtataggcggtgcatgtggtatccccttgagctataaaaggaggaccttgcccaccgagacaagaggacgactatcagaaaacttgaactctaggagaaggaaagcgagagcgctctccagagtaaaggatcctttgtaaaactcatccataatcccaaacataggagtagggtgttacgctccatagcagcccgaacctgtataatccgattgtgtgcaagctagccggtagtcttaggggcgaacacgtgttttccaagaggcgagcctcagcccccggccgaactcacgaaaggggggtcttgcgactccccgccatcgaggatcttccctcgacaagactctattccaagcagcaaaatgtttccttttgtaagaaatatcataccctctccaaagacagtttcttcttgcagagtcaatggccaaaataactgtttttggcagttgcaaagagcacataaagtatgtgggtattgcagataagacagaattgatgagaattagccttctctcataatgtaaaaaagtagcactagaagttaatcttcttttaattctatccgccaaaggtgcaaaatctatcactttgggcctagtagttcccataagaagacctaagtatgtgaaagggagagttccaactttatagtctaaaaggctagacaacagctcaatcttatcttcagcaacattaagaggataaacattagacttatggaaattaattttaagtctagtagattgagcaaaggtattcaacaaagctttaacacaaaagaattccttctgatctgccttcagcaagataatggtatcatctgcatactgaataactggaaaatcactttcatcatcaggcctaataggtttagttataacccccaatctgcaggcctcattcaaaatagcctgaagaagctcagctcctaaaacaaaaattaaaggagacaatggatcaccttgccttactcccagtttacacttgaatccattgctaggtactccattgagtaacacaactgaactggcagaactaaagatcatttcaacccaatttaaccatttagcgggaaagcccatatgtctcataatatcaaggattgcaccatgctcaatggaattaaaggctttttcaaaatcaatttttatgataacaatctttcttttagattgttgacactgatgaatatattcgaaggcccaagctaaatagtcctgaattgtcctacccttgataaaaccatattgattctcatggaccaatttagttataactccctgcaacctattagccaatgccttagtcagaagtttgagacttatattcatcagagaaatcagtctaaaatcattcacaacctctggattattcttctttggaaccaaagtaatgaaggaagaatctatggactgaatatcaacacagccttcataaaaatgtgccataagcctgtagaaatcttctgcaactataggccagcatcttttcataaagaagctattaaaaccatctggtccaggggccttacaaacaggcatccttttaaccaaatcatcaatttcctgagtgaaaaaaaggatgaactagagagtctaggtttgttatcctctgaaatagactaggaagattgaaagccattttggcatcagtggtagtacccatttcgtctttaaaagacatgtaaaacttgctttttctttatgagaagtgactatattacccataccatctgaaatactagaaattgagttcattctatatctctcagtagccatggcatcgaaaaatttagtattctcctcccccaaaaccatccatttatttgtacatctctttttccagtacttcctcctgtgagccaataacttaagaatgtgcctttgaattatttctctcaaattccattctgacaagatcaaaactctatattcttcaatcaggtccatgaagtgaatcactctacagctgttttctatcaacttattgaggagcaaaagatttttactccatttggaaagggccttatacgagatgcattttgcaagatctttaaaaccaggatcaatcgaccaaatagaagccactctttcaaagaaaccatcaacatcaacccaataattctcaaaacggaaaatattacacttcgggatttttgttttgatcttaacaacacaagggacatggtcataaattactcttggcaaaggaatgactgttgtattaggataagaagagtccaatttggagaggtaaagaatcaatccagttgttccaaaaggggatattgttgcatattactccaagtaaaggctcttcctttaatagggagttctaaaactttaatagggagttctaaaagacccagagtgtttatgatatcatttaaaataaaaatatcattcatatcagctcccattttatttctattttcaattgatctatagaaattaaattaaagtcaccaaggaaaagctagacatcatcctgatccatctggaagtttcttaaccaagatacaaaattatccctctcctgtccactacaaggaccataaacacaagcaagaaaccaagtttccttgttctgggtggagacaaattttaccaaaagagcatgatcagtgcttgaatgaatatcacccttaaaaaacttactaatccaagcaacaagaatgcctccaaaagcccctctggaagggacaaaaagaaaactatctaacttactaatccaagcaacaagaatgcctccagaagcccctctggaagggacaaaaagaaaactatcaaaaatttttggcaaaactttcttcagaaactccttatctataacctctcttttcgtttcctgtaaacacacaacctggctattactgtcagacacaggctgtctaagagcatcccatttttcaacagcatttcaacctctaatattctagcagagcacattccaatcacgacagctgctgtcagccataacatactgcatataacgaataaaaagttataaacggagtttgcctgataaagattgggccacagaacttcattacaaataaaataactgagtgaatatatcaagttcagactgcaagcaagcaaaagataaggacttgtcctacaaaggtttaaccaaaacaactaacatgaccaaactagacaagaattaaaattattctgcatcttcagaaggtcttgcgagttccttcagcttttctccttcaagctttgacttagccacatcctcaagatgaaggccgcacatctctgttcccatcttttgcaataaagaaacagaacattcagcgcataccagtgatagcttagagaccgagagctaagttgacaagggaagaaatgggctcgctgtgcttaacaattccaacaccatagtagaatatcttaaacatttcaagcctttcttctgttccagctacttctttcagcgccttatccatttcacactgaaagaaaacttcattgcagtggctactgcattgcttcatccaaatgattagttctactgcgactcgccttatccctgggaactcgatggctggtgacttgtataaatctaggatctttctaagcttctgcatgaccatgtacactgtaacattggcactccggagagcttcattgaaatcgcttgcgtgaatggatgtgcagatctgaacactgagcccaacaaagctctctagtagtgcaccctgcttggtcctccattcttggaaattctgtgtttatatacaccaccaagaatatatttagagagagaattaataactgataaaagatatatgattttggagaaatgtgtgatttggaggataactttcttacattagcatgttctccagcatacagtacaggatcctctagcttctccacttctgactttattgctttcagcagctgtagatgatgacagcacaagcattagaattatagaatttaacactgtaaggacactataaaacttttagaaaataataaccggacattaccgttggtagtgcagtgttgattattgtcttctgaagatgagcatgctctgctctggagttggcgtgtaaaatgcccgaaagttttgcaacgttcgttttgaacccagtagagtcagcagagagcatctcgacaagtttctgcatgtcttgaggcttcagttcttcttggatcttccagacaatgctttgattatccattgcaagcataactagtgcttcagcattaggttttgctagctgtcttctatcagctgaaatttcagaaatcatctgtgaccttggaacaaggaaagagacaagcttcctaataatttgtggagaggatgcaatctcttccctcccggtctcatccaatgctaaacaagcaagaactccaatggcttcaacaagtagctttacttggcttctagggtgttgtagtatcttgctaatgttcctgagtacatagacattgtcagagactttgcacctaagcactctcccagaatcaccagcagcgctaactagcttgtgcaacacctgaactgctccaaaatgatctcttcgtctctgactgcagatgatgagactatgctcaagctgcgatcatcaccagtaacagctgtgaggttcacaatgcttgcaatcacctggccatcagcatccgcgaccttgttgcagttgtccggattgtccatgatcttgttgaggattttcacaccgaaccaggtgaactccatgctcacagtcacatcgttgccagagttgtcagcagcaacgatcaacgatgacacgatcggcagcattgctgggaagctctcaaggagaaggtcccgagagagctccaagatgacgcctgcagcatgccctctggtattcacttccttccgggtgttgttcgtcagtcctagcatgctgaccacgccgccgaccgtgtcggcagaagctcggagcctcatgagcgccagcgctctgtacttgggcactctaaggatgctgtcaagaacaccgaccccgacgaggcgatccgcgatggagttggatcgcaccagctccatggcgaagctaaccaggtccatgttcatggcttcgcggacgttaccaccggagcatctcaggtaggtgacaagcatgtaatggctcaccatctgcttccccaagggcccgagctggtacgcctccgtgatcttgagcaccagctgaatgtcggcgacggtgaacatggcttgggctagcaagtcggaggcgccctgtacgagcaccaggccgtagaagaggttgagtgaacccttgatgctcttgtggtcgctgctgccctggtccgccggatcaacatagtcttgcttgctcaggcgcagcgcggcgaggacgacggaggcgacggcggcggagtacagcacgagcgcgaagcccatcagcaggagcttggcgaggaagaagccgcagctgcagcgcttggcgtagtatgacgcgaccttggctctcaagccttgtgctgtcacagacgacgacgacacctgccggttgatgcttatgtgtctttgccagcttccattctccatagcctcaaatctttcggtctctgccgccaccacttcaggagcattgaggatgaactgatcccttggatccacggcactgctgaaaagcctgccatttgaaagtgggattgcaaagttgggggcccccaaaaaggtntagntgaggatccgtttaattcaccccggccttcttgttttgtacaaggcactatatgcgagagttgaagaaaggaagggacatgtgttgagttaatctcgttgtttatgttttcatcatgttcagtcaagtcctgtatggcggtctgagttcaaattggttagtgttttgtatggtgaggtgagctgatcagccgttagtgaaagcacaaaataagcacaaagtggaattttttttgaaattatactgttgaagtttttttttctcaaaaatatatgagattcaaacggttttacatgaatagaccgtcgtcgcagttcagcagtacgaactattaggaaaccgccggcccatgaaggcccggcccggttacccactaattaggcccatcactaaatatggaaagtgctcatggctatgcctatatatagaggggaggaggtgctattgtattggacaagtgaatgaatgaaagaaaagagtcctacccctacatctctatgtctccaattcttgtaaacattacgggaccctcttgaactacttcgtgtagcaggagggttgcgtaatacgttatcagcatgacgttttaccgaagaccaaggaagaaaaagggtaagaactcgcagatccgttttgcatctcgccgatctaatcgcgaaaacgaattcctctctttctctttgttcttgttccgtttttgccgttctcgacgaaatccaccacagccgacttggagtcgccggtgtatgccgattggtggaaaccgcgattgacaatacacggcgtttgcatgctgacgaagcgccatggcggcgaacccgcgccatggccgctagcctgcgcatgcaacaccacggccgcaccctgcaagggcagcgtgcctgcgtgccatggaggcactggccggagaggacttcaaggatgaagaaagaaccaagaaaagaaggaaaaattgaaaaaaaaaagagaaaaggccacgccggccgcaccgctgaggcttgcgacggcgacagcggtgcccgtagaggtcgcgactgcgccgtctatacaaaaacggcggcacccgcgccgccctcgccgtcgacgcacgggcgagcatccccggcccacgactgcactgcgccgcgcctcgccatcgaacggcggcgcgcgcacaatcttggcatggccgcatcttgtgccaagcccgcgccctgcaaacgcatcgttaggccaccactgccgaccggcttgcgcctcgccgagccggccgagcccgcaccaagtaccgtcggtgccacaccgcttgcggctcgccctgaggacgagccgcatggcctcaccccaccgtcgcacggttgcaccgcgccggtttcacccgcgccg

SEQ ID NO: 5502 - DNA, 9291 bp, Oryza sativa
agaaataaaatgttatggttggatttattttttttattaaattttctatattaattacactctttgaaattttgttagaatttacatagcttaattgctaattttgataattagaaacatcatttcagcatttatttaaatggaaatcaaaataaaaatcattttatctctatgggccattttcagcccattttcttcttcagcccgcaagcgaccaaagttcaattattatccccatactcctctcacttttagcctgcaagcgaccaaagtttaattgttatccccatactcctctcacttgctgaactgccggcccacgtgtggctcaagtggtgcggcccatcgctcgatcgatttgagccgttcattttgatagacggctcagatctgttccaaattgatgaaaaccctaaccctaaccctcccctccccctccccgtccccctagccggtcacctcctccgcccccgacgccgcctctcctcctccccctcaccccactggcaccgctccttctcttcccctctctcgcctgtctcaccggcacggcgctgcgacgacggggtgcggcgaagacggccgttcctccccctctccctctccccatcggcctcgacagccgtcccttcctccctctcggcgaaggcgccctcccaaaggcggcatcttcggcaacgatggcatcggcggcgtccgcgctccctcggcgacaaccgtccctatgatggcgtcgacggcgacgacagcgtttgcggtgtctgcgggtggatccatcagcggtggcggcgaccgcgggcggatccagcggcggcggctccctccgccgcctctcttctccctccagtggcagtggtggcgttggcggccaccatttttttttcaatttttccatcgctattactaaccaattcggattgtgaacggacgaaaacacggaggaaaattggatgtgacgaaaggaaaaatacgaatatttatattagttaagattaatttttgaattcacaggtacaaagtttgtatgaacaaaaatatctacttataaagtatgtatgcataaactattttatgtataattttttggggttgggcaaacacgccattgaatttatccaacagttatatgtaaaatttttatgtgcaaaatttatatgtacaaaatgtctatttatcaagtttatatgtataaagtgttgtgtattactaactttctatacgtataaatcatgtgtgtattttttttggacgccagattttttttttgccaaaaatcgggcgttgtttcactaagtaggtcgaaaatgtttcactaaatagataaaaaaatgtctcaatcttttaaaaagctgaaacacaaccaaatcaccccatgaaacatttgatacaacgtatgaaacaacggtttccacaaaatcggacggtttttcaccctatataaaaagaatgtttcagtaaatagcgaaagaatgtttcaattcttaaaaaaaagtaaaacacgatcagatcgctagatgaaataatttggttcaacgtatgtaacaaacgatttaaagccattgcaacacttaaaccccgtgtacattaacaaaccacgtattcatcatgatgaaataattaaacaatatcaaaaatccactacatcatttgcccatatatagtgaaacatcacgagtacactagctgaaacattgttggtggaacaaaaaaaataaaacggatcccccataatagggcgtttccgttatatccgggcggttgttgcaatggggcgcacgtggtggggacacatggtgggcgcgggcgcacgtgttgggggtacgtgggtggcgggcggtgcgggcgcccgattttttttccccatcagacgccgacgcgtaggatttgcgattttgtttggctaggcctatgttgcttgagaaaacgctccccaactcaatccccccgcaccccctaccatccttggccccgggcatatggtaatttttttttacttccgatctcaccccaacattaataaattataagaaacttatagtcgtaaaatattaaactgtatttgaattatattcgaaatgacaaacctggcagcttccatgaaggagatgatggtgacgaaccagaaatccttctgttttatgagggtggagaatccaccgagcaggacgatggtggcccaagcgagtgccaacgccccgaagctgctgatcaacttgtcgatgaacacccagcgcagtatcatccagttcagcttcgcctctggcagcccaagtacttctgcagctacattggtagtggtgctagcagcagttgcatgatccatggccttccctagctgctgcttcaaccacacccgccttaactaattcttgcctgtgtgtgtgtttgtttgtgccgatgtttctctccctgcatgcctacgtgtgtcctgattaaaaccatgccatccatccatgactttataacaagaattattccacaagaccggcaacactcaaagacgatcacttttactttgagtcttactactagctagtgttcccctaaaacggatgatactgttatcttggcaaaatgggcatgcaacatgtaattacgtgcagagaagatacttaaaaattataaggaagaatgtggacatgaaagtctgaaaaattcatgacctgatttgcaggtgaggaatgataaagtaagaggatgcccaacagatatcctatcctattcccaatcccataattttagatttatggggcgaaaatacggagaatgcttgtaatcgaccgtccgaacaagacaggaaaatcggacaccatgccgatgcttcccacgttggagtatctgcaatcaactaactgctaatttcaaccatgcatatgcatgtgtcaattttcaaaatattttttctcctagactacttatccgatctaaaatccgattgcaccattatattcattggaattaaatctttatagcaagatattacatgattatattccgattaaagaaaaacatatgttttaaaccattaatactttatgtttcatacgttatagcaacatgtttcagcatctatttttattgtgtttcataaaattcacggaaatacttgccactaccctcctatctctctccacctcatacatgcatgcatgtatgcatttttgcgagctttaaaatattttttctcatgaactaattatccaaactatgatctgatcacaccgttgtattcgttgtaattaaatttttacaacaagatatcacatgattatattttgataaaagaaaaacatatgtttcaatccgttaatactagttgtttcatatgtggtagcgacatgtttcaacgtgtatcttcattatgtttcataaaatttttaaatgtttcaattgctgattttttgtttcaccatatataatttgatgtttcacttaatggtcaactaggaacatttgaccaaccttttttttaggacatgagacgtcaaatgggaagattcctcatgattgtggagtaaaaaatgaagtgcagcaacatgcacatgcacacacgctcagggtttggatgggcgtccggtatttggtgggatatcggacgtccgagccgtagcgctctccggaaaatactgttcgcaatccctagtgggtccaacactagagagtcctcattcctaatccatggatgagtgcgagggatcgtctgtagggacgggtgatcgggagtattggaaaatcatatttcttttttatagggcccattttttagttttaggaaatccatttaagcatctattggaaagctgaatattcagacctcaaattttgtctaggacttaaaaacaaaattttaaggatatattttttggatatctcttagtgatgctttaaatcagttcagagatgagaaacagatactttcttattaaattttgtttcattgtgtgatatattccacaactatttaccacaaaattgaatgtggcacggtgcttaaaaatcaaattgcatggaacctttcggtgtactaagatgtagaatatctatggaaatcaatagttttacaagaaatttcatagcagtttaaggggaaaaaaataatccaagcgttgagaaaaatttctaatttttttattagccctacaatattcttgttagtacacatctagctgccttaaaatcttaacatcacaacatctgaacattgaacaagtgtatttatcagcctaggtgatttccaaaaaagaaaaataaattagaaatttttaatcatttcaaaggaagtattagaatgtattttatagtgtaaattttggtactcgatacaaatgaggtactataggaggtataacaaattagccctagaagctacagtgcatattatatcttaagaggaagcataaaattaatttagagacaatcttacatgacaaaaaagaactaaaggtgtactgcatgtttggccttttgcaaaagactggattaagggccaagccacatttaattcagttactgcgaagatacttgaaaagaaagcaggtgaccattaaaaatctgaaattcacgcaccactaaaaaaatcgttttctcaggcagccaaaaatcagcccagtcacccgcctgcgaaaattttctcgacgaaaaaaaaatcgccgccaccccaactcgcgcccctacccacctccgaccggatctagggttagggttctaagagggagagggtaatgaaggggaggtgaggggagccgcacggctgctgcaggggcgccgccgccgtcgggggtgggtgccgccgcttccaccgccctccccctccctccggctggatctgggagggaggggaaccgctgccaccaccaccgccctccccctcccccttcggccggatctgggagcgaggggaggggagccgtgcttggggtggatgccgccacccccgcgtgtcgccatcgtcggatctcgccacccccgctaccgaactgcccacgaccgcggagcgccgccgcctcccttccctagcacgaccgctgaggtggataggtgagctaaagaagaggggaggagacttagaaaaaaatctgatctctcccgcgtctatttatatgccacgccaatttttgcaggcagacaacgatctcgtcccacggttgtcattttctcatgcggtcatttagcttcaagatgcctatccatctagaaaaaaaactgctttcgtgcaggggagtgtacaactccacgatcgtgaaatagccaatcagccatgaacagaacggagaaatgatagaacattttgctatccgatacgcgtgtgctctgaagtaacgaatatacgtagctgtaaaatgattaaattgcattatggatataaaagaccgaaatatccgcatttactcacatgtgcacagtccacccggaggacatgattcagaaataatgcagggggttatttgacatgtaacattatcattatttactgatattgtagttacatcagataaaaggaaaacgatacaggtatcaacacaaaactaaaaaaaaatatcatcactttatcaagtcccaatgtaattaattttcacttgatctacttccgatatatttattctctatttttataaacccggatgcaataattacttgaaaataaatttattttatgacaatcaggagaaaacaaatgaactcccaaaagattaagggaagtatctttgaaaattcacggagatcgaagtttcatgcgactgatgtggtagtcttgccaatgtgatcaacaatgtgataaaaatttcacaagcgacacctcaattgataaaaaacgtaccatacgtataaggtggtgtttggttcggatgtggtaacgtaaacgctaatggtattgcctccagccgtaacggataccaatttatccgattacatgattagtttggttgcaggcggtaacgtcatttatttacattactgcgtttggttgcggatggcagccaaggaacgggaggctgatcaataggacacaattcgaaatttgaaacagaagcctttgggaagatcatttgctccgattacactaatcaaagaactgcttgcttccagacaaccattgatcaaataactgattatacaagtatgcttatacaagtacgcaattaagcatatgacataagctatgaaacattcgcaccagacacactccagtactatatcaacagcagctgacatcaaaagctacataaagaagctcaataaattttgacatgcaaatgtttgaaagataactcgagagttaatttcctatacatgcaacgagcagagttttggcagatagttcataatattccaaacactgtcacctcatgtttggatacaaattttgacagtgagaactcaagacaaaaagacattttgcagattagtaaacaataagctaggggcaatacttctgtctgaaaaacaggacagtactttgatcacagaatatgtagattgtcatggttcaagcaaataaagctgaagtactgaaactaaacatccttaggacataggtagtctccaatccccaaggcctatgcttatatggaattctaataattcaaaaacagataatgaacatcttgtagatcatgcttgacagccagcacatcagtacatcaatttttctttgcctcatctgataacaaaaaaaattcagaaattagtgaaagaaacattaggtgaaagaaaatatatagtgctcagcatcataccaaattaagaatattcttgcacagacaagccatatatgatattcagaaaaaaggtagcattttttaactttaggagtacaaaaactcccagttaggtgtaagcaagtaagcaagagaccaagcacatactccagttagaagtgaatataatattactatggcattgagatggacagctgggtccattgatgcattatactagtgcaaggcaaataatatgaatgcatatatgaaatgctaagtggtaaagagcaatatgcttacaattaatgatcacaaaataaagtgatatgtttccagttgcatttgcaacactacaagattgatcaagtgaattaccagcaagtattttcagtacgtactccctcctgagagactccggaagagcgagaagcatactcatttgagccggcacttttacaaaagcagctgcagcattgacaacttcagtaccagtcaatccaagcttttgacactcaagaatagcttcgttctgaattttttgtagtgggtcctcctcagccattgccttctcttggatctcagcttcacgttgcatagatgccaccattgctcccacatgctttgtaacatccctcagatcaccttgaacattggcaaagacatccataaaagggtcacttgacaaggtatttttcagtttgttgctgtctttcttcctcttcttagagcttgaagcagttgaatcgatgctctgtcgaggtgtggctgaatcgatgctccgtcgagctgcagctgaatcgatgctccgccgaggcatttctctagacactctctcttcatcctcctcatcttcttcatcttgaatatcttgaacaatttctttctccatattagcaacagcctcaccaagaccctctgcaccttctccagtagcaatgtgtttaccataaattgcagctagtgtatcatagtgagggaatgctacaccatatagaccctttgcctcattgtttttctgtaaaatacaaagaatgacacaaaattaaggtcatggttcagcaagcaaaagagagacctatgcagctacaattgcatgaaaaacacaagagaacatatgtatgagaaagcatactactagaaaaccataatgttgtctttgcaaacatttcagaggaattttacatagccgcttatttggaacaaaatttcataaaatatcttacagtagtttcacatatttcaattcaatgcactcatgaatcaataaataaattttctactccatagttagtttgatgacttaccctgcaatgatcatcgttttgttgtttctcacattgtatcatctttctattgtcatcccaagaaaagccacttttggttagcatcacttcaattgcgccaaacttggtcctaaagtgtcttactctcgactctatgtgcggaacagcagtaaggccagaacttggcaacttcttagcaagcacgttctctagaacttggcagtatccatttttgaaacccccttctgattttcagcttggatccaaagcaatctcgaacaatgccttgatcagctcctcatcctcaaagtacatccaaatcctcttgttcttgcctctcccacgcacaatgcttgagcttccaagatgctccataactgcaatattagaaattcaacagaaaactaacatcagtaagcatccataattgtaccaacatttttttatttctgatttgcaaacaattagaaattccatttaaaacacaaacctcaatgagccctatagctattatacatcccatgagcaagagtgttgcgaaaatttgtccaatcatcagatgtcgaaatagctgagataaactcaggttcggcgagttctccctcaagtatatccaatggtatctcgtcctcatcctcatcctcgtcctcatcctcaaatggatcactagacatcttttgcaaaattaagttgtgcaataaagcacatgccattataattcgacactgagttttgataggaaaatatgatggggacctcaaaatcgcccaacgaccctttagtcttccaaaagacctctctacaatatttctagcacttgcatgcctcatgttaaagtactcctctgcactacgtggtgggttacgtgctgtgaaacggcctaaatgatatctttggcctcggtaaggggctaaaaaaccatctgcgtttgtataaccagcatccacaaggtaatagcaacctttaaaattttaaaaaagaaatgtcagtacaattcaggctgtggagtgtcaaacttcaaaataaattgattggaaaaagactcgccttgagggacacgaagcccgtccggcctgtgaattgcatcacgaaggacacgaccatcatgtgcagaaccctaccaaccaggtagtaagtaaatgaactgcatatcgggtgcacaaacacctaatacatttgtaacaatgtctccttttcttgacctatatcttccttttatcctagttgggacagttacttttatgtgtgtaccatccaatgcacttaggcaattctacaatccagaacaccacatcaataaaatatgg

SEQ ID NO: 5503 - DNA, 12432 bp, Oryza sativa
  unsure (1)..(12432): unsure at all n locations
acaatttttttttaaaaaagttgacttggtaatttaggcgctatttttcgtgcgtgaacgaggtcccaacctgggaagtgacacatcttactgtgatcaagaggtgacttgattaaccaattcgtcaatgcgctagtgaaactacaaaagcagatgcgatattaattgaaaaaaaaatgtctcgaaatgtccaaaaaaaatgtcaacatttgaaatttatagtttttgaggtgttacgaaacaactccatttgaagatataaaatgctctggttcgtagctagaataattatattttagttttttttaaagatttttagtcaggaatcgacgtcatatttactacttataaaaaataatcagatagtttttacaccataaattacttatacttacattgtaattatacattgaattatattgtaagttttagtattcatattatatttttttaagtacgcaatgtataaaaaattgtgatcaaaagtaacatattatataattgaaagaggacatgagagggatattatccggaacaagtagcggaagagcacccattctaatcagcatggacggcttccaaagcttcaatcggcatgtttaggtcaggatgaaaacggtcggaaatgatcggaaacgatattattattttattatttttttgaaacaagtagaaacaataggaaatttttcatatttatgaattgaactatttagtgtcaacttcaatgacactgagggcctgttcactttgatgccattttcaaccttatcaagttttggtaaaattgctaaaaaagtggctacatttagggtatgtttggtttgaaaccctaccaaaatattggtagtaccaaaccttgggcaaattttggtactaccaaatttttgatagtatagatttggctccactctattgatttggcaaaaattggttccaatccaaaatgctaacatgcactattcaaaactaacaaagaattggtagggcaagaattggcaccaaaccaaaatggcccttagtttcctgccaaattttggtaactataaaagaaatcctgccaaaattttggtaagttaccaaaattttggtaactactttggctatgccaaaatttggtaaggttttttttggcatcaaagtgaacaggctctgacagtaatccgaaaaactaaattttgaaaatggtaccggtcggtaaaaatattattattatgacttataatcaaccatatgagaaccttaaactaaatggttaacatcattgttaataccaagagcttagtaataaaaatttagttcttgtagcagatcttttaaaaacgtcaccaacattatgaaatagctaacacaaatgttgtactgtagtaacttcttactactccgtaggcgtacaccggtgagagagacatgcacagtgaaacattgtgaaatggacgtacgagtggaacaaccgatggcaaaatcggttcgacgcagagacagcgccaggcatcaacaacgtaccacaaaaacacctcgaaatttactctgcagaagagaaacaaaaatcaaaacttcgaggaagaaaataatttacaaaaccagcagcagcatcacaaaagttactttgataaggatagggacgcaaggttccaatctaccatccttgtcatgggcaatggacacacgagaaagaggaaaaaaaaaggaaggaaaaaaaataaagaagaggaatcaaatgattaaatctgaagccaacgattgcaagctgcggactactagcccctttgggatcatccgtgaggtgacatgattttgcagccgatacggcgatagcgtcaccttcgtcccgtattctctcattctctacttagctagctgcagcagtgtccactggcttcagatacttgagaaatggtgaaatttcagtgatttggacactccttaggatggtgtgtctggacaaatgtgacacaatcgtagtagtggattatagatatttgttacaagtgtttctcttgctgcaatggtgcttcctttttaggttcagttacatgctctgaacattttacagaaaatatgggtcagtaggttattctgttatgagtggctaatctctcctgtgcggattgcttatggaatgctttcttaattaactgtatcttgcgatctttcggaatgctttctgacctgtatatatatttcgtgctccttgtgtgaggaatgcgaggcaagtaccaaaggaagcaagaagacaagatcaggatcagaaacagagatggggatcgaatatcatggcagttgtacactgaagaaatgaatgcacgatcttccagacagcatggatggaacaagctaaaaggcctaagaacactgcaaagtgcacactataagattcagataagcttacagcctcactgtttcgcttattcgtgaaataaaccaaacagcatatttacaaatgaaaagtaatttatgaatataacttttgtatacatgttcttagcgatctaaaagtaaaggctgaaaaataaatttcgatgccaaaaatctcaaaatcaactccaaatttaaagttgaaaattgaaattttgactgataagtataagcataaacgaaaaaaatgagtcccttatatttcagacttcaaagacaccaacatggtgggcttaccaggcaaagtgccttggggcatcaaacacggtcttcgattcgctcatttggaaagtttgggtgccaggaaaaatgcaaattccacgtatagccagtcatccaaaatagggtctggatctccgaccagttggcgactagagcatgacaaaataatgggatctgccccatctactgtagagaaggcgaaacagttatacatctcgttgtcagctgcagatacacgaaaagaatttgaaacctagtagctgcctgggtggcttaccaatagcttgatcctggacaatgggaggcgacacaggcgacaaaagattggtgggaggctctagcaatcatggtaggagttctaaaaagggattgtgcaccctcattctccttgtcgtctgggagatctagaaggagaggaaccaatgaatctttgagcataatgagaccacgtcattattccttttcaccaaaatcaaggatggagtgcggactgtaggatcgaataaaaagaactaagccaaccagagggggggtgaatgattggtgtacccaaaaacccaaacttttagcggaattaaaagttatcctcaaatcgatgtagatcggtctgactgaggttgatccgccggtctgaccgcgcctgtgccgtcggtagcccggtctgactgccctggaatcgcctctgcctcctgtcgctgtcgccggtctgaccaccgctgacccgccggtctgaccaccgctgacccgccgatctgaccgccgcagtgccgccggtctgaccgccgatgtctcgccagttagaccgctgaacccgagcaaacacaaatcgaagaactcttgatgtagatgacaactttattacttctctctgtgtttacaaagtgcaacaacagcactcctcacgaaaatttcgactacactcgaaaccctaactcaactctcaactctatgctctcaaaagcgatactgggaggcctcaccctccctctctatttatacatgaggtaggcagcctaaagccacaaaccaaactcatacaagaagtcctaatccacctaggaaaccttcctatacaagaaaccaactttacaaactcaaattgtaccaaatttggactcattccaaattcgacttcacatcctatacacacccaatatctctatcgtatgtcatatggaatcttcaccaaccatgtgcattgatctttagcctgaatatcccgcatgatatctgaccatccggacgttgccttatctccaagtcgactcccgatccatcaccggcaatactctcctgaggcatcaagacacctacacataaatcaaacaaagaaatcatattccgagactaagctatctccaacttgactcattgttagcaaacaacagtattacatacgcatagtatccatctagaagccataaacacatattaatcacggatatccaatgaaacaacccgaaaccaaaaccaacacagagtcagccggtcaaactgtgagctggccggtctgaccgctcgcatagcgtcggtctgaccggcaacacctgatcggtctgactggaccagacaaaacagcagcacctgtatatcacctgaaaatccaatcatctccaaaaccactcgccaataatctccaaatatcaaaaccaataatctcatatgccaattgttcatcacagaataagaatcaaacacactttgattttacacggacatgggcgatggtaggagcaaaacgcttacgtgatttttttgccctactctgtatagtgtatagagcttttcttcttttcttacccctagggttatatttttctcatgctatattcaatgaaaagacgcaatctcataccgttttgccttaaaaaaaagaagattttagagacgtcaaagctaggttaggtgccccatgaatattcgtgcaagctatggggcccgtacccctagcccaaaaaattagcccaaagacactcaccctacagtgcaagcaccaatatatgtgtggcttagttggatggagacactgatgaaggaaacgaagcccacagtgggcgtgaccctatgcttttggacacgggtagcggagcaaaatttatttctcacctacccttctctccaacccagcgcgcaggcggatgcctagccctcgaccgcttcgctctctccaacccctcgcggcggcggctggcacggcagccggaggcgtcccaagcggcagtggctggcacggcggtgggatgtgtccccggtggcggtggctggtgaggccgagggaggcatccccggggggagcggctggcgcggcggtgggagacatgaagtccgcggcggtgggctttcgggggtggcgacgcggtctcccgtcaactccggtcgtcaggaggggacacatgcctnncgctccttttccccccacctcctcccgaggcgatagcgagctcgccgccgccccgtcgccgggtgctactttttggggttcttggttcttgaatccacatggaggggcgaacttttcgctgggtgtgttcttgggtttctggggttcttgcttcttgttttctccttggttctcgagttcgtcaaccaaggattgaccggagttgacggggagttcttgcgtacggttcggattggtttgtagattattttcttgatgattgcgtgaatgtagttttgggctacaaattcttgagcttgcaatggatttgtttgattcttgaacaatgaatgcagcaagcatgggaggcgatggagaggccgccatggattgggacttcagggtggcgatggtgaggccggagagagacctacctacgaatccgagggagaaatcgagcgtggcaacgacggaatagggcaagcgtcgaccaaatagttgtggcgggagggcgattttggagggcgaatccgggattccaccttccgtccgccgcgagggcatgcgcgcgtctaggacacgcgctcctcagtgcgcggaacttcacctcgtgacggcgcgcgcggactcgccgagaggaggaagtgcggcgctctgcgtgggggcgaggtgctttgcaggggcgccgcgacaccctccacgtctgcgttttattgagctggcaccgtggagcaccgatccaactcaccgcactgttgaatggccttgctgcacaggcatggagccatggacaacaaggagagagtaggcaggcaggaagagaggagtacggagtgacgtacagtagaaggcaaacgtgggcgattctccatttctcattgcccgggggaacgcaatccgcgggcgcggccgttgattggctccactggctttccctttttggacggtagcactcgctggctggcatgtgggagtgggacggtgggtcggccgcgccaaccatccatccatccaccatcgtccatcgatcgacggcgacaccgcaccccatcgctgtccgccgtgacgccgacgcctcctctccttaaccctgctgcacagacgatccagtgtgactgcacccctcgataggtttactccgatttaaatcaacttctagtacatgcaattctggacgagatttcataaaaaaaaatcaatttttgatcacgaattgattttcgtagttagaaattgattttaatagtgcggagggagcactgcatatgtgcatgctcagatcgatcggtttttccccaccgattttactggccgcaattaaatcgcggttcgatttccttttcggtctgcttgggcacctcgatcagatcaagtaagtagttatagcgacagggctcgactgttgtctgccgatcgatcatatgcaaatggtactctgtctgcctcgatcgaaggcgttcacaatatgcctatggtagatggttttcattttcattttccttagaaacaaagttcaattgcaagtgtccattacgcagacacacatactatgaacttatacacacgcgcacaccgacatattttgggattgatgaattcaccacggatgtcttgctcgacaggtatatcacttatcattgaaagaataattagctgtgaatatgagcacctacgctcacttcgcatgattttcattttctcatgatgagggaagaaaatctcggttggaacaacaaaattttattattttatacatttaaatcctattggattatttttctatatgtagctatctggtttgtactattttgttgaaaaaaattaaatatgtgcgtatgtgcatgcatgctcagatcgatcagtttttctcctgcgatttactggccacaattaaatcacgatttaatttccttttcggtctccttttgggccggcaggctggttcctcgatcgatagagttgcaaacgacactgctcaactgctgtgctatctattgatcgatcatatgcaaattctactgtctgcctcgagctatcatgaatggggtaattttatcattttaaaaagatacaaaagatacatgaaggtatcatatattttagtattttagtgtaaaaatttgataaatatatcaagataaaaaattttaacgtaaaatttaggcacctctatatttttttcttgaaccttaaaattgcccatcatgaattttactggccaatggtaaatgattttctcattactagcctagaacccgtgcgttgcaacggaaaacaaatatattaagtttctagctaattaaatcaattaagaagcacttatttagtctaagtaatactatgattttttttattgaacaaatagatgattttgaattttgggaagccaataatgaagtaggagatgacttgttaaaatatggtgtagtagtatagattgtgagatccggatgttagcgataggggtggtgcgtgaatggataccaccactactaatattttaagtagtatagatggggagaaaaatctcgattggaagaaaagattttattattttaaaccatttacaccctatagtattattttctatacgtagcccttttgtttgtcctactttgttggaaaaattaaatacgaatccttcctatctttcacttcttttttgagaattataagcatgagttctaacctcatagtttagaatccgttcgaacagcccaatacacaatctttctttctctctcctagaataatatgagctcctttggaacagaagaaaagcatacgataaatgaatagtataaatgaaggatttaaattcatatggacacagtcactgtacgtagtagcctttacatggtactggtcgctggaaaaagcaaaggaaataatttccccacatttctgtatttttccaagtcatccaaacacatgttcctctaaattttcaacgttttcaatcttttcgcatggatttctatcctgtttttgtgttttctctggtttcaatatctactagcttataaagtcacacatttgtgtgatttctaaccatcctgttacgtgttttatatactagttgataccccgcgctttgctgcgagatatatggatgaatgtattttatacattatagaaaatgatatatgtatatgtttaaataatgtaaaaataatgcgaagataatgatttgacattgcttgcatattgagttctaaaaatacaacaaaaatgtaaataatatgtcatgtttgcatcatatttaaaatactctagataaatatttgctggtgggtgtgatgatatgatacacttgaatgttgagctttagaagttagtggatattaattttatagtaagatatgatatgaagatatgtagtcaataatagttatgtatgtgaaattttagtattcaaaagacgtgccagctgtatttgtttaattttattgagtgaaattttgaatgtttgttttcattactttgaaatatacgctgggaataattctaatccacgtcatgtatgtatgtgtgtggagatacatcaacaaatctgtcaatcatgtcttatacaacaaagttgatgattatatgggatggtattgagatattggagatggagataagggggaacaggagctgcgagggactgagagtgcggtggagacgtcgctgccggcgaaatcaggacgaaggggattgcggaggcatgttggagagcggacgggagagaagtcggcagacatgtgcacaaatgggagttgtgatgtgatgggactatgggaggcgtcgctggatgcgaaggaggctaattgtgcagatatggagagaagcgcatgtctgcccgttgatcgaaaccgttggatttgatgatcaaacgatccatattccacatgtctgtcaggttggagtcgccgccatcattacgattttttaagtattattatagatatagatatagattaaggagttgctagagagaacttcattagatctaccggtgcctcctctcttcccctatccactcatccagccgatagaggggcggtggtaagaggcggctatcgatatgacaaggccgaagcatggtggctatggtggtgaggtggagcctgaggctaggaagcaccgctgtgatggctgtcattgacggacccagaagaaaggggagatgtgggtgctgatgatttggccctataactttttatgtggagttacctgcacacagatcccatcataaaatatgcttgttctatcccatgcctaagcataaaaaatcatcttgctttgttcttagccttggcatgtgtcaatcctgtattttccatatccatactatcaaatccttaggtttccgaaatattgtaatggaaaaagaattgattcgaattatcactatttgactctgacctgttctaaaaaagtcaaggtacttcgaatgacatggacaaagtaagggagtacaaacaagctgaagcaaagtgggtaacagatcccagtaggccccatatccattttgttttcctgactgtcttgtggacaccatatcagtgaaaaccgtctaagatagtcattttgcaccggtttcatgatatctggtattatgggtgaggtatacaagttagattgatttgatcatgtttttacctttgatgggctatagataaatgggctgacttgctattacttccggcccattgggagtattttgggtctttgacatctctcttctcacaccccgctcaatccccaatccggttgaccatgtccgccattgatttgccgacgggaggcggcgctgggttcccccctccgggttgccacccaaaccggtcgtctaggccgcgtggccatgcgcgcaactttgaggtccacaaacttactatcatttcatttgagcttgtctttcgtgtcccatcgtagttcatatgttttttttatcttagctagaattcactagattgattgtgaatgtgttgtgcaatgtacttatcgcgtggagaaaagtgttttcgtaatctttgagaggtacggtacgaataggtattgctaagctagacttttgtttattgattctacaaatatttcggtatctccaaaggtataccatagataactcctaggaattaattggaagacagttatcaccaacgtaactcactaggtatgcattataacagttggtgagcttaagagaaaccaagatagcaatctaattaatttactagaacattatgtttccctgtagtaaaacatcaacagagagtgcactattgtgaatttagataatctgaatgactacatataatgttgtaatagcatgagaagaaatggttgtaacactacatggtagattacattggattgataatccccacaaccgaaaactgcatgaactttgtcgacgtttgatgtcgcgattccggtatttgcatggtatggggatcgttggtactagggtctacgcgagactgagataaaagagatggagacagggatttttatacaggttcgggcccctgaattatcaggtaataaccctacatcctgttggccgaagccgttgttactctttattcatctggatcacacaagtacaatatgtgggctagcctatctaactgttgtcgacatggcggtctgaaggtctgactcgtagtcgataacagggtagtcttcctcctcgagtatgtgcctggcgagatcagagataacgctttcgtctctcctaacagtatctggagacaccgtaggggactagccgtgcttatccctgaagtcgatatccggcgtcttgtcttggcgtatgttggcttgtatgttgtggcttctatgttgttctgtgtatgttgattcttcccctttcctcctagggggccttgtatttatacccataggtgtccccttgtctaagtagaactagggaaaccaatatggatacaatccgagtagtccttgtcgtttccatgtagaactctggttgtctttccttatccagaactcctcctatatccgcaggttgtttccgtataggacatggtaagtggtgggtcctgccgagatttagtcgactactattatgtatgtggtatccataaccctgacaaacttgttctgcattgttacataattgttttttagtagaaatactaccaggcgccgcccagtagtttaaaaaattaaaataaaagaaaaattacaatctgtataggaaaaaagtccaaaaaaaattacaaagtttgtaaccaggaagaaacaaaatctaacgaagaaccattcatcctacagaaatgtaggagaatatcctgattaaagaatctaaaccaggcttgaacatctgggataatattcctgaaaattagtgcattcctctgtttccaaatatgccaacaagcaatggaaaagatttccataaaacctttccttccgaaactaattttagctaagccaatcatttgctgaaattccaaattataattccactggaaaccattttttctccaacacgcctcagtgaaagggcaactgaaaaacatatgttctctcgtttatcttaaactcaacatacacaaagcacatgataagtcatcattttctttcacacactttcttcaatcaagcatatcccttgtattcagtcgatcacacgaaagcagccacatgaaaacttttattttattgatacacaatgacttccaaacccaggaaaaggatctagaaggagagagactcacaaagttcagggcataaatcttcttcgatgagtagactgaattattacagatgaaagaccaattatctccaatcacatcattcagagagagattatctagttcatcttttagctgtaaaaaatcatcataagcctgtgctgaaagagacaaacgaaaacaatcctcaaattccttgagcattatggccttgacagaatcagatttattaagtgcatgagaataaagaccgccaaactgctgacatctaatttttctattccaaagatcctccccaaaaaaaaaaactgaattcccatagtttacagaacactgagcaatagctctataaacatctgataaacaaattatgtctctgcaccaaaaagagcctttattaaagacatgacgaggaaccttatgccgatagtaagactccctaatcaaccttacccatggtaaattggctgatgtgtaaaatttatgaagatgtttaagaaggagagccgcattctggatatgtaaattgatgacaccaaggcccccttttttctttagagaacagacttgttggagatatgggcccgggggtatgtgaagtaaggggagttaccttcccgtccagccacgtggcccgtcaagctggccccacttacgcacctcgtgagtcgcgaaacccgcgcggggggggggggggggggg

SEQ ID NO: 5504 - DNA, 3625 bp, Oryza sativa
gagagagaaaatagaggatgagaggatgaggagatgataggtgggtcccacaattttttttataaatagagtgctgactggactgccacgcgtacgctacgtggaccaaaaccaccgtggattgggtcgaggggggtaatttgtccggtttgtatagttgagggtgaagaatgtccggttttgtggttcggggagaggggcgtgatttgtactttttcctaaatggaaaaattttatttatataattgctctcttatttcaattttaaattcatttttccaagaacatagtaagaatatgacaaaaggaggtagcaaaagtaaatataaatttgtcataattggataaaattttcctcttaccatatatcttaatagaaagtttcttccattaaaatatcctaaattccataaagatatctatagtacacaagaaaagctatttcttaaagtttagaaactccaaaagtaagatatactaaatattaaaaacacatatagtacaaatgatagttacatgtgaatcaactccattttccacgacacgatattttctcataaactcaagattttacgaattcaaataattagaatttatatgttgatagggtagttagaagaaaatcatgactaacatttaaagcaatcctaaacaaactatggacaaaagaatataataaaaaatcaccaacatgttaatattactcataaaaattcaagcaacaataataaacaaggtgtcaggctgtcagcaacgtactgcgcatgtgcgcgggttacctttctagtttatataatattttaataagacaaataatcaaatataatgctaaaagtcaataacgttatttattaaaagtgaaaacagagggagaacatagataataccaggattatatctagacttctgaaaatacacatccctccattggacgactatactccacaatgtccgcgcaaacttattaaaggattcagtgtttttaccctccttcaggagtattaataaatggagcgtagtcctatttttaactgtcgaccatgttacgttagggaagaccacgcctgccctttagaaagtcagttttagtagcatttatatcatgtccatgtacgccctgctcattggctaattaattaagttccagggcaaaggaagactttgccaacttgcataactatagaacgactcgcagatcgatctacctcccaagagtcactattattattactaattttttttataaagctgacggcgtccatctccatatatacctaaactaacatatgttacaggttgtattcgatctactacgtaccacaccttattttctactatgctcgtccgaccagtataaaatgggggtgatgccaccccagtgttgatgcaacgagaagacagatctaagaaataaattaccaacactcccgatcaatgtctcacaaacccgatcaaaaatgtgcgacgcaccaagattgcgacgccatggcagtgccaccaaaaaatgatgcagaggcatttgatcagcctgatccaaatgatgagaggctgccggaagagaagctcaacaccatggccgtacgcattgcgttcttctacagggtgatgaacggttgtggtgcactggctttcgcatgggccacggtggtgttgctaggtggatacgctaccctcatcaaacagaaggatttctggttcgtgaccatcatcgtcttcatggaagcaacctggtatgtctacatgtgtatatatatatatatatatatatatatatatgcagattaattataaggtcaattttaatttcaagcaatactcgctattccgcaaagttcatagaagggcttccctgtcggttcgtaacaaacagtctctctgctggttttcccactggcaggctgcatggcacggatcaggatcgtctgccttcacggggtaactgcacgagcgtgcagtcagcacacatccaccgtccgagccatccaacggctatcgcgtgacgtgtacccttaaacaaccagcccaggaaagcccacgctcacaagtgatagactgatagcggacacacctctggactccgataacatatgcgttcgttgtcgttatcgccggccgtcgtcgttcacggcggggactgacctgaagctcttcactgggatgcgccgccaccagagccaccgggagctgtagcttcctcgctgtccccttgagcgtcgtgcacgtactccactggtccatcttcttgctaggattggatatgcagcaattggaagcaattcaacatgcttgctgcctgtggaacttggaaaatatggatgcaccaagaccaagtagtagcataacacgattacagttacaatgagcagcaagcaaagcttgcgttctgaacttctgattcgatcgactatgcagcaagcaacgtattacgtaaagtacgcattcaatcagctggttttctacggaaacacaacgagaacacctttgtcatgcttgcctccggctgctgctgcgccgctgccgctacagacttgtcctcaacggaagatgggacggcggagattgaacacgacgtacatccgaggagacagcagtgaagcccagctctcgtagcggccaatggtggcgtatgccggtggaaaagcttcaggtcactcggctgacggcagcgcataccggcgtttgagctccgggccactccccaacgcatgcgggtacttcgtcgctgctacttgctgggttttcgtgggcttcgcgatggctggttctgttagctatggcgtgctgcctcgtgagccatcggatggtttggacggtggatgagtgctgaaggcacgcgcgtgcagtcgccccgtgaaggcagacgatcctgatccgcatggcactgatacaacagcgcaagcagtccggtggttgcagtgacctgagtagcaccttaaggtgctgagttcaaatcttcataggagtgaattttagattgggttgttggaggggataattccctaatttaaaaagctgcatatatctatatcttaaaagaattatgtgtcctgagtagcaccttaaggtgctgagttcaaatcttcataggagtgaattttagattggattgttagaggggataatttcctaatttaaaaagctgcatatatctatatcttaaaaaaattatgtggcactgatggtcagggctcataactgccggttctagcactgttcaaaaacacatttgatctcaacattttgcacgaatctcaacattgatctgagggttcacaaagcacgttgttagaattttcatcaacttattgcacgaatctcaacattgatctaaggattcacgaagcgcggtgttagaattttcattgacttttgcacaaatcccgcgctaggggaggggaggggagccggatcccgcactgggggaggccggccagccaccgtcggatccgtgcggtggttggctgccacccgcggaatcccgcgcctccaccatcagagggtgttagtgatatgcccgagaggcaatcatagagatgattgtatcacatactttgtttacatacattactggagaaccccacatctctcccggttcacaaccacctttactcccaggtagcgaacc

SEQ ID NO: 5505 - DNA, 21167 bp, Oryza sativa
  unsure (1)..(21167): unsure at all n locations
gtccaaatatttaatgtgttgtttttggcaaaaaaaattttgatctaaactaggcctcagtcagtttctctgtccgtttgatttcttctcatgcacgctgtatccatctgatctttgccgatagcttttaactttgttaatggcaccttcctcaggaaatcaatgacagtgcaatcaaatgtctagcacttgcatgcttttgcttttttttttcaatgtaatattttaatttagaacgtaatttttttgggacttacaatgtaatgtaaatagattgaatttacagtgtaaatacactaaatttataaatttaatttttaaaaattacaatataaatacctattaattttttatgaaaaatatatcgccataaatacaaatactcccgtgcgtatgtcgtatatgttattttgggacacaacgcagcccattccctctcgcgattttctcccagccactcgggctagcaagacctcgccgcgacgtcgccgcaaaccaccacctcgctgcgtacccctgttaatccacggcggcggtgttcagcccgccgtggaattctcggcgtccgccagtgtccccgttgcttcatcttctggtttttctcttctttctcgccagctgcagctagctagtcatccttgtgcactcaacctgtttgtggattttcctcctcgaagaacaaatgcagctgcttgccctgccgggatgtattttactctgcccgcgcatcgccgttcactgcatccagatgcggatgaaagcctgtgtggtttgtctgtgctgaggaggaggcaccgaggagccagaaggcttaggaatagcaaggtatgggatcagcactctaaaatataaattcatagttggtttgcaagagaagaagttgttttgttcggttattcaatatgcatcaacatgattctttttttcaactcagattaggaacatggagatgcagatgcttttatgggagtatatatcatttgggtgaaaccccccttgaattatcagatgaacatatcctaatgctctttccattattttccccatgcatattggtcggtgcaatatgttccttgtttggctgtttgcgtggatgactacatggaacctgtagcggcctagggatagtaaggatttattgagcagaaatgttccaaattttggttgtctttaggagccatgtttgatttcatgtccaaaattgacactatatgcatgtttcacatagccttgcaacttgttactccagaccgtattaacacttacatggtaaatgcaatgcttctaagcattgggttggtctagttatatatccttcacaaaaacatcgaagtcatgtggcacggttaagtaacaacacatacaagttctattataagttggctatataacctaaattaaatcaataatttaccctccacccattttaaaatctagtccctatatgatattcagtcaagctttttgtttatgctaagacagattttcctttacctaatataacccactttacttttaagatccataaacttttctgcaacaggtgtatccagataaacttccttgataagtgcattaccttacgattgtgtcataacgcatttcctaagacatttatcatttgtcggaagcaatgggaaaccaatttatatttgtattgtaaattatactcctattattgttattacatagctggtcacactctctgtattttccctgaaggatggaaagattttagtgctttgatacagagttttctttattacataataccagagacatctggtcaccgggcgagcaaaacaactgactgaagatatcctctaatatcataactctattcaatatgttaacatttttccaagtttcacatattctcaaggataaagctgcataatttctcaacactggaattatgataggaagcgaaggaattctacaaagaggattccattacctctctgatcctgttcagcttagcagcagcatgtttcatgtccattctttctgatgggttttcctttgaacatgagacaccgacttctattacagaagataagcaagttagtatctctgcatcggtgtcatactgttccacgtgcaacagtgctgggtcaatgatttctgatattttttcaggcaaggtcatctcagcatgtaagtgcagggtcaagccttctctgaacatattatcagttggggccttccctgtgaacatctcaagcagagtaatcccaaagctgtaggcatcaccaacaacagatgcttgcccacctgctccatattctgcaagaatagaaacatgaggacaagtcgttattattttcagagagatgataaaataatggtccagaatacaagacaaattagttgatcaagaaatgtgattactgaaatagtggtgctacctggagcaacatatcctatggttcctcttatcccaacagtgctgctgtccccagcactcaaaccagatttttctatggattcgccaaccagctttgcaagtccaaagtcagcaacataagcagtccagtcagcactaaggaggatgttgctaggcttcaaatcacaatgaatcactgtcgggcaactgttgttgtgaagatggtctattgcatcggcaacatcaacagcgatgtttaacagttgggcaatgctcaacttgtgtgtctgctcatggattcttgggtgcagccacctgtccaggctgtacttgggcatgaactcgaacactagagctcggaagtcattgcctctggaatccatactagagcagcaggtgataatcttgatcaagttccgatgtttcacattcctcagagcctcacattctgccatgaaacttcgggaagaactagcatgctgaagagtgaacactttgacagccacaacaacattcacagcagatggaagagacagatttcctctgtacactgatccatattttccagctcctattagatttgcaggtgcaaaaccatctgtagcttcaaatagttcgtggtatgaaactctaggatacttttcattcaacataaggtcacttgtagcattcttcctgtccgtttgttttctccctttgaacagaaagagtgcgacgcacagaagagatgagcatataacaattccagagacaagaagcagaatcctaagcagcatctgtttttgcaacttatgtggcttgacctcgcatggaggcaaattcagttctgcaatgcccccacaaagcgcataatttcctagtactgagaacccactcatgttggcaaacaaaccatgtgatggcacctcaccactgagatgattataggagaggtctagctctatcagggcacttgatttctcaagaaattgtggaatggttcctgataggttgttatgagccaggtatagctgctgcaaaccatgaatgttgctcagctgttgtgggatgctaccggacagtgcgtttctcgtcaaattcaagatgctcaagcctctcaaattaccaagtgatggagggatgctccctgtgaagtggttgctgtctagagctaagtatactaaacttgcacagtcgccaagtgttgttggtattttacctgataagttgtttcttgacagagacagcgttgtcgcgcgcctcaggttgccaacttttggaggaagagcaccagagagataattatcagaaagcaacagtgaatcagtcagtgaagggaggctgaagattacatcagggatagactcaactagcctgttagaggataaatccaggtttgttaacctctccatgcttccaaggcttttaggaatggagccatttagctgattgtttgacaagtcaagagtcagaagttgtgtgagattgccaatggaaaatggaatgcctcctgacatgttattcatgttcagccacaataccttcagattccgaagtctgccaatatcaccaggaatatcaccaaacagattattaccttggaattctaagtcctcaattcctttaaggctcccaatacctggaggaattatcccagagatttggttttttgccatgcttagccactggattgaccttgataaattagcaataaaacttggaagtattcccccaagggtgttgtcactaagatctatcacctgaagtcgggtgcagtttgtgaaatatctcaggaactcccaatccccagcatcattagcttgcagcttgttactccccatttgaacacttactgggcacagttttcctatctcaggaggtatcctcccttcaaagctattcctagcaagacccagtacttggatttcagtggcattagagagggaggcagggattgttccagagaagttgttgccaatgccgcccaaacggagcacttgaaggtttggtaggcgtgttcctgcatcgggtggcaatctgccgtgcagcttgtttgaactgaaaccaaggtattgaagagacgatatgttgaagaacagaggtggtagtgtgccagagaggctgttcctcgaggcttggatatattgcagatatctcaagccggaaaggccctctggtatggttccttccagctgattctgatagagtgctatttgtagaagcatggtaaggttgccgagcgatggagggacagttcctgtgagattattctcaccaaggtaaagaactttcagctgcaacaacgatcccagacagctcggaatcgccccatggagctcattggcctccacactgaggaacacaaggttggaacagttgcagagcccaacaggaaggtcaccactgaagtcgttgtatgctaactcaagatagtgcaggcgatgtagctgactggtgaagtacacatctccagagagtgtgttgttgaagagatcgaggctctgaagaaaagtgaggttgccaatgacaggagagatgcttcctgcgagacctaatgaactcagatttaaagaggttaccctgcccggatgccggcggctgcatgtcacgccaccccaccggcagaagtcggagccggtactgccattccatgagctcagtgagcccaactggtctgacactgacagcgccgccctgaattgcagtagtgcttctctgtcactgtactcgtcaggaagtgaggaagaaggcaccggccagagtgtgaggaggagcatcagcagtgggatgatacgacgaagaattggaatcgccatggtttccagtgtgcagcacaatacgagcaaaggtttcctttatatggtgggtggatgtaaacgctcgtttccagtgttagcagtgtaccaggtaccattgtactgtgaagttggttagcagttgggttggttgcgctaatagacctgatcaacgtcttaaagaacgacgaggacgagaagacctgcgagcattgactttacagcaacttttctttacgctaattggaggccctgctttaattttaggagaaaaaaatataaaagctggaaattcttgtgttgatcgggaaaattcgcacatcaaaatgtgaaaaatgaaagcattttgacagttgatgtagcaaacaagctgtcatgcatttgtacggttggattatgtccaaggttgctccacgagcgcaaagccggactcagatttgcatgcctaaatttttttcgagtccggtgatgctcacaacaaatctataaacaatgaacctcgaattgtatcagttccacgaagactgtcgaaggggtcatcagtgcgttaagcggtgtgcacacttatagcataggcttgttgatgaagttgtcacgggaaatcatcgttgccgcgaccccctatccatctcactccattactgttgtattgttccgtttgtagggtcacttttttagttcaattccattttacttaatgtctctacctcgtttcgacgtgctttgccatatcccgcttggctacgccgtctctcatcatgtcttgccatgcctcgtttggctttgccttatctcaccaagcaccatttgatttcgttgcttttcgccacgctccgctcttgtaacccgactcaataggccagacgaagggcctcatagcctgccaccaataatattaaaaaatattcccactatcatgaaatttcattatggtataataaatttacttttatattagaaatgaaaactacaagtttaatctatctatattatgaatataacaatttaggtcaaatcctaaccttttacatgccatttctaacatcatatattgattatgtcattatacataacttcacatacattgataactaaattatatcgatgattgtcatgataaataaaatgtacctaattatgagttctattctaagaaaacactccaatatgaaatcgtgataagtcacaacaacattattagatctatcatgaaaactactttcatgtattcatatttttagaatttattatgaacacattgcaagaaaacaagtagaaaaggtggatacaaagctttgcgataatttgatcacatagtaaacctttgtattaaagaggctatatattaaaacatttgattaatccatcttagggtatgtacaacggtctttattagtggactctctctattaccatgcaagtaaatttggtaacatggaagaaagagaggaaaaaagaaaaacatgattgctacccatgacaacggctcttaatcgactcttagcatttattagacgaaattttgtttcatggggtgaaaaaagggaaaaagagtaagaaaaaattatttctatacattaatggttagagaccatattgtcttaactgttttaagaggtttacaaggtgggtgttttttaaatgctattttttctgaagtactatgtgagaaagtaggtatcaaaacaatttgtctgagattttctttaatagaattatcgaatgatgagttgcacttaacgaaattttgctatagtagtacttgatgaaaacatacttaaatatttttttcatgtcatgtttggacaaaaacctttaatgaggtaccgtatattattaccacgtcatgattcaattttagaatgaacaacattacaaacaatattacgtttaggaaactagaccaagaccgtgtaagaccctggttccgaaatcggtaggattggacatgcatgtgcatattaccccacttacatttctatcccgtgtaaaatggttaatcgattgttgcagcaatttccatagcatatatgagcatcaacaacaccacttctgtggactgcaaacaggttagggagtcacgggttggaggccagctgaactatgatatcttccacaggaacctctaaacttaatattaatcagtgccatcacatttagttaaatttatcgtaaaatgcaataaaattgtgaatgatcaattggacactaatataaaccatgataaaatgctcctgggtcattacgaaattagtagagatatcaaaatttaaataattggttttatattatccaaagatctttgatccattgtagtcttattccccaaagttcatatatgtaaccaaggccttgtactctttacatgtagtcaatctttaaaggaacatgaccaaccacatgacatgggactaactaactatactacgaacattttacgagaacaccatactgaaagttcccctaaaaactatttcccgtccgcatcgctcccatcccaggggcgacacggacggcgcctcattctcctccgcctcagtccttgcggccggccggcttaccctccctcctcctcccctttgccttgccgccgcctaagcggctcgtcggcaaagccagccggccgcaaggactgcggcggcggggccctctctctccccaacgaggaagccagcgcgctgggacaccggggctgctcggtagcggcggttcacggcgccggaggcggcggccggggggttggtgcggcggatccggcgacgccggaggtggatctgcctcccccggtggtggatctggcctccccgcgaccaggggctgagcgacggcggccagaggaggcgacggatgcgcgccgccgaggacggatgtggcgacggcggcaaaggcccgcgggggtgaggccaaatccggtcctcccacgggcgacggcagcaaaggtctagggtggcaacggcggtggcggaggtccacgggcagcgagatttgtactcaatggaccctaatgtacatcccaaatgttcaagatttgtgaatataacccagctatgaactatcatgtaagcgtttgacattatataaatagggttaattggatccatgccattataaattttatggttttgaaatatgccattactatttacctaattgtaaccataccattacaatttctcaaatattggagctatgccactacatacattttcactgcattttctaatttttttaggaccaaactaccccttcttcttcttcttcttccatctcccatctcactccatatatatcttctctcctgttcatcgatctccttttccactgccaagctcaacctgctgctctaaccggcaaggaagcaaagatggtgctgttatggaggaagaaaagacccacgagcaggaagacgtagtcgagcagcacagttcagaggcatcgtcaagaacagaggaggaggggatacacgcgcttgacccgagttggaagccgaggagagagagagagagagagaggatattctcgccgccggcgagcaccgtcgtacccgtgccaccctcttcgcatgtatggaggaatccaatgcggcggcggcggcggccaaacggcgagacccccggcggcgtgctccctgccagctctgctggcaacggcggcagccctcagcctgctgcagctcttcatgagcttgtcagggtaagttggctggaatagaagacagagaaagaagaaagaagatatggctattttggtccaaaatttttataaaatacggtgaaatgatatttagtgcatgtctccaatatttgtgaaattgtaatggcatggttataattaggtaaatagtaatggcatatttcaaaaacataaaatttataatggcatagatccaattaatcctaaaaataggagtgaattacatcttgggctaggtattattaccaaaatttcagtttggactaggatgcaaccaatattttcactttgggctagggaatgtaacttttgtttcagtttagacctccctaatctctcaatctctatcttgtccgctcctagctcctcaccaacgcggctatattgaggtgaggaagggagaagcctatggtgagcaggtgaggtccatctgttcacaaccgatcaagctccatatgcctaagctgcatgtgccaaagctgacttttaagtcattacaaccgctgcccctacggccaacggcgggtagtggcgttgcgtcggcgacggaggaccttcgggggtggtgggggcggcggcgaccaagttgaggtggtggcccggaacgactgcagcacccgtcggcggccgcagccctaggggcatcggcagctcccgtcggtgctgacggccctaggggctatggcggaggacggcagcggctcacgtcgacgccggcggccctaggagctgcaatgccctgggacggcggtggctcccgtcggcaccggcgttcctaggggctgcggcggagaaacggcggcggttcacgttggcgccggtggccctggggccgcgagccccgggatggcagcggctcccgccgaggccagcaaccctagtgtcagggttatggatactacacacctaatagtaattgactaagctcggcaaagcccaccacatgccatgtcttatatggaaaaaacctcgtatatagaaggagttccggataaggaaggacaaatagagttctatatggaaacgacaagaactactcggatcgtatccatatttatctccctaattctacttggacaagagatcatctatggatataaatacaagccccctaggaggagaggggagacacccaccacaatctacgaagccacaagccaatatgctgccagatctcgacatcagagatgagcctagccataccccatccggtgcctacgggagctggcaagagggatctagcgttatctctgatctcgacgagtacggattcgaggaggaagactaccgtgttgttgactatgagttggttatctaactgctaagtcgacgacaactctctaggttatcccaaatattgtatttgtgtgattcagatgaataaagagcaacaccggcttcggccaacaggatgtagagctattacctgtaatataatgggcctgaacctttataaaaatctctgtctccatctcttttacctcaatctcgcatataccctggtaccaacgatccccataccatccaaataccgtagtcgcgatatcagacgtcgacatctaggggctgtggcggaggatggcggcggttcaggtcggcaccggcggcccaaggggcagcggcgccccaggacggtggtggcttgagcactttggatagaggaggcttaggaatccggcaaagtggaagtcgatcccgtctgttcgtgtttggttggctagttctgactaaatgatgaacgacgatgattgaaagtaggctaactgacggcgtgtggcgtcaactcacctgaaacggataaagatggcatttatggaggtttgcattgacagagcactaggggtgacggtgactagatgtcttttactcgtcaaatctggtcatttcatgagaatatggcgggaaggagggatgtgtcgaccaacgttgtttggttttctttttcttttttggttgtgtgttctcctacttgttgatgtgtgagtctaagtgttatatcattttggctttgtatattcttcgtggatatagaggtcggattaatgaaaatctattattaaaaaaaaagcagaggacaaaagaaaattgtcgagcaatcgaacccacgtctgcagaaattagcaccatatacaatccttacatttattcgaaatgcagaataacataacatacaataccctaaatttgttcgaatcacatggataactcacccgcacacaccgtcacacacacacatcacaaacttactttaattaggctgatgccccaaactattggctccttaagcaaaactacctgtaatcagtcccagtgacttgctcacaatactagaaatggactcttcatgctcaaaagcaccaacacccgaatggaacaacaaaaaattttcaatctttgttgccgtctctgctgtttctttaagtatgatgtccatttcgtgcttcttaaacaccacaatatacgccgggttcttttccatcatccaattcatttgctgaattacaacccttcttacccctggaaaatcagcagttggagacttgtacacagttaatatcatcttaagcttcagcacgaactcgtcaactgtaatattggcactcctgagtgcatcggtgaaaaccatttcatccccgttggtgcaaatttgcacggtgagcccaataaaggactccagtagtttgcctttgccctctgcagaatctattagctcttgcgcctgcacatgcacccacgagtttaaatacatctcgtttccacagcacgatgagacttttaaaggtgaactttcaatttaaaacaactgaagaaaagtttttgctagatccctacataaagatgggaaaattctttatggaagcccttgcaatctgttgttggaacatctggagtagaagaaatgatctcatatttaatggtgttcaagtaaactttggcaaatggaaatcagatttcaaagaggattttactctacataagcatagagtaaaggaagttgacaaaccaatttggcaatcatggattcaaaacatagtttaattcttgtctctttgttgtaacgctatccccctgtcttatagtctctttcttgtatagctcttcatgtatttattttcttttaataaagcgcagtaggagcctctcctactgtttttcccgtcaaaaagaaaaagatggaaaaatggagaatttatagtattcttacatgtgaagaatgatcatcagaagaatctgactcaatttttgactctgctaggtcgatcgtctctagtacctgtgacaatattgtagcttttataagaaccataaagtttatgcaataatgcaatttgttaaacagaagtaatatggctttcatttcagtaggagtacaaagatctggttacatcgaagaaatttataattacttcatctatatcataatttcaatctcaatgtataaaatcttggacccaaacatacctttggcagtgctttatcaattatcttgaacaactcagtgtattctgctccttggtaggccctaagattctgcaggagtttccctactcctatcctatgatctgcagactcatcagagagtacatgaacaatattttccatgtcttccaccattgtttctgccagtatggcctgaacattgctttctctcacaatactgagcacaatcttttctttaaaatgagtagtaagcaaaactaacgcttcagttgctaaagtttccatcatctttctagggatgggatcttgaacaacattcatttctcctgcgaggaaagagatgagcatccgaacaattaggcgagagtttctgatctcctttcttgcagtatcatccgctgctaagaatgcaaggattcctgttacttgaacaagcagatcagcttgttggctttcagtatggtcagttagcaactttttgatgacttccatgatgtgcaaatttccagacacttggcgccgaagctcctccccagcttcaccagcttgagccagggtttcaaaaaccgccgggggcccggttaccgccacccggcggtacggcggttaccggcggtaaccgcggtaaccgcgcaaaaccgcgacaaatttacaaatcgaaatttgaattcaaaaattcgggcaaaccgcgcggtttggcgcggttaccgcgcggtttgacgcggtaaccacgcggtttggcgcggttaccgcgcgatgtgtaatgggttgcacagtaccgggccggcccatttttttttcttttcccaattttcaaatttattctccgttttgctctcaaatttgaataaatattactcttttttgagaaatttcttcaccataaaacactataaatcaagcactaccttcactattttttttgatttttttctttttttttaaatttttgaatttggacgaattttattaaaccgtaccgcgcggtacgggtaaccgtacccccgcggtacggacggtaaccgcggtaaccgcgcggttaccggcggtttttcacaccctggcttgagcaaggccttaagtgagctatgaactatttcaaagtcaagtttacagtccaatctgccttctctggtgagttcaataatatttggaatcagatccttggcatctttcacttgtgtgcagttgtcctgatcatccacaagcttctcaagaatctgcacgccaagcagcttgaactctttcatcacagtgattcaggggcggatctacccattaggcggggtgggtcgaccgactcagctacgactcgtgttgccccacactttcaagaccaccttattcttttatagtagtcatggaccatcaaaattaggtataacaaggtataaacatccaacagattgagacacttatacgaataaactattaatacgatatgtgttgtgttcgattgctcttatcgagtgaacatctccgttctccgtcccatctatattttaaagctgcgtccgccactgcagtgattgggttgctggagctttcactgtttgtggcccccttgtttgtgctgagcagtgaggagattgcaggcaggataccaggaaagctctccacctggaggtcaggcgcgagctccagcaatacgcgtgcagcatgccctcttgtgtctgtatccatgtctatcttcaagctcagcatgtggactgccatctgaattgtgccaatggaaactcgaatcttcttcagcaccctctgtttgtacattttgcttctgagaaggtggtcgacaatacgaaatcctataagctggttctctattgagtcggaacttagcagctcgtttgaaaagctaaccaaatccatgctgaccgcaccacgaagatcaccactgacgcatttcagaagacattcctcaacatagcgagcaagagatagcacaccccaaaatcccagcttatatgtgaggccaactcgtagcatccgtttcaacgggtttgccaagatcgaaaccaggaaatagacaatgcactgggagagcgccaatccatagaagatgttcagggaccatctgatgttcttatggtcatcgttttgttgatagattggatcgacataatcttgccttttcaggcgcaacgaactgataaccatggtaccgatcactgcagccagctgtgcatatccaagggtggtctgatataggaccgccaagcaggagcgaccattgatgaaggccgaaaacaactccaaaaatatttttgtgtagtcgtcaggcttctcttcgtcgcttctatacctccgccagcttccgcgcccaagtacagcaattctgtcagccttgatgattgcttcaggaaggccaatgaagaattggtcctcgggtttggaagtgttgaaaaacctgccaagttaaatgtgattatgctaaactagtcaaaaactcgtggatttgcacgaactattaatttaacctatatttataaaaattaatactctcttcgttttatattataagtcgtttgacttttttttctctaagtttaattaaatttatagaaaaaattggcaatatctaaaatatcaaattagtttcaataaatctaacattgaatatatctattatctattctattatattattaaaacagctttgaaagaaggcaccacgttcactgtgggggctaaaaattaccacattaaacggagaaaaagaaaaaaaaagaaaagaagagtccaagtagaaatacaatcttaaaaatagctgaaattcggaattaaaataatcaatattgaaagaaggttccacataagaaaccaatacgagattaatcaaaattcgaaataaaaataaaataaaatccaaaattagaaaaaaaaagggagaatccaagtagaaatacaatctaaaaatagctgaaattcggaattaaaaataagcaatattgaaaaaagtttctatataagaacccaatacgagattaatcaaaattcgaaataaaaataaaataaaatctaaaattagaaaagaaaaggatagtccaagtaggaatacaattttaaaatagctgaaattcggaattaaaaataagaaatattaaaagaagagtccatataagaacccaatatgagattcattaaaattaggaataaaaataaaaataaaatccaaaattagaaaaaaaaaagaagagttcaagtaggaatacaatttaaaattagctgaaattcagaattaaaaataagcaatattgaaagaagaatccatataagaacccaatacaagattaattaaaattcagaagaaaaaaataatataatatccaaaattagaaaaattaaaagagagttcaagtaggaatacattttgaaacaactgaaatcgaaaataaaaaaaaaagaacacaatacgatattaattaaaatttgagaaaacaaataaattctgaaactaaaaaaataaaaataagatttcaattaggaatacaatttataaataactaaaatttgggataaaaataaagactatcgaaagaaaagactatctaagacacatgatgagataaattaagtaacatgcctataaaagagtagagtggtggcggttgatacgtcatataaaaattattaataaaacaccaaatagatcctaatgacgattaaaaggaggagggataaccggtaggccgtgaagcaaatgagaaaggtggttgccaggacttctaaaaagtaaaaaaagaaaaccccattgattatcatattcgatttttaaaatctcaatgattataaaaaggagaagcagcgagcgaggtgtataggagtatagttgcagagccgccaacggttgatgagacttctagaaaataaaaaataaattccaacgatagttatgttcgatttctagaatcacaatgacaataaagagtaataaagagtaggtggcggacgggctgtataggagcatagtggcatcgttttacaggacttctaaaaattataaaaaatgaaacccaacaagacaataaactctataaactacaatgtccattttttaaaggttcggaacttctaaaaagtaaaaaaaaacaatgataatcatgttcgattttaaatcttaatgacaataaagaagggaggcagcgggcgagccatagataagtacaatgtcaaagccgctgacggtttggcgggacttctagaaagtaaaaatgaacccaaacgataattatgttcgactttttaaatgtcaatgataataaagagaagagacagtggacaggccgtagatagtgaacatgccatagaggagtataatggcaacatttaacgggacaactagaaattataaaaacgaaacccaacgtgacaataaactctaaaaactataagatccaatttttaaatgttccaaggagaatgaatagaaatagtaatagatcgtgcaagcaaataaaggaggagatgacaaaaagggtagcaactggtgtgacttttaaaaactatataattagaaacacggggacgataagatttggtctttcaaagttttaagacaatgagatagctatttaataaatttaaagtaaaatcatacttaaaaaaatatatgattttgtttgggtgctagccgcgcatttgcgcgggccacccagctagttttaataatatatttgttttgcgttaaaaatactactatatttttttattatcttagtcaaacttaaaaaagtatatctagaaaaaaagtctaatgacttataagatgaatcgaacagagtattaatcaaacatctattgaatacttttcagtacattcgaattcgcatacaaaagaactctcttctcaatttgcggtccttgcggatcatcgaccgtggccatggctagttcacggtgccctccgtgccgccgacggcagcaggccgggacaaggacgtcctcatgtgtttgatcgttgattcggatcacggaggccggggagagaggtgcttcctcctcgtcctcgttctccatggccatgattcctcgcggcgggcggctggtggctcacgccggcatgcgcaggcgcagcctcactggacgagaaaaagacggggaggcgcaggaggacgggattcatgggtaggagaggggcaactggcggcggcccacaatatcggattcgtatctttatctacaatatcagatatctcgaccctctagttataaaagtcagtgcgatttatctctctcgacggttttactgacgtgacagtgttaacttgatcttcatcctacgtaatgcatatgtagcattagaataaaaaggtcatatgtggaacccatttatgaaacccactaacatgtggcccacatgtcatcctctctcttcaacccttcttcctcctcccttatctctctctttctcctcccttcggccatggcgcggnncccgaacggaagggcttatgcaagaacggacggcctactcgccaccttcaaccccatgaccgggaagaagtacgagctgggatactgcaccagctccgacgagccggagccacgggcgcatcgttgctcgtggcatgggtgggttctcggaaaggagggcgacgacgaggttttcttgctaaacccaacgaaagggcgcatcatgcatctcccgccaatgacgagagggcccttcttcggcagcatatctttcacctccgtgctgggatcccctgattaatttaatggtggtgtgcgccagcgagtggcaaggcatcgagacaacgagggtgaagacaggcgtcagggagacgaggactggacagcgaaagacttcgaccacaacccgccgtttccactgtcttttcacaaccctctcctgttcccgttcgacgacgagtgttcatgttcaacccgagcaacatgacatggagttttattgagaagccggagccactctacgacgagacggacatagaatggaacgagagctgctatctcttggagtggacaggccagctcatcgccatcttcaccgcgcttattcaggggctcgccacggccgaagggaaaaggaaagagagataagggagagatgagaggaaggaggaagaagtgttaaaagagaggatgatacgtggccctataatattctttttgacggataaatgggtcacacatattcttttaattttaatgtcacataaacgccacgtaaaatgaagactaagtcaacactatcggtttcaatagctcggggagatatccacttgtggtttagggatatgaatatgattcgaccgttaagagagagtccaactgcacttattctggttattattgagacattgagctcggctgttgtgggccttgtgggctgtcaggttgtggccgaatcaggccgaatggcctatcgggctgctattgctttgctatggttttgtgggctgtacctcgttttcctcgggatatttctgccgagccaggttaagagagttttcaagttactttctcatagtacttattatttttttaataataatacttattgttttggataacactattataaaactttaaaaactttaactataaataacatctgaaatatttgtttttcaaatatagtaaacatatatatgtatattggtctcaaaaagtgctacaacaaaatcatatatttattgatatctctatatatattgtaataaaaaaacatgtattaccagcccataggaagtactcactactaaaaaacgattttcatgtacagggacccatttaaattgcaaacggattataactggctgcgtatgtgaaaattgtcctctattttcgtgtgcggctccttaagaggaccgcacggaaaaattgatttttgcatgcgcacatcttaaatggaccatgcacaaaagtgagcctattttcacaagcggacctattaaaaggtccacacgcaaaaatacccctccctcttttccctcttactcactttaaattttctcctctttctctcctctcctctctatctctttctcttctctcctctcctctttttcctctcctttctacgcggcctcactcctctcctctcctctctcctgacagcgacagcggcagcggcgggtgtaggcaacggcggcggcgatggcaacagtgggtgtaggcgacgacgacagaagggatgagctacggcgcgcggcggtgtcctccacgctctaccgcgcacggtgggccccacagttaggatacgcgtaggctacgatagcataaatcaaaattttctatcgcgtaaatcaggaaccatgcaagtattagatcatagattgttaccactcgacgcgctgcgcagcggaagaagacgctgagaagtcgaaggaactctcgcgaagtagcgcgtgtcgatgtagaggaagtagtcgatcgcaccggctcgaccttctcctcctcgtgcgttctcctcgccgtactcccacgccgatcagcaccgcaaaccagtggcgcctctaccggtatccacacgtacagggacggaacgccacgcgcagatatgctagcacccgcgcgcggctagggttttgctcggggagggaagtgacggctagggtttctcacgtgatgcaatacctccgccggtcacacccctcacgaatatgtaggatccatcactcgggcctccaaggcccgtatgacttctattcggatcctatccgaattaagcttatattggatatccatccaatccccttattttcaggccattaattgtgcgaccctgtaggttcatgtatactcagctgtaacccgaaaaccctttttcgatccacgtgtcaatagcggcccccagcagaacgtattgacccaccgggcatacataaaaatcatatcggctgaacctctagtgtatacttgtataaacccctttgcctcacaatattgattaagctcaaggctagatatgtgccatcctctaatagctcaattattcactcgaacctgttaatagattatataacttgtgattgactcctcaatcacctttggcatggccatgcacttccataatctacaacatcgaggggcccagacatatctctccataggaggggcaaatcccatcttgattattcatatcccactacatgtttcatagcatacccgaaaactacttttataactacccaattacggagtagcgtttagcagtccctaagtaagctactacacatgttgagaatcatgataatctcagatctaagaattcaacaccaacactaaatgagatcaccgatgacacaacacatatggctcttgtagtgtctcatgttgggtctatccaacaacatgttcaccaacatgtgtccacattattaatttggtatctctataccatgatccatgagacatgatcatcaattaatacatgtgctgatcatctaaacatatttgttccgcatatgatatttgatcagggatcctttagaaatagcaacacataacataaagagtctcatgaaagaatcacatattcattaaccaataataagttatctatttcaaggaacaatgtcggataaatatcactactggagaaatgatctttggagggtcgagcgatttccacaatagtcccggttctaataagaaccgggactaaagattgtttttagtcccggttaaaaaaattgatctttactcccggttggtgttatcaaccaggactaaagatgatctttagtcccggttcatcctctgtcagaagcctgacagggggccgaggatctttagtcccggttgataataccaaccgggactaaagattaccactttagtcccggttggtactatcaaccgggagtaaagatcatttagataccaaccgggactaaagatttaccttt

SEQ ID NO: 5506 - DNA, 11099 bp, Oryza sativa
cgaaatttcagggaccatattagcttattcaccccaaatcattagtcgaccatgggatatttgtttcgttataaatccattgaagttcatattttggcaattaaccatattttgactaaacagacaattgacaagaagatcggtgagttttctaactgccatattgtttattctggaatcgatttccagaaggttagttttcccttatcattttctaatctgttgcatttaagtaatatcactataatatttgcaatagatgaatctgctggtgggtaaaaaatgctcttatctttggtagaaggagcattttagttgatatcattgtgaaatatgccttgtgtatgtcacatgttataaacatgtatacctctatcatgtgccaagaatgcattacaaaaatattgatgtttacttgcaactctttttaatggaataactacttatcaggtcagtaaattttgaggcatacctttgttctaattaatgaggaatacatccaatgtgcataatgttaagtaacgacgtcatgtagggaaatatgggtattttagtttactaaaatctgaaaaagcatacctttaatttgtggtgctttatgcagagacaaattaaggtgctataacctcttgctctgcatcttactccaccgccaggtctgctaccctattgttccagggacatatttgcttgacacttaacagtatatatagatgcatgttaaattattttaccttcaacatagattggacatgtgcacgctactcatatgtttgtattagatgatttgccaggccgaaacgtataatactagctgaccatgtgtttattaaaatgcttcagatatatcattaatttattttccatcatttagcttcttctttcagtaaatgtgatcataccaagagatatcgagatcgtttaagctgaaaatcccttattaaaaaatgatcattggtttcatcatatttattttatttcaatgatatgtttgcttatgtttcattcatggattggaatttgattttcaaaactaattgttttcaagctgaagcctttaatcaatcaagacgatctggatgaatgatcccgcttcagtttggagatatatgaaataattgcagatttataattatacattcttattacttctaaaacttagtattctttgtaaatggagatgacaacaatgttgtatttttctgaattctttgttatggttctacttggtgaatttctatattttctttaattttcattttgtatggaaataaaaatgaggcgtcttctccatttcaattatttattcatgtaacatggatttcgtctgcattgtttactctgaatctctgattgaacgctctaaggtgttgtctattttttattttcaacatgaatgaagttgcaatgaagcttacagttttctttgttttatctttgaaacaaaaaatggaccttattggacacaattttcactgccaaatattaggttaaagcaagatgtaatgcatacatattgattgttcacctatatatattaagttgaagcatgatataatacagagaacgtgcattgcacgtgcatgattactagtcatcaataaagcatggattgatccaaccaccactacctctccattcttgtcaccagcattttcttcatgtgtgtcacatctctctatctccccctctcgactatcaacctccatggtagtcaagaatttcttaagaaattggtcaagatatttacttttataatagggctcaaactctcgaaatgtcgcatccatactcacaaacaatctcctcccaatgggatcccaacatttataccccttctgacttgaagcgtagtcaacaaacacacattttgttgcatgaggatccaacttgccaccaaaaggtcgatgatctcgcacaaagcatacacaaccaaacacttttggagggaccttgaactctcgcttacccaataaaagttcggtaggtgacttcataccaagtatcctagatggcatgcgattgataagatatgcaactgttattacagcctcactccataaatactttggcacattcatttggaatattagagatcttgcaacttctagcaaatgtcgattcttcctctcaactacaccattttgaggaggggttacagggcaagtgaataatccctttatctgagacatatgacacaaattcattattgatatattctgttccattattaggccaaataatcctaacttttgcatcaaattgagtagtcactaatttatggaagtcctagaagcatcgaaagacctcactcttgtgcttaagcatataaatccaagtcatacgagtatgacaatcaataaaggtgacaaaccacttgaaactactcacaaaagtaactgggcatggtccccaaatatcagaatgtattaatatgaatggttcacagttatgaaggctaattccaacatatgtaaagtgagtatgtttgctaagctcacaagcatcacacaccagtctatgcttatccactctaataaataggtctggatacaacttactcaaaatcttaaaagatggatatcctaactgacaatgaagcaaaatgatctcctaccactgcagttagtcccagctcctcatgattgatgtaccacaacccatcacgcctgtaacgccccgattttcgttcaggattaaaaatcatttaataatgcatttcctagaaattaaataaaaatttaagcaatttatttgagtgaattaatgggagaattaaaattttcccttaaaaatcattggccgggaatattttgcaatattctttgtgccctaaaatactctctgaaatttcccgtgaattttcggagctcaagaaataatttaaatagcacaaagttcatttaaccaattagaataaaaagaaaagaaaataatcttccccttccttcctttcgggctcggcccaaattcctcccctcctccttcctaggccgggcttcccttcctcggcccgctcggctctctctcttcctcaagtctacatttcctccctagcccgttttcccctccccctctctccgacaggtgggccccacatgtcatctcctacctccagctccatccccaaccgccgccatggccgccaaatcctcccacgtcaccgcctctcccgcgcgactccctctcccgcgcgtgcgtggacgcggtcgtcgcccacgtccgcgccgtttccccccactctccccgcaaaatccggccacgtcgccgcctcccgcctctctctctcctcccacatcgccggccggtttctacctctctcgggctcgatcccgcctcccctcccctataaaaacattccccgcacctccctctccatttcccccctctcccgagccctcccgtgcacgaaaaccaccccgccaccgttgcacctcccgccgccgctcgccgacgaccctccagccggtcgccacagccgctcccaccaccgtcgttccgcgcgaccgccaccagcggcttcgccgcgtcgtgccacaccccggcgtccgctccatttcccctccccgcctccgaagcaccatcgccacgcgcaccacctccttccaccgaagccgccgactccagccgccgcttggcgccgctcctagccaccccaagtcgcgctgtcgccgccgctcgcttcgcagcgccgaggagcacctcggccgccgcttttcacggccgggatcccgccggaacacggttcccctcgcgccggtgagcatccgccgcccattctcccctccgaccagcgattcatgccgctgggagccctctctccccctcctaacctctcccccatcctccccaggtccttccagccgccgtctgccggttcccgctcgcggaacgccgccgggccgccgttccgccttcatcccgaggagcgccgacgccgagctcccccccccccccgcctttccccgcccctcatcgccgcgtccttggtgagctcctcctctccctccttgcctccctcctctgtctcccgtgcgcgctgtcgcgccggtggccgccgccggcgaccaccaggccgtgcgccgctgccattaggtcggccggccggcttgccgccgccccgctcgcctgggccgcccggatccccttgccgcgcctcaccgccgctttctcgcatgcaccggccgtcgccgcaggaggccgcgccgccgcgagccgtcgctcggccgggctggcctgagccgtgcccgtgctcaaccgcgccacccagtggtcccggtccacggtggaccgattcccttgacccgctgacgtgtggggcccgcctgtcggcgccggcctctttgatgacgtcagcgcttaagctttttcctttgagaaaataaataataattgcgcaataaatcgagtttaattctagaaattcatttaaatggctcaaaacttctaaaattcatacctaattcattcgaactccgaattgagccattcaacttgcaaaattcatctaaaattgagctctacatgtttgttttgtttttatgtactattttcttggtttttattagagtttttcctcgttttgcatgccagcgtgtagaatccgtcatttcggaagtccgcggtcgcgaggaaaagagttcggaagatcaaagtgaagaagcaaggcaagtcacacattccccttgagcatgttgatcccaatttacaaatgttttactgtttgcaaataaatatgcatgttttgctaattacatggggtcagggttttacctatctgctcgcttgtgccatgtttacttgatatctgtcctttgtcaaccatgggtaataaatcgcctagcttgtgttactttgatgacctagctagaactatatgcttagccatgcttaattaccactagctcagtcgatgggataattgcagtattagacattctagtatcttgttgagctgcgtgctcgagacatctggccatgcttcatggtcgtaattatccaactaaaatgcgactgaatggtgggctgtgggtgcatggtttttctagtcgcacccatggcaattaaggaccggttcgcgggatgccctggaagaacttatcgtacttaccacaagccagcgtgggcaacggctggacttatagtgtagctttcctctagctgacgcatccaggcaagggtgggcgtgatagagcggggcaggccctgcgacggcctctgtcgcttccggattcacctaggcacgagaggggactgcccgtcgcccgctagggacgggggtgaaacctgaggtgtggtgtgcttggctagagggggttatgtgaagggtcctgtcacggcctctttccggtatgtcatggtggcatgtcggcgcacggtaacgtgtcgtggggctgtgtcttgtgggtacagttgtacacctctgatcagagtaaaactattcgaatagccgtgcccgcggttatgggcggtcgaccagattcaccgtgattagtctcatacttaataaatcgacccaatacactgtagttcaggtgggttgattgggcctgttcaacgtggtgtagcgttgatcagtggagatttaatgttactctaattactcaacagttttactgtttcgctcaataaaatgttttacaaccgcctttatgcaaatagccacaaaccatccttgtatccccttgcacgtctgcatcgttggtgtggcttgctgagtacggtggttgtactcagccttgctattattcccccttttcagaagtgtagtgcttctgagctgaagacgaagttagaggaccaaggctcagaccctagttgagttttgcctgtggagtggagctgaagccctgctaggatcgcctttttccgctgctgctgctttcgtttcggtgcgaggactaagtgcctcttttgtaagtattttacgctttatttacgtttggaactgtatattacttgtcgttttgtgtaccctggctggtcctggacagggatttaatacacaaaatagtctggaaatttgggctatatttctgggcgtgacaaagtggtatcagagccaacttgactgtaggttgagccaaacggtcaaaccctaaggacaaactttctgaaaaccctatttgcaaaatgtctcctctcgcccttcggcatttccttgtgaaatggtttttaaaattctcctccctgtccctctaattcttttagctgtcaaacctgaaggacaagccatcagctttgtgcatgtttggaagtcaagtcaagctaagcctcaagcttcgtgcaaagagcgagaagatctgtccagagtcatcgttccgcgatgatcaataggagttttcccggagatgacctaaacccaatctttcccagaagagtagtttcgttagcttctagatcgtgtgttgtttgcttgtgtgtaggggtatggcttgcatcattggtagggatgcaaccatactaggttgtttgcttaagcaacttaaaccataaaaatctactcacaacagatcactaggtaagtggtttagtacctcatctctagtaaccccacccatttccccctctctctggtgcctgcagcagatggtcagcatgagggacaatttcatcgaatcaggaccctgtcagtttcatggggcaactcagtgcaattctaatagtattccacatcagcctcttgaagatcagcctcaaccccaagtcatggctaatcaaactcaaacagtggaagagttgttacaacagatgcgacgtcggtaccaaatataccagatgcaacggcaatgtcaggagtcgcgtcaatgtcaccaaccgcaggtgcaagtccagatgccagcccagaacccgaatcagagtcagagtcaggagttcccaatattggcaccgaagacccctgtcaaaatgctgtccagatccccgaagataacgacagccaagtcatcgtcagaccaaaggaaagtaagtgctacctgttatgactgtggtgagcaaggtcattatgtaaggaactgtccatggaaggtgttcgccaggtcgcctcactctagtcccaatcctccttccagtccccttctcctggaaaagacatgagttctcatcaaatgcaacaatgcacttgaattggtcaatagccgagctaaccgagagaaggttaactggaatggaaggaacatgcagaacaaaagataaatttattgatgtgcactcaaccgaccctataccatgaatagatttggatgtaccatcagcaatttggatagttttggagtggacataaggggtgtatgatgtgaaagtattatggaatcatgtggtatgctttgatgttcctgagtctatgatccaatctataggatgtctatatgtagatgcaagtgcttgtgcctgagtacctttgcctgcttgggtatggctagcgaagttaccgaagtaagtggtggtgttagaggtttcattggtcttgttcttctaccattcctcccactgtgtaacctgtttacccgttagggatatagctttaccatcctccatagctgcattagcctgaggtgcacctcggcctctaccatgatctccaatgcgacctccacggtcacctcctctaccaccatggcttcctccaaagccaccatgatttccaccaaatccaccataccatcctcgcattgatcccctaccaccactgtttcggggagtgggacaattgcagctcacatgacccacttggccacaattgtagcattccctatcatcagctacaatgtatgctgatcccataggatttgtacccctcatcaattttaacctcatttcctcctgtaccatggctgaaatggcctcttccatagtaggcaaagtagcctggtgaaacatagctgctcttctatcctcaaactcattgttcagccccttcaagaaatgaatgactcttcatcgttgcagccatttatttccaatcacaatatcttcatcatgcttcagttgcaggggatcataatgatctaaatctgcccataactgttgcaactcgctagcatactcttgaactgttctcccttcttgtttcaaattctctaccttgttttgagcctcaaccatcatcattacacttccctcttctgagtacatgctgctcaatgttttccatacaactgctgcattttgaatggtttctagcatccgagcaatagatggagccaccgaattcctcaaccatgacaccacggttgaatttgtagtattccacatcctccaagctgaactttccttatcagcaggctctttataatcctcctgcaaaaaatgatccaccccttttgccctcaacattagttgggccctccttgaccaactcaaacaattcttacttccttccaatctcaattcatttggcatcaattctagtttcaattcggctgatcctccacctctagtacctatcattcccaactttactagatcctccaacaaatctttcatctcatcctttatgacaagggatgatgaagcaatcactacttctttttcctgacttcccacaacaccttccccttgcatggtaggatccatttcttcctcacaacagagtattgaaccggaccaggcttcaggcccctctatcaccaaaaacaaaagacactcacctcaaactaacacttctgacagccttccctgctgaccacacatcccaaaagccacacagagcagcagcagcaactttctcctctcctccaccacacaaatcattagcagcagccgcctctcctcccccacacaaatcaacagcagtagccaccgcctcctttcgtccacgcgttgtgagggcgcacaaccccctctagccccccaggatgatgagccttggctatgactatggatgaagggaagggaagggattgggtggtggagtgaggctaggatttggctctgataccatcttgctcgatttggggaaattttcaaggtgtgttgcttctcctacacaccccctcctctattctattctctgaacattttacaaataggtcctagtcacaacacatatttataccaacaaaatccttatgtgtatactgtgttagtcccagatcaacactagcacgcacggtaacaaaagataatataacaaccacatcacaattttattaataaaaaggaattaaatataattttgagttgggtcttaagaccaggtagggcttgttaatctccctcaatcccctccccacccccccacccccaatttgtccatgaggattaaacgaacaaggcctaagtgtgtttagattgaagcaattggcaaaaaacgaagagcattcttgtggacacgagaggatacatgggacaaagtttgcctgccgaacgacaaaggtcgttcggggggataaaagacctgaagcttcagaatgaggcactgctcatcaagagatcgttccagctgcatcaatctgattcatcatgggcaaactggatctggagcaaatatggtgaaacctcaattgtgaaagaactctacctagctactccattggcgatcaatgcagaacctacttgaagctctgcagacactttcaactgttcgactaggggatggcacatgcacttctgccttcactgccactttgcgcgcctatcctgggaagccattggaacccgctcgtcaatacaggaggtgctctcaattactgcctgaagccaacgccaagactgcggaagagtgcactttcaggtgttttacctcatctgcatttgggttctgtggaacaattgacatgacgtcatctttagaaattcgaccttgtccatgggcaatgccatgaggaggtgcattgatgaggctggcctatgggccgagcgattgaaaagaaatgatagatgagtctatgtatgaaaaaaacttgttttcttcccctctccacactctcaacaggatgtaacccgacaatgttgcctttgttttctcctcccgtgacttagttcaaaaaaaatctgcaggttttggagttcatttgttatttctcttctggatttcacttaattcaaaatatttgttttaatctttttccttcctgggcgacacaatgctggtcagtttccacgccaacaaactatcacccatctctcatctcactgagattgtgccgcacctgtcagggccactattgttcattcctgatgaggaatctgcatacgtgccgcaggatcaaaattcgaaagcccagatgctctagaattctggattccagtggaggatggttcatgttgagtttattgtttgcagctatgcttgaaaataaattgatttttaaataactaagccagcatcaaccctagataccaatgtgatctcctttctgcccttatttaaaaggcattgttgatgaacgtgttatttgcatcaaatagataaacagaatattcaggtccaacacacttttattaactaattccgcaattagtttgatttaaaagtaagatatggcaggaagaaagtgcagaaaatgtacctttgcagctgaccttgacaactgatgttgggaaattcaacaagttaatcattttcctccagtgtgtaacgatggaattgcactcactgcccaacagtgaaaacaaaagtgagatcatatcaagaaactatcacttctgtacaaaggagagtaggacatggccccaaaatggaattgtcttaagagtaacaactttcagatgccatccactttaatgataaaaaatgggatcgacgaagaatgatcccagcaatataatcttcatggaacttgcaaactccaaatccatggagctaaatgcatacttcgctttaataccttaataacagaaggaaaatcagtagtttgaaaataattatttgtttctaaagataacagtacaatagagaaactgaccatatttggactggtgaggagcaatgcttggcattcacaattctctattgcaaatttcaggcatctcaattatatatcagaaaagcctgtagtattaaacagaaattatggctacaatagttcaatgctacatgccatttgttgatttcaaatatgctaacaatgccagcagggtttgaataattgtacata

SEQ ID NO: 5507 - DNA, 5844 bp, Oryza sativa
gttgtacaaagtactccactcttatatggaggagcaatagtaaagtagatgtttcaactactagggtatatgatatctgttaaatgaatttctgcatgcaagttgtggaattgtccttagatagttttggggtaaatagtgccaagagatgactgggtggtaactggtaatgacctctgatatgagtagagactagagatgagaattaacttgtttactgtttctttgcttgaaatttaatgcatgcagaaaatattgtaccgtgtcctgattctgaaccatacaaaatattaacttgcttattactagagactagagatgagaattgcaatccatgcatgtactgtgtcctgattctaaactacagaaaattttctatgaagaaaatgctgattgcttcgatgtttatgcctaacttgcaactattggctatttttgttacagccttatatgctcattatgaatttgtagtatgaacttgttaccgtgatactattttcttggatttcttttgagttactgcatctctatatgtgacttggtgtaaatgacatgtggacctggactcacttggtcattgagataatgagggactgcatagatattcagtggtgtatatggaataatccttgtctttggcatgccaatgatccaacattactagatacagctgctagggaaatttaagattggtttaacataaattgctgatttatccaaaaatttagattgtagatagtattaccttcataacaaacaagcaatgctctccagtatgtgtgaagttcattacgtctagaacttattacatacctattgccttttgttctatagaaaccaagttcttgttaatataccagttggtacttttactgtttttcttttttaagaagttattacactagttcaccatgtcaggaaatttctttacactgatgttttctctggattattccctttgttccagagaggtgtgatagatgagaagataaaaaagaaagaggagatggaacaatttgaggtaaactcatttgcatcatatattgatgtacatagagcaccttttcttgttgaactaagatttcagatactgctgtcagctgcatgaaaaatagttgttacctttccttttttttcatctgtaggtcgagcttaaagcaatgcgcgaggccgcagaatggaggcggctacaaggtaagtttgtgcagcgtctagttatcaacaaaaacaccaaaagccataaacacagaaaaaatacatgtatttttaggcttttagcaagaagattaactattccattttctttatggggcatacattattgggcgtgaagaaccaaatgtactgctccaaatatgaatccctataatgggccattgacaacacttatgtctaatttttaattatagggtataattgattatagctttgttgtaaggtttagattatagggctgagaaaattctagatatccttctaactgttcattcctctttgataatcttgtgaacttcactgatgttggactgttggtcttccgtggtttgatttgatacatgcagttattgagggcctatacactttcataacccgtaattttttgtgaggtcctagccgtctggtcatcatcttctgtttgttcagcatttgagtatttgatttttgcaatttaaagagttgaatattgttgtagactgggttatagggtaagggtccaaagagggcccagttcttttcttcaagggtaagggtctgaagactgggttatagggcacttgtcctctaataacgccagcaaggcttctccctgttatgcaaaagaaagcccatttcttttcttcaacttccttgttttctgttagcacgcttttcaacctgttaaatggtgtgttttttgcaaaaagtttctatatagaagttgtttaaaaatatatatttttttctatttttcaagtttataataattaatacttaattaatcatgtgctaatgagctttctcgttccgcgtgagcaaaaagtctctccaaacggagggaacaaacgcaggcttagcctcaggcttagagctaaagtctctccaaatgaattttgggattcattacttgattgataatatagtacaaggggtgccttcatatatagggaggaatgacttgacatccagtctcaaatattatagaaactaaatctaataatttactaacaaacttcatctccttcataacaattctggtccgagcaagttcttgataagaactgaagatggaagcatagttagaagaactatcatgatggcatatttgttgttattttgtttacaggtgtatctcttgagggtgatgatgaacttctggcagttccaaaacaggcacaggcacctaaaagagatgaatggatgaccacattgcctcctgaaagaaaagtaattgagtaaaatatactcattttactgttttatctccttctgaaaggaaaaaaaaagaaagtggttattttattgtgttctcttacatgtatgtttaactctccttttcagcctggagtaccaatgcattcgactacgtcatttagtatgaatggtaaagaaggacgtggtgatacaagtgtctggacagatactcctcttgaaagagctcaaaaagcacaacagaagtaagagttttgacactagctttcacatcatgatatcacacctttatcaatcaatattttgcatacctgctagtttagcaaatattggtgttgccttgtagagggcattaattggcatcctgtgcatgttactgagatggagagaacatagtgtcaactgtcaacacttcctaggggttagaaacttttttggccaaaaattgctacctaggctatttaaggaaaaggcgaaagcggattgagctcctgatatcaaggggctcatctgtttaaggacagggagggtactttaaaagattgaacaaagtgtatttaacccttgaactgttcagatacatccactttaccccctaaactagaaaactgtctatgggtccacattacaagactctttcttatcttctttcctttcctctctcactattctctgtcatttgttttcctctgcccaaatagtcctgttccgtgctggctcagtctactggtgctggcagtggcagtttctcgaagcctccccttatcatgtggttagctgtggttgcctgtgggtcccctttggctggccatggtaatcatggtctaccctactctgcacgatgatttctccagctgcacattgttcatgggaggagagatgggtgaccgggcttttctgaggtagggggattagcagtgtttagtgccttcaattcggatcaggtgatattggaggtttgcatagcaggtggggttgggggtaaggaatgaagaagctttatcagttgaattaattcctcatttaaataatgatttatcttttctttttttcactgagacatgccaaattataggctacaccacttttgatagtagctaaactacctcgaatggtcatctgctacataaggtgatggaattcatttattatggtatgaagtggacaatttcactcgtgctagtggccaaggctagtctttggcccttatattctatttggtgcggccattagcttttcaaatgatgtttccttgaaccttgaaatcttgaatgcagcatttggtaaaaagcatcttttttgaggtgattttttcttaaataggtatggttgaacttaggaagaagtgaaaacaggagagcccgtctttctaatgataattttgtttttgctattcagtacgatgccctttatgcactatgaatgcaatgatctacatggaataatattatcgtgcttgtcacagctacttagaagcctacaacaaagcaaaggcaattgcagatgcagatgaagaaaagattaaaacctcagacgcttcattggtggatacatacaattcctccaagcgatcagtatctctcgtgcaaaagcatcgagaaagcaaaaaggagaaaaagaagcagaagcagcgggataaagaagaatgggaaggaaaccacccatggaagccttgggaccgtgagaaggacctgactgctgggcggcaaaatgtcaatttagatcctgagaacatggcacaaggattgtcgtcccgattttcgtccggagccgttcagaggaacttcctctgagccattttgagatgatcggctaatcacagatgaaacatcaccatgttggtcaccagtacgctggtatgtatttgctgtaaggttgcataggatgcttgttagttatgatgttaagatgatccatgttataagtgtaacgtatgttagatgggttgggttcgcatgtccatttcccagaaatgaattattgcattatcgagagagagctctagctacctatctctactgaacgactgtgcataccggttgttttgaactgtatatgaacttttccagacagtttaatggtacctggtacttaatggtacatccttaaggatagaaaaagtacctcctcaaggatggaaaaagagctccatctgaaatgtcgtaagcaatgatattgatgctgtcatgtggcacaagcaaatggaacacttctgctaagacatggatagtaaacccatttattcatttattttggtatttgcaatttgcaaaagatccatatttaataatttggttgtagcatttatctatttatacctatgctaattgtacacctcacgttaactaaaaagtttgtacccttgaatttttttttttgggagaaagtgtacccttgattagatgagttatacaatcatgaccatacattgtacagtccttcaacgcggtgggtcaatctatgtttaattttgtagcctgtttctaaagcccatctattctattttatcttcaatagaatttatagacaaagaggtaaagagataagggacgactaagcttggctcagttccttagtaagaaaatagaccccccttactttgcaatctgattcaattaacaccgtggccttcttttgtattccgtttattaaagtcatttgactttttttaaaagttttttaggtttgatcaagggtatataaaaaaattagcaatatctataacatcaaattagttccattaaatttatcattaaatatgtttgataatatgtttgtttgtattgaaaatgttagtatattcatctataaatttagttaaacttaaaagatgtttgactaagaaaaaaaacaaacgacttataatatgaaacaacgcgaataagtaggtttccacgtgattgccacactagccaaaatggccagtggacacatctgtatccaaacaaataattagagagacaaggggcaatcaggtctgttgccttccttgagcgaccactgcgctgccaactcatcttattcacaaatgttaattaggtccctgtcattcactccaacttggctaacatgttatcactcacagcaataccaccctgcaaaaccaagtctggatcagatatgatgttattttatcagatatttttttgacagagtagttgtttgggagctcatggatttgagcaaagctcaaagaattgtttcaacattttccatatatgttatctgcaagttgtgttagcaggaccattttggtgttattaactgagaaaaaccagtacatatattagtaaaaaatagcttcaattctcggctgggcaagttgtttgattctcagaaagcaacgacaggaacgctactgtttattaatttgtaaagtaacccaatgctaaatcaaatgattgctgacactgaataaaataaggctgcaggaat

SEQ ID NO: 5508 - DNA, 10685 bp, Oryza sativa
aatggatttataacgaaacaaatatcccatggtcgactaatgatttggggtgaatagctaatatggtccctgaaatttcgcttcgggctcagtttagtccttgaggtttcaaatcgtccaaacaaatcctctaaattaattatttgggttaatatagtccttggacccacaaaaagtgccatgtgagcatgccaagtcatcctcgtatgcaccgatatgaatgaaatgaccattctacctttatataccatatataaaagaaaacaaatgtttcacacatgtatgatcgttttagaattgtcccttatgattgctgtagccaagcactgatcgtataaattattgtcggccaccctccgcaacaatgttgggcctgggttggcctattatttttttgtttgcatcttttctttcttttctatatggtatataagggtaaaattgtcattttatttatactacagcatgcgacgatgacttggcatgctcacgtggtattctttatgggttcaagaactatattaacccaaatgataaatttggaggacttgtttggacgatttgaaacctcaaggactaaactgagcttaaagcgaaacttcagggaccatattagctattcacccaatgatttgcatggtaaataatcaagcactcagggcacatgaaaaggcataattcccccttatgtttaggaagctaatagcctttacatcacctgtctttgacagcaaatcatttttgccagataaacatatggcaacttttgatcaaatttgcactgcatcaatattcctccatcagtctttaatgtacctagaaccaacgactattgagttcaacattgtcaaaataaaatccttctgcagcctactacgctcatagtcaaacataatgtagtgttatcaatattaaattgttatacacattttcttcgtgtgttactgacttgctttacacttcaaggaaatcataaatcaacacttcaagaattattgttatcaacaaacgattatgtacaaatactgttgctgaacatacgcctaaggggactaacttacagctgaaactgaattgttaggacataggaggtatattaaactattaaaggaagaaagcatataaaaaagagcaaagccaaatagtcaaacctgcttaagagaatagcctatctacataaaatgagtaagcccattagcacagcatgttgcttcagttgatatattaacagtgttctgtagccttttaacttgctcatcagctatatttgtacaaaatactatttcttcaaacttctagctacaatttcagaacctaaattaggacataagcttatgcagcaaaaaaaggaacatctttggcatggtgcacggcatgacataatcgcaataagcaatttccagataacagaagtacatatgtacatcctattaacataaccaagctaaacatttcaggcaactaccaaatattttcagacaataatacttcttaatctacatagagagtaaacctcgttaatgctcatgcataaaaaaaatgagatcacatctacatagacatagataattagatatggcagggatagttaacaatcaagcatgaagtaaaatcacccgtggaacaacatagatcatcaaatgacccttcaaaaaaaatccagatccttcatttttttttcaccaagattcacttaatccctcaaaataaaaacaaagaacacttgtattaaggtaaaggttaggtttacctgaaaatcatattttgacagtgagaaaaaggttaggtttacctgatttagagtgtacaaagaaaatatagcgactcctagcacatcaaagcttcaaggcaaaattagtgagcggtgcatgaagaaagggaacagaagaataaatccgtgagtctaccaccatgattaagcaagaaggggaaatattacaacgtcagcaacattatgctgacaaataggacaccaagtagaaagcccctctagcagtaacattacacagttacatagctatatacagaggttagccattcacagaggagaaaatcccagcggcctcctaagtcagtaaaacttaggaacaacaattatatacagaattactgatggagcaaacacatttgacatagttgcatttttagtaacaccattcttaagagctgaaacattatatcggttttttaaatatatttgagttttccgatcagatcaaattatatgttttgtagaggcatggtactaatgctggatgtgcattgttgaatacaagacacattatggattgcacagtttcatttcctgcaccacccaaatatcatttcagcatattactgctgggcatacatattttaatttaaaaaacactcggaaggggttaccaattacagatgttgaaactgtctatttcttagagttagattcctcattccttcattgcctgctctcgtgattcctttgaatcttgtctccattttgtccaatgcttatggacatgtatatctccctgtcaatgacacacttcttcatgattcggcggcacttatattagtagtatcagcaacagtagcagcggaagttatgttccaaattagagggaagaacactttatcatttcagtttcagtagcagggagaaaaatcacctggtcttctagacgatgttcatcagtttgctgctcttccagtgggtagtctactgggcgtcgggtaggataatcattggtaccgttgaagacctgcaaacagcggtacatgctgcggatggaggttttctcgctgcgggtgatggagggagaggaaggggcggcaaagagtatgtgcggcggtgaccgatggtgccataggcgtgcgacctccaaggaatgggaagagccgcggagcaaacggcaggcgacggcgtcggtggtgtggcgagcgacagcgtcagtttttgggttgctggcatgatcgatcgagcgcgcggtggcggccatggtggtgctttagtcctcgatctgtgtggcacgacaatagtgaggagggtgacgcatcggttgcgggcagcgccggcggcacccatacccatcggccaccactacctcgcggtatcatcggcggattttccctcgaaatgcggggatgattgcacatggcagcggcagcggctggggacgacctcagctccggcgggcgcaacggtggagcgcggcggcggcggaagacctaggctccggtgggggcagcggtggagtgcggtggcggcggggacacgcgaggagggaggatgtgcggagcgaggaggagcaaatagagcggaggccggagtcttcgtgcggtggcgagagcgcaggcgaacattgcggtagatggataggatgaaatcgcggtcgcggtgaagagggtgaaatcacgggtggatggtagggattagggattagggcaatgcggatgcagatggatggttgggattcatccggtgatttggccggtaggattggagaggggcagctcctcctttttatattagtatagatgtgagtaaagaggtagggcaaactgttgaagctacacaagacgaagttaaagaaatggatcttcataaggaggatggagaagtagttgttgagacaattccatgtcctatggagtgagccgaaatggtgaaacaaaaggatgtactagtttatcaaaggaggcggttttgatagtcggtgggagaaaagcaaaatgttagtgaaagatcaggttgaagagttaccaaacctagagtgctcagtcccagaatcctctcagaccctctctcctcggtctccttggctcctcttgagataattggtaacacttctccaagtcttgaactagtagaattacctattgcatagtgtagagagattagatccaatgctagtagacctcctgtatgtcttggttttgagcatcttagttctatgcgtgacattgcaaacgatatatcatattcctatatttcaccaacatacaaaacattcattgtatcattacatattgtgcccattctgaaggattggaagcgtgcaaagcaaaatccaaggtggaaagatgcaatgaaagaaaagcttaatgcccttgcaaaaaataaggcttgggaacttgtgagacttccaccaggtgggggggaagggtggcttcccagcggaggtttgcattggtggtgtgtgtgtgtgggggggggggagtcggagctgcttgtcaagggtggcaagctcggcaatgataaccttcttttgctttcgtcttgacagcgctgtggcagcatgggttgttgtagttggcagggagagagagctagggcgaagaccctgctcgatcttgggctagagccaacgatgtcgacgcttgtgggcgcagttatccttcttgaaggtgtcattactttgctctccccttttattcgggtgaaaaccttattccaatgttcgggcggacgttgtttggcattgcgacgctatcttcctccttggaggcttcgtcttgaagaccctgcgctagttatctgtggtatgttgataggaagtcagagctcctcttctgagctcggcaaatatgacctatgtcttgtccttcagttgtgctgtcgcaagtttgttagtttgtttttcatgtgggttttgtccggttttcctctttaaaccgtgcttatgttaggattttgggcccagttttccatcaaaagctgggccaaatctcttcttcttaaatgaaaacaggcactcctggttctctatgaggttttcttcaaaaatatatataggtaattgatctggtctcgatacaggtagttgatctgtaacagctcaagacaattagtctgtgttgtattgtacgatggtggtgtgagaaaacttatcacagggtttgcattaagttcacctcaaaatttacagataacttaaatggaattgatgctgcataaattttcttcagaacaaagtaaatttggtgaaatggtgtaacggttttataattggagtgcattttcctaacattgtgcggagtacagttatagttaaattataatatgcttaacacggtgttacttgttttagaaaggtttatgttgtttatttaacagatatatctctttcactcttttgggtaagttcagattaagcttttgtagaagtaggaagctgcccatatgctcatctgagcattttgcaaaacggcgattcaattttttttatctgtaatttgtgtataccgtgcatatcagatgtttgaagggtgcacttgtgtcaccttttattttgttcatggagcttttaataatagtatggggaaaatttgatgattcatcagtccttaagactggtacttgaccctttgccagttgccacttcaagagttcaagtcgtagatatgaccgctctaaatgatccaagaactaagcaattgtggtaaggttccgttgttttttcatgttcccttctgcatatttaattaatagtatatggtatggagcttcgttaataacttctgtaatgttatgtttacagatacacaaatgctatgcaactgggtgttttgttcttggtaaagtttcacttcctaatacagtatataccactgatccgtaccactgataacacaaattcatcctacagtaaacttctcatatgttatttcttttttgtaattgaacgaaaaatccgttgctggcttgcttcagtgcttgcatcgtactattaagttgcagaacacaaacttagtttattctcaaatataaagatgcatggttaccatgtcgatctgcatgacatccatttaacacactgcttacattgttcggtctgtgtggagattatgggtaccccatacccacacggcatggttatccgactagttataggggataacttatatctatgtaatatgtaacagatcatgacttgggtgttacgtttccttgtatattacggaacggcctaaagtcctgatttaggaaaccgataccgtattggttaaggtttctatcttgtaatcctgccccccgtcctatataaggtgggcaggaggccctctagggggcatatatgacacaacctgatcgtcagatcaatacacacccggcggattcaaatccccaaacaggagtagggtattacctctcattgagagggcctgaacctgtctaaatcctttgtctctgcatccatccacttttaggtctcgtgcgctaccccgttttattattgccgaatccatgtttcgacagttggcgcgccaggtaggggctgcgtcgagcttcctatcaatttcatgagtcgccgacttcgttttcgctttgggagttttcacttcctttccgtcgaccacttcttcaagctcctcttctctgacttgatccaaatcagtcaggggaaaactcaatctgatttttatcattatttatcatattgatttttaatctcagattaatctcttgctattttttgttgttgttcgcatataattacgcggcactattgaggcgattgatgctggtcatggactcgaggcgtctcagctttccggtcgatcggccgcgagtccactctgccggcttgtcttcgccaccgccattgctgataacaacaacgacttcaccgccggcctgcctccgtcaccgctgagtggtgcctccgcctacacggctggcctattatgccgccgctgttgggcgtctacgacttcaccgccggcctgcctccgtcaccgccgagtggtgcctccgcctacacggctggcctattatgccgccgctgttgggcgtctacgacttcaccgccggcctgcctccgtcgccgccgagtggtgcctccgcctacacggctggcctattatgccgtcgctgttgggcgtctacgacttcaccgccggcctgcctccgtcgccgccgactggtgtcctcgcctatatggttggttggtcacaccaccgttcatgggcgtccacgtcttcaccgccggcctgcctccgtcgccgccgagtggtgccttcgcctacacggctggcctattatgccgccgctgttgggcgtctacgtcttcaccgccggcctgcctccgtcgccgccgagtggtgcctccgcctacacggctggcctattatgccgccgctgttgggcgtctacgacttcaccgccggcctgcctccgtcgccgccgagtggtgcctccgcctacacggctggcctattatgccgccgctgttgggcgtctacgacttcaccgccggcctgcctccgtcgccgccgactggtgtcctcgcctatacgattggttggtcacaccaccgttcatgggcgtccacgtcttcaccgctggcctgcctctgccgccactgactggtgtttttgcctatacggttggcggactccgccgctgttaatgggcttcatcatctacaccactggcttggttccactggcgccgactggtgtttttgtcaccattgatggactgcttcgttcccacatcggctacttttgctgtcaccgagggaatattacaaagctaagtcatcatttattttattctttatatgatattttgccttttcctttgcctcactacctcaactggttcgccgttgactagtgagtcgggggctatagatgttatatcgtattttttaaacaattttcataatatttatcttgattgcttgcgacataatctgagtacaaaagtacctatcaagttatggagttctatcttcctatgctttccgtttggtttgccaatggatggttgcctttgggccgattcctagcacccgggggctcgttggatggaccgagtaacgcaaggtgctaagtattattcggaataaatcaaaagcatagagatgagataaatttattttctgctcttaataattgcaaaagtacctgagtagtaaattctgatccgtgaaactttgttccattaatgacgaactcatgtcactcatatgcatgtttgggaaatgcctaggccgactcccgatgcttgggggctatgactagtcggacagagtgtttaaacgtacagagtcatctgctcggggaaatcaaaattgacaagaggagaaatacatatttataaatattttaaaatacttgattttttctcgagtattatgtttatatcagatattactcatcctatatgtttgttctgcaggatccagatccagatatgcataaaagggattcagggctttaagcttatctcttacgctccaggaatggatcagtcagaacaccaccaccggctcgcctcgaccgccgccgactggtgtttccgcctgcacggctggcctattatgccgccgttgttgggcgtctacgtcttcaccgaccggcttgccttcgccgcggccgactggtgtttccgcctgcacggctggcctttatgccgccgttgttgggcatctacgtcttcaccgaccggcttgccttcgccgcggccgactggtgtttccgcctgcacggctggcctttatgccgccgttgttgggcgtctacgtcttcaccgaccggcttgcctcgtccgccgccgactggtgcttccgcctgcacggctggcctattatgctgccgttgttgggcgtctacgtcttcaccgaccggccgccttcgccgccgccgactggtgtttccgccttcacggctggcctttatgccgccgttgttgggcgtctacgtcttcaccgaccggccgcctcgccgccgccgactggtgtttccgcctgcacggctggcctattatgccgccgttgttgggcgtctacgtcttcaccgaccggccgcctcgtccgccgccgactggtgcttccgcctgcacggctggcctattatgccgccgctgttgggcgtctacatcttcaccgaccggccgccgcatccgccgctgactggtgtcaccgcctgcacggctggcctgttatgacgccaactgatgctatctttttcacggctggctacatcaccgtcaccgctaataggcatcatcttcaacacaagctgtctacgtctgctgctgactagtgccctcacctctacgtctggtttagacagctaccactactgatgaacatcctcgtcttccgtcgccgactggttatgctgtcgccgactggtgcttttatcttcacaactgcgcgtcttcactaccggtttgcttctgttgccgccgactcgtgttcacttcatcacggcaacacaactttgtcatcatggtggagcgacttcatctttattatcttcggtaccagcaaactctattgctgctacttcacaagttttgctacatcaccaaccatgacgttgttgtgaatctcgacatctcggcatgcgatgccgtgttattttactacaacaagaggctctccaatattcaggatttctacttggacatcttcaacacatatcttcaatcaagcaatgactactcgacgacaagaagctataattctcgactctatgttcagttgtttcccaactaaccaaagagtcgggggctacacaaatataaggctcaaaatttgacaaattttatataagccaatgagtcaactccaggagtcattatcttcatctttgcttcggaacagacattctacttcaacaaatatttcagtttggacgagctggacaacaacatcaactctcctccaagtgaagcatctacaacagctataacattaatttgatggattattgtcactgacatcatcaccagcacctctgcttcatcgaccctgacatctccgctgttgctaatggatgattatgttttcgccgacttattatttcaccttcacggttgacctactatgcaaatgctgatgagcgtctttgtcattatcattggttgctacactgctattggctggatcaccgacatcgtcatcttcatcatgtcggttgcgtttgtcgtcgtcaactacacaactttatcgctgagcgccttcatattcattgctggctgacctgactgccgccgactggtttcttcgcctccatggctatgcgacttcagtacttttgattggtatcactatcttcactaccaccaatatttttgccacctctgatgggcaatattctctctatattggttgtcttgtctctatgccaactgcgtcagctaccatcaatgaacaattgtgactacgtgctcaggggcttactagctcaaatacaagtattatatcttcaatttggacttgctccggatacatgcaacatgaattcatgatcacgggtctattttatatgctcaaagactggtctatttattattccccgtaagggttatcaactgaatacttgcgccagtcgggattcaattgttatatctattttggagtatcccataagggataatcactcagatcagaagctattcatatgagctacgcttggtctatattacccggaagatttattactcgggagcatgttacatgcgtcatcctttaaagggtgtcgaaggcatattttttggcctaggcctaatatgtctgcaacccatattttcaggtgtggcctgtcacgttcttttagggacttaggcactttttgcttaggccaaagtgcgcgtgatcaagtgcccaataccttaaaatccttttataccgcagttacttaactttttaggagttggtacaatgcatcttaaaaggtgtcaaacagta

SEQ ID NO: 5509 - DNA, 36898 bp, Oryza sativa
gtagtttagaatcaggacacagtacatgcatggattgcaattctcatctctagtctctagtaataagcaagttaatattttgtatggttcagaatcaggacacggtacaatattttctgcatgcattaaatttcaagcaaagaaacagtaaacaagttaattctcatctctagtctctactcatatcagaggtcattaccagttaccacccagtcatctcttggcactatttaccccaaaactatctaaggacaattccacaacttgcatgcagaaattcatttaacagatatcatataccctagtagttgaaacatctactttactattgctcctccatataagagtggagtactttgtacaacttcacaaatgagatcttcacaggatgataaagctgaagggtatgatataaaaattaagtaccttttcagggtcctgtaagtctttgaaagcattattcaatttcacaaatgcctcctgagctgaaggatgaggacatttgtcaggatgcactagaagagataacttccagtacctgccatgcaggataagagatcagcaagaacaattaaagaaactttctgaacaacagaatgcagcatgatgaaatatattacacatgaattacaaaataaaagtatgcaatagcctttataaaatatttctatgctgcaagttattgtgtgtaataaatgctactataaattttgctgttccctcgatacatgagctacagccagcaaacaaatattacgtgaatacctcaagatacaataattagaaaaatgctaataaaacaatatatcaccacaaacataagaagaagccttaggttcaatgtcaatttacttcatgtgtaagaaacactactgcaaatttcaggtgaggtcaatggaatggtgctatttcacatgaaactgcatctactatcaggttctttagtgagaatcttaaagttttattcacagaaaggtcattttgagtgcatggtataactgcatgtgtaaatttgttctgggcaggttagaggttagggccctcatgcagtcaggcatagccaaggagaccctacccaagtggcatgacagcgcgcatggagacaagcacaccgcacaccactaggggaagggataagatggagagataaaagacacatggattcatttcttaatgaaaagagatacaaccccatcgttacatagaagggatgacctttgtgaaacttatctctgaaattaagaaatatataacaatttacagtcaaaaacatgtcagcgcataggattgaggcccgactgaggacgatgaaaactttgtagcccagggctgtatgccagcagaaattagacctaagtagtaagactgctagaaattgaatctccatataagttttccgttctttctgaatgttgggcccatttcatgaccactgttctgaaacaaattttacaaggccgcatacagggactttgtgcccaatctaatgtattaaatcatcttcaaaagaactaatgctacaagtagaaaatattgatatgataggtgttgcattcaccagaaatgactaaaacaaaaatattcttgaagccttgacatcattttttgaaagcataatgtgcaacatttgcatcttgctacagacataaaaaacgtcattgcactatgcaattgtgtggatatctgtactttaaatttgtgcttgtgacctgtaccatattttcagtgactactttgtaggcctatgaaatatgtgcatttcttcgcagtgtatactgtatatgtatgcatgtcattcgcaaattacacaactgcaaacaagaaaagcaaatgcatacaaattactaccttttcttgatgttatcagatgacatcttccaattgatgcccacaacatcatatggcgagttctcatccgccgccaatattcgagtaacctacaaccaattcaaaaaaatacaataaatagttgaatgtagcccagaaaatgaaaagcagttagttgcattgcgactttcaagcaaaaacaagtacttttggcttggagtctgaccaacctaatggaacatcaattacaattatccaaaagacaaatgagtattatacaacgaaaatgggcatacagaatatagcctaacaagaaagttagaattcacattaacaaacactgtatgtacgttcatgtgcatgtttattacagtttcataaacaccggaaaaaatctcgtaagcagttcaatcaaagatgtttcaagtagcaaacaccatatagtgccatgtgagtagagcataatttgttgcatgattatcaccagaatgaagtataaataattcaccatttaagtagattatatgatcattactgattgaatattaataaacaaatgctctggcatagagatggtaaggactgaggaccagtttttggaaaccccgcaggttactggccagtaaaccaaaaccggacttgtgccagttttgatttaagactccataactctgcatttgattctgatttcaactgaagcttattgctgctcatatgatatgtctcacacttcaaaccttgaaaaaaggaggcataaactcaaaatggctccataaaatatggctagctattccctggatgtgttgccatataccaggcaagtaggcaacaatgagcaaccacaaccagcttgagtgcggttctcatggcaatttttgtttctaatggttaagggcaggtattaccaataagctggtgtaacccggcaggaaatcggtcaagattggtctagcaatttctattaatggtgactacatcactgattgaagggccaacacaaaccactgccacactataataatagtatatcatgtgctactaacttaaaagcctataagaacgaacccacttattggtccagacaactgcaaaacatatttggtcagctacatgaagcaggaagcaaacaagaccacacaagataatctaaagtagtatattaaattttgaatctgtagaagtgttccaaaactaagggtgaaggttcaaaacatcgtgttatcactgaaaatgtacctcttcaaatcgctcagcttcatttgcagatgctgcttcagcgaccatggcaggcggtggggggcctatgagaaaaccatcatcagcttcaacttcagcatccctggagaaagaaaatgcaatcagttaatattaggagaataaacaatgaataactatattaacaattttctcgcatatcaactgagttacttttggcatcacatagctgccaatgtccatgcactgtcagttcttgacaaaatggcaaaataaggaagagataaacacaaaactgtaccgggatctaagagcctctgtcatttcagcagctgcagctagtaactcgcgtgatggcatagcaggaccaattaccctggagagggcacaaccttgtgttaagacaataaattgagttaatagataagcatctttttgtgttggatgacatttgaatgacaaataggaatttactaagaacattcagccgcattgaagaccgactaaatatcatatcgactggacaaggaattccataaaagcaacatatccgtgcaaaggataaaaatgatactagtaactaagaagcagcatgaaagagaatactgggacaccagcggttaataaggctaacacgtaactcatgcatttgcataatcatcatatggaacagacaataacagccataaagaacactggcatatccaccagaagtagaaaaattgtcagaatcctttggtactaaccatgtggcatcagtaatgactattgataacagtgatattgccaatgccttaaacattaccacctaaaatatgggcatgatatgtcattctggtgttaagtgttaacacaaggagcaaataaataaatgcacaatggacagttcaatacctattgggtatagaaagactaacacacaaccttctctcattacctatgaattaaatcatatataaatcaggtaaaaattatctgcgtgaaatatatcacaattgtatattctttttaaaagagggcaatgatggtggcagtgaatctgctaccacctcaccaagtatagtattttttttttatttaccacctactccataatgttctctaccaactagcccatgtactttaatgttataaaataacccctctacatatatgattctatcatatttcaccttacaatatagcatctacaggtacaaaattgtcccaaaaaaatcactattaatttgttttaatccgtagcaaagcatgggcatttggctagtatttgtaaaaatatcaatattctatacacatctactgtcattgtgaaaagaataaggagactaataaattatctgccaggaaaaagggcagcagctagatatttaaatgtctatgcatcaaaagatgctagagctactgctatttctcaaggaaactaatgctcttgaacactaccatcaagtggaatgcatgctgcgacaagaccacttagtaaattactaacttagtaaataccaatacttggttcttaacaagcggcctactataattagctttaaactatcaagtatcaataacattataaagatgagacattatagcagagcaatggtggaacaaaaaataattctatctgaaataataacattttctagcagaacaatggagcaaaatatagcaaatatttccaaacacataatattttcaattgtgacgaaaagaaaagctacagcaaagagccatttgttttctcgcatagattctagaacgcaggtaatttacctccgtttagggggttgttcatcagcatcatttttcgctggctcttcaggagtgctatcatttttattttgcacatcaaaattggatgatggttgttcctgtctagttggtgacgctggatttttattttcattatcagccagttcaccgctagctactaatgctgatccaacaacatcaagggtgggtacactctttggtggcaacaagtaagccccatttgagctttctctcagtttaagtgatctgaaaagtttctttaggcgcttcaccaatggcttgtcagaaattccagaaatatcaatgccttcaccattatctatcatttgaagaagctgcaaattaatagaaattcttattaatgtactattccatggggcaattagaaacggtccataggataggaaataacagtatagctggaactctgggagtgccacaaatatcattcataaactgataagacaaatgacttagcatgttcaaaatcaacaagaggtgtggatatactagttttggcatgatactaagaagcattaagggagttaagtagatctgctaatcagtaatcacaacgtattagaacaagtaactgaggacaaaccaagccaatatgacaacagacgatgagaatcaaacatgtaattagtaggttggagggtaggacaatggcattccccctattcatgtatttgatggctatagatacttaaacaaggcaatatatcaaaaaagaaaattgcattggacttaacaaggcataactgaatggagaatatggccatagttggtcctagtagttattagacatgtagttcagccagttcatcttcactgttatgactgcttaagatggacaaatagcactgaaacttcacacagttcagctaggaactcttcatggaaaaagaggtatgcctcgagcaaagcaatgaattttcatgcgatgcaattgtacgggtctgtcgacaacttaacccatactccaaaggaaattctcgtcggaaatttaaaaatgcgatagggaacgaaccctacctgacggagctccccggcgacggcggggaaatcaccgaggatgtcgcggacgatctcccgcgcctcctccgccctatccggctcctccgagcccgatcccgacgactccgacgcatcgccgccgcgcctcccgcgctcctcgtcccgccgcctccgccggcgccgccgttcatcgtcgtcgtcgcgcgagcggcgggaccggccgctgctcttgtggtggtggtggcgatgccggcgtgacgaggaggaggccttcctccgcttgctgccgctgctgcggctgcggctgcggcggtcggggctgcggctgggggaggaggcggaggatggggaaggggaggaggcggagtcggggtcggggtcggaggaggcgtcgcgggatctcctgctgctgcggccgcggccgcggcggcgcttgccttccttctccgcctcgtcgcccctccccatcttctccgacggtcggacggacctctaccttggggaagaaaggcttcttgtgaatttgtctgttacggggactggaagcctggaagggcataacctgaatggagaatattactgcctaaaccaacccttccgaaatttgataataccaaatttttttttggcaagttgatagtataaccaaagtttggttgaatagagggggttgaataggcgatttaaaactaaatgacacctaattaaaattaacctaagttgctaggcttggtgagggtcaactttaactaagcaactaagttatgttttgcaaacctagggtgatagtggctcaattatatctctacgaaagtaaatcacaatcctatgtcaatgtttagcaatcctagggtgatatgatctcaagtatgtctctagaaatgtaaattgcataaatgtaaatgcaacaatcaaataagacaaggagacaggagatttttcaccgaggttcggaaactcgccggtttcctactccccgttgaggcgagcccaactccaccgctcaaccacgaagccaccgcacgctcccttcgtcaaggggtgggcaaggcaggagccggcccacggagaggactacccaaacctcgatcactagggtagttcttccttcactccgaaggtggtgaactccaaaccactcacaaaccggcgtcgggcctcctccacaatcttctcggagaggtcacagggcaactcctccacaagccgtctaggaggcggcaacctccaagagtaacaagcgatgacccggcgtggagatgatcaatcaagtgccacactaactctacaaatggaagcaatgcacttgactcttggctaatcaaccctctaacacactagatggatgaacacaaagctcaagtgggtgtgagagaggtgcaaggggtgtatgcaattgaattgggtgccaagagagcccccttgctgctggagggggagtatttatactcccaccaaccaaaactagccgttgggggcgaaatcccccaactttgtgctctgctggtctgaccggaggtatgtggccggtcaaaccgtgctactctgcaacggctagaaaactagccgttgtagtgctgtcagagggccccatcggcctggccggtcagaccggcattgagtgggcggtcagaccggcctcagctcggtctgaccgaatacggctccgtcggctctgtatcggccaccccgagcaacaccatcccggcctccagggggccggtctaaccgcgcatgtgccgccggtcagactggccttatgcgccggttagaccgccgtctttcggccggtcagaccggccagggcacgccggtcagaccgccactatgtggccggtctgactgtccctggtcatgccgaaaccagtgaaatcccaagtgattgtgtgtgtgtgatgaaaagcgagcacaagtctaaatgcataatgacctaatgtggcaattaaaatcatctctttgctagatcattacccctcttaatagtacggcgaaactaaaaaataaactagcaaatttgatcgccctacacctcgatcaattttaaaactaaaaaactagttttaccgttttcttttcttcgcttcgcaccatcaaattttgatccatcgatagtcatctatgcgcacacatgacgtggacctaacttaaaatattatctcaataacaacggttagtccacaattagcgcttgtcattaattaccaaaattaacaacgggggcctagatgcttcaaccccgcgccatctacctcagccatgagttccactcatgacctagggcgatctaccaatcgtcgagtattgccacaaggtgaaaacggatgctgatgctctccacgacgtcggccatgccaagcagatgttttcctttacgactattccccaggctgcctcgtcttttgatttgcttctacaaggactctccaccatggtagctctgtcctccttgggtgtcgagtatctgtgacctccttcggttgcttcatctgctgaggtcgagccaccgatattggatgacaccaccgacaccaatttcttccagcccatgaccaggctttggacttcatcggcttcggcacctcatcttgctggctcatcacctagcgtcactgctagcgacaatttgtccatgggtaggcaagacaatctgtatatgagcggatctccattcggctactgctgtgcctatctctgtggatccatagggtttagaaagagtgccaccagcaggccataatgggcgaaggccggatactggtggtgcagcccaatgcctcccgactcaggtggggtgctaggctggaccctagcgtagaaatctcaggttgggctccggtataggcactgaagtaaatgtccaagtctatttcttgccgtaggctttctaccgattctagaaaatcttttaaacgatgaccatttactttaaaactgttaccttcgttgtccatagcgtaaccgctctatgcgatgaagtgtcgatgacggtgtatggttgcagccacttgcttcgtagtttcccatgccccaaaaattcttgtaaaaagttaatattacagagcaaatcaggaggtttaagatcctgcaggagtttatcctcgatttttttaatgtatagttaataatatttccctcttttttctataaagctatataattctaaatatttctagttgaatgattgatctatatcacaaactgttttcgcttgaagctatagcatcttattatttatcttctcccaagaagccatgaaagccatattttctcaatattctctcctcttgaaaaaatagattaagttataagaaagagtacgttacaaaaatgctaattcctccgtttcacattgtaagtcattctagcatttctcacattcatattgatgttaatgaatctagacattatgaatgtgagaaatggtagaataacttacattgtgaaacggaaagagtatgaagttgttcaatttaacgatattaagttcagcagttcaaaactccaaatcaatctcatcaatcctaaacagagcctttctgtagctcagtttatgaaattccccggtgactaatactaagtaattacccagcaagcttacaaatgactgctaagaaacttgcatttcgatcacttcttcacaggaagagcaaaaacaaaacgcgaacacacgaaagcacgcgttaagtgcaaaaatctacatccttaacaccggtagcttctccctgtcagttcttgatatatatgaacaacactatagccactattcatgtattacatatacttgtcttgttctcctacagggatacataaaaaacaatccccatcaacacaactactgctagaaagaactgggctctatccatcctcacatcttctacatgttgcagaaggtatatgccagaggcagcacgtgttctattcacaaactaacaacaaatgttcagcatattccacatgatcacatcacgcagcatgcacatgcccattttgctcatctgtaaccacattatctatgccattgtgctccttgctgtcagagtcattctcaatttctgactgagctttcttcagctttctaaggcggacactagtctgcttgatgcggcctttacctgggtcagacactaagagcaggcgggacataacataggacaaaagctcctccctatgggagaatgtgaaatccaagtgggcgtactcgaattcattgtaggaaacctctacaccagccttgcgcatcagcttatagtgcttctttaccatggatggtgagataactctgtctctttgcccagcgactaaatctactgggatgtcaatcagaccataatgagctcccaggtccaagggttctggtgttccatatgcttccatatttgctactggacttccatagtcatacatttggaacctttttgccctctttatttgtgcaaggtgaagtgcaacatggaatgatacaccaggcatgtcatccatgttgtagtgtggcaacccgagcactcccacccaatttgaactgtcaccgccaactacatagcccataagagtttggacaaggccgcccaaagctggatagttgttgaaatccctggccaatttgttcagtagcatccggaagaaacgtgttggtatgtaaaggccaggtataaatggagctagtactggtccaacaaacaaaatgagcttttctaccatgctgaacaccacattagaatcctcatgaaagccagcaggagatagcaagaccaatcttgataacctgtggggcttctgcgcaatccttgatgtcaccacatacattaacatcaccgcaccacccaagctgtggcagacagcacaaagcttgtatggttgattgtctctttcatcgtcctgtgaagcctgcacttccaaattttttatcttatcgttttgatcttctgtttcctcacttatgtgaggtctacttttgccaagttctgaagttttaatcttgtgaatttcttcaacaattgctggcatatctttggttccatgttcattaacagaatatttccagtacctagcatggatagacaaaaacaaataagacatgaaaaaaatacagagaccaaaatgacataacctacaatagatttcctgcatgcagtaaaaaacctgatatgctttgctagtattactgcattacttacttgtaggaagaaatatttttatcaacatgctccctggagactaaaccacgcagatttccaagaaaaacatcataacctgcattcacccataaaggatttttagcattcactccatacatctgcagtatattatatccagttttaaatactgaccttgatcatatgctgcaaatgcaggtgagccaacaacaccattcgatacccaactgcaagagaaacgacatggaatcaggggaaaccaaactgtatgcttcagataaactacatagaaactggatagatacaaaactatttgaagtttatttgactaaccactactgcatattttcattttactgaaaaacattaacagtacgatcttcaacaacacagtaacatagtgtgctcatacttttgtatgtgtgaattgatcattcgattataaacaaacattagcgctttgatgtcaaagttctttaaggaactaatataactgcagaaacagattctcagagtggatattgtgacattcagcttacgacattatcagtcaggagcaactacattataaatcccaagtctgatatgatgatcaatagcaagattgtggatcatcgaattttattagggatggcagcgggctgggtcgggcacgggcagagtgattccatgcctgacccaagacccatgtgcccacgcccgacccacgcccgcaaagtctatcgggtaaaatctcatgcacgtgcccatgcccgtcgggcacaggcatgcccgacgggtgcccaactggtgcatcaagggtgaggaagaggtagttgtggaggtggtcgcagccggtgaggaagacctggaggtggagccatggaggcacggtggcgaccggtgaggaagaggtggaggtggagacggtagcggctggtcagatctggcaacggagaggagagcccatggcgaccggatccatagaccaggtgacggagagacgacgacaatggcaggcgagcagcgatagagagatgagggcggtaggagtcacgtagtcacgctaggactcagcaaccaaaagccagcaacaagcaaaccattgactacacagcgtgagcacaccaagcgagggaaggaggggggaaacgggaggcactgcgctggtctcacggtctcacctggtaggggctcaccgccggcgtggtcgtcgacttgataatgatgccgctgccgctaccagcatgcataatctcgcagccgccaccgccgacgacaccttgcctcgccatcgcccgcctccggcctcctccacctcctcgccgcgcttcccttctctctctccccctaatccatgacttgctttggcttcatctactttgcctctcgcttttgctgccacagcagctggccgcgtttccgctcacctcgcttcgcttctccctctctgcttgacgcgttgacgcgttggcggtgatgagagagacacacacacacacacagagagagagagagagagagagagaggagttgggtttcgggggccggtgggtggtggggttaccgcctggtggaagctggctagtggcgtgcaacatgtggttggtttccctgaaacttggctatacatatgtccattgctaatgggccaaatgggccaaaaggaaggggaatgagaatgaaggtatgtgccaaaatcaataatacatataccgggttggacatgggttacccgcgggtaaaaaatgagaccctgctgctacccaccacattgtcgggtctcgggtgggcatgcccacaagcaaaatattacacccatgcccatgcccattgggccaggtatccgcggatacccggacccatggggaaaattgccatccctaaattttatggtctgctgagtcattagtaatttagtataaaagcgaacagcaaaggcagcacctgaaatttttctagaatagcatcaacttcaatatcaaaacctactataccagctcatatttctcaatatcaactattcattactggagtaaaaagccatcaccttatcgcatcaactacagtcagggtccaattcgcatacaaatcatattatccaactagtcaaggacaagctaactcagggcaacctctttcctatcaattggcttgtttttacagtctattaagtgggaaggtaatgccaatataaatacataaatagagaaaaaaggaacaacagcaacagatcaaacggcatacaactaacaaattaaaatacatttataaagaaccaacaccaaacatgtaagaaattagaaacgccatcatgactaagcatttgattgtgactcaccccattgatgagtccagtattccatgttgcagcaataccaccttctgtgaatcacgcctaaaaattggatgcttcatatctcaatctccgtaacacaactgttgagaaatatattaacatgcaataattataattcataccttggaattctctccagcagtaggacatatccatctgaagtaacaacttttatagcctcaaaagggtacctgaaaaagatgtgatgagattaacaatttgacaatgaacactgatgcaaaaggatttaatgcaaaataaaccgaactgactgaacagaaaatagagatcgtacaagactctagattcataaacaattataggaattcgcacattaaccaaaacatggtccagattcatttgacacgagaaaaattacgcacttgactgataaaacctaaaaaataatgggtaacacatcttgaaattcaagcatagctcaagcgtcaaggataactagatctattagaataacaccaacgcaagcccttagcaacaatttgacacaaagcaaatataacgaaaagcagaaaatcactggaaaggacatacccacaaatttgtggcaaatgcaactgagtaaacagtactaaaacaccttaaaatgctaaaaatgctcattcaggattatgcatccattaagtttgaacaatatacatacatgtttacgattctattactaaaccatactaacatataggtcgatcacctacccaagctcagtgataacatcttcacatgtccgagaatccgtgttcaaaggatggcgatatatagtcttcctttcagttggggctggattgtcactgccaacattagctgttggtacatcaacaacagggctactgctgccatgaatccagcaaaataatttcttccacacctcagaaggagaaagaacataatgcgcgcctttatgaacaatgtcaaacactgattcgatgaaaatctcaattgcaagatggaggtcctaaatttgaaagaaaaaaaaagagatcagggtgtgactaagtggacatagaaaccactaaatgaatttcttcagggaaataggttaaacaataatcacaactttgtcatgccataagatagacaaactaagggtccacttttataaaagtagtacctcaacaactccacgcctcctgtcagttgttcgttggagaacttgatccttaatgtgaagccctctcctagaacggaagttcctagaaatatggggactttctgggggtttattagatgtctgcatgatccgaaatttgatagcgttgaacagaatcaccagcaaagagacaagaaatctggcaggccaaagaatccatgaaattgcatatctaataggtcttctcaagcggcgatcacgcctactgaaactgcttgtatgtgataatcgtgaactttgggacaatggagatgaaggacatataaaatcttcgttttcatcatccccagggatcgagtcagtaactgattcaccatcagaatcgacagagagttcatgaataaactcattgaacgatgaaaccccactgatatcagaacaaataagtgtagtcatcagaaagagagagaaaaattttcatcacagaaatagatgtggaatctgttacattaaccatacataagtcataatattaataatacaaaacaaaacttcataaagctaaaatggtaggcgtaagatctcatgcaggtgaaaataatccggtccatattgttcagtcattacatattatggtacaaattttattcaaaattctaaagacccattggtacttatcacatttttccagcaaacaaagagaagctttcattgggcagagcccctcctaagcatacattggcacaaaccaaatgcaaaatggcaagcagcacatacagaaattcaagattattgaattcacttcatgttaatgatcactcactatcttgtcctcctcggttacaatagaacattccttaaccatgccaaaaagctactccctccattccataatataaggcacaaccactttttgaagatgctccataatataaggcatgcatgcatgtaggcaattaactatgaccccttctacattaaattattacttttttaaatcctccactctcatattctctaattctattggatacatgcattgtatttattaggatgatccaaactacaagatgataataattattttcttggtctttgggttaggggtggttatgccttatattttggaattgagggagtattatataggcctacaaatgcacgactgagaaattgctttgtagaaaaagctatgaaggttttgcagggacaaaaataaactgcgtggatttgttgcttgtagatggggaaaaaaatagtgagttaccaacttgtgtccaaaaccacagagaaaaaaatggcaggagacaggagtgcaattaatatcacaagttgtaaatatctagcataattaagtcaatgaaaataagataacctttccatccaacgaggaagacgtgggccacggaatgatggtctaagttcccagccactgatgccttctaacatgttggccttccctggtaatagagtcaacaggagtgctgatattccatttatcaaccttgcaatattgttcagtgattcatatgtgaatgtcttcacagatctggccaaacaaatgcaagaattcaatagtgcatctcattcatacagaaaggctaaaataagagcaacttaactggcatcttataaacttcacagtagagatagcatgcatggtttttgtttttttattgaagcatgaaaactatccataaacaagtacaagcaagtaaaccccagaccacaaatgcacttagcaaagacataaatactacattgaaaaaagaacaacttagaaagcctgggacactcatagacaaaatgtcagaaatttgcattctaaggtacaagtcagcaatcagcccatatttgtccaaggctttcagctcttggaatcatctacaaagaaagattaaaaaaaaacaaggccagaactggtctttatggttcaaattccacatccatacttatgtgtgagaccaagaagaggttaacaaacagcatagcagccaacgatggggcaaagcggtgttgagtaggaagttcacacttaacaacggtgtcaagcgaaatggccccatgtcattgagatccttattaactgaaatctcagtgatcttaggccctgttctttttcagctacttcatcaagttatatggtggattatttgctccatgtctctaaaaatacctttaattttcaaaagaaactttcttctaatgcattcttacaccacttgttgtacggtacttattaagtttatttctaaaaatatttaatttatccctacaatcaagtacataatccgtttaataatctgtttcaaactgggacctttgtgcagccggcataattcagtaattcacaattctacacacaaggtatcatggtactactactaaaaaattagtgcttagccaatagcgacgccatatttttctgcccaccccttaccctcccctccctcctctcagcatctcctcgtttaacattttgacattgaacctaatccaacaaattctcgtttcatggctattctggagagatgaatgagctataaaaatccccgacatctaacctcagcgctcaatccaaaatccctagcatgaaatcctaccctaccgaggcaccgaccactccccctaacgcgccacccccacccatgacccatgacccacctcggctcgccgatcctccgcaccctagccaaccattcatcaaaacacccgcaaacaaaacgaagtaagcaagccccccaccgcggggaggtagggatcgaggggagagagaggggcggatgggtgggtgtgctcactccttgatgacggcgatgacgttgtcgacgaactcctgcagcattatcgcccgccgattcgcgaacgggagccgcggattcggggcgccacggcgtcttctggaagcttcggcgaagcgcgagggcgagggcgaggcgcggaaggctgaagaaatccggagggaaggcgacgatggcgcacagcgaacggggacggagacggcgaagccaaaggaaggaggggggcttgggcggtttgggcccacctatttccgtagccgcatcgtgtggaaagaaaaaattaaagtggggaataacctggtccgcggaatacaccggccgcgtggatgtgagcatgacatgtgggccatgctgggagatcatggcccacgtgccgggtgtctcatcgggtcttgttgcgtgacgtggaaggttagtttatcccgcggagcactgttcgaccccctgtatgctacgacaaagggggctttgattgggatagctttgtgaccgacaggtgggtccaggaactctgtgggctcaaatgtcaggcaggcgatctcatctgggttagccgcagcggggtgtgttttctttttatacttttctttctttttttaggagcatataaaaggtttcgtgcggagcgaagcgtgggataatgccgtggtggtgacgtgtcgccgtctgttgtttctctaccatgcgtgcgaacacgtgccgatgtcttggagcggtctctgtttgaggttaggcccggctcttgctatgacatcattcatcatcatcaatcatttttctcaatttctaattttttttaaactcctaaacctttgtgttacataatggattttcattaatacggcctctatattcacgaaggatatacacaactaaaaagatacaagagcccttagattcaaacctcatcaaagagaacattcaaccaaaaagaaaaacctatgacctcggcacattcttgcttcccgacatcttctcctgaaacagtcaaaatcgacgagtggaagttgtttggtcatcactgattggtaataaaaacttccaagaatgtgccactcgttcttaaataaaacattgattatgagaattagggagatgccaactgattggtgcaaactttgtgtgtggagatggtgcctgtaaaaagatggggctcacaagctaaattgagaacctttcacaagctaatttgagaaccttttcctttaggatatcgtctaaattgagaaccttttcctttaggatatctttaggatatcgtctaaattgagaaccttttcctttaggatatcgtgctacagaatatatgtatcacttctttgttttgctacagaaggtggagcagtttttatcttcttagtttttgtttatatgtatttataacaattattctattctagatcaattatttgtgtagatcaattatttacacctcttgcatagaaaccaccaaatacagcatatgggattctttattgcctcatgatttttgtttatctatgccaacatttacagacgcccaagccctcaatgctgggctccgtgcagacgtgagccggcacaattgtctgcttctccatgtgctccccagatagattgggtatccacatcaagaataggtaattcagaaaacataagacacaattatacttcaatttaattatactatgttatttaattatgctatattatgtttattcttcatctttcaatcagtttctaaccagtgaagtccttatttacgggaaattgtcaagtaatctctattgtacgtgttcttgatcgaaggatatagtggtgcatgtgtattcagtggtagtactctcaaacaaaaatattgagcatttgatgtacatcagaattgtactaagaagaacaaaattgtgtgccataatgaatccaagaatttaaatttgatttatttggaaaaaaattgcttacaacagtctacgtataaaatctaattgtactaccatcattatggttttttaaataataaaaatgttctcccttgcagtttggcaagtttaatttaagcaatttgtccaatttaattcatatactgatttttacgtgcattgcacgtggacgattactggcaggaagaaaagccagaccgggcaccgaaccagccaagcgcttggttcatcggtccagttggacttctcaaggtcaatgagatataaattttactaaacttgctaattgtcatactaaagatttatcttctctggcatgcaggtatttacattactagctatatttgtttgttttactttgtttgttgttctgggggctcattgtcatctcaagttcatgcagttttgtaacattgctttctggtccctgcgacaacgtgcgaggacaaacttgatttttatgtttactagtgagcgtgcacgtgcaaagcacatcttgcacgtcgatatatatatactctctcaggaattcatcttggctctagctgctgggcgcgtggctccagcgacaagttggaggcgatagcaacggtgattcacgacccatggcgcagctcaccctctgcctttgatcatgatccatcctgttcacaaataatcgcacaagttatatagctactaatgcaatgaacaaagatatctaaaggaacaatagattcttgcagtgtgtgctatagtccttccataatttgtccaactcatatggcccaaagcaaagtatttgttcaaaatatatgtagttctgtgaaatttactctgaataaaattatgtcgactaccttcaaatgttttgcatgcctcttgttcaagcaaaattgggtgatgtaataagaaagtaggtctcaagcaccatagatgcttcatgcttgcctgcaaaatagcaattgacataagattggagtatttcctgtgcgaaatctgttgtctaccaaagaattggcagtagcccttatgtgaagaaataaacacactgatcttaaatataagaaaacaaaaatattgattttcagttgcttatccagtgtgtagcagcatggacagttactgaggatgacaaaaagcattggttggcaggaaactacaaatgcattgcaagcaaccaacagaagtgctcaattcatagcaaatacagcccatacattgaaatgttaaaaaaaacagcgtggtctgttaaaccggcctgcatttgtaataaaatcaagtttggactatcaaagtacatgttgaacagtaagagattcatatttcacaccacacatttatataggctcctagaacaaattcatatatcgaataaatcaatcaaaatagattatgcatgcaaaattaattccaattgtcactgaatttagctgggtggcataatttttacagtactatattcactaattccaagcattcaaatttgtacaggaccatctataattttgttttgaacatgtaacagcttcgtggattgcaaaaaacagaaaatgtgcagcacaaaaccaagttagtttcataaaaaaaaagttcaatgattaggagtagatgagaaaaccaatcttaaaacgtgaatataattgcagggaatgaaattgtgtatattgaaaatgcaaggaaaacaccgattaacttgatcattacctttatgtcttgttctaactccatcactaacagcatccccttcactgatcaaaacagttgatgagcacatccaagacccatagaaggcctgctccaacagagaagaatataagcacaatagagctatgtgttcatcagtaaaaaaaaaaaagtaatgcaatgcatcacgtgaattgctacctacaatagtgtctcaaatcaaagctttgtcactgcacagtagaaattaacgtaggcggcatgcatttttatcaggaaggctgaaatgaagggaaatagacagctccaagcctccaaccaatctgaaaatgcatcatttaccataagtagtgatctatggccatgtggtttgtcaacatgatttcttttgggcagcatcataggaggcataactctctttgttctaaataaacatgatgcctataaatgtatatctccagaaattttaggaacaaacatgttaccattcagtatcacggttcctgaacaggcttgggtagcaccaaagccagcataatttgtgatatctcttatgggcacccttcataatttgtgaacctacacagacatgtactcttattttgggagtacataattcacatgtcatggtgaattttttttttctcatggttaagtttggacccaatgggatctatgcaacctgatagagatgtagtcgcctccttcttacgttgtttatacttacagttcttttgaagcctagcttgtttctgttctgtagagagtgaagcatacctctccctttcatgctttctcctaacctcggcagcagttaagtttgattatgcagtgcgcctcttcctaaaacatgtggcatggaaaagtaaaatcaaaccattatgtgataaaaatgtgttgtggccagaaaaatattaattatagcaagatagtgaagataaaacttcagaaagaacatacttgactgtgttgaaaattctgctgtggcgttcgcattgtttttcactgtattaagatgccgcctcatggttgcttacggttgtagcactgtgaaagtcagacactgaaatagcatagagcatataccatgtaaatcaccgtctgaaataacataaagcatgtaagtcagaaactgaaataacctccagacataccaatttactgaaagtgactgtcttgattcattctatgtcgatcagttaaggaagctaattggagttcggtgtttgcgttaatcttgaatgtgaccaactgagcatggactgacatagatggatgaatttgtgcgaacaaagaagtcagcactgtgctcaccgtagggcgaggcggcgagggcgggacggacctgaaagcgcagtgccggcgcgagcagacctcgcctctccttcctctcagtcgcgtagagagcagggaagcagggtcaccgacgagcggagggctggctagctgtcaaacttgtcaaacttcatatccattcttacagggaagcagggtcaccggcgaggaggctcaggcggtaagcggagacggagggctggcagcggggtagggagtgcgcctaagccggcggcggcgcccggctgtcctgtagtcggaggcggcggagggttggcggcgggcgcgcgccctgagccggcggctgtccggcggtcggagacggcagagggctggcggcggcgggctggtgcgcgcgaggaagagaagagcggcggcgggctggcgcaggaaaggaaaaattgtttttttttgttactttgaccgatcggtaaccgctgtttagaggtggtagaacggacagatccaaaccttgatatgagctgttggatatacagactaagggttagaaaagatatttaatgaactggtatttttatattagtagattaatttaactaaatatcccaattgcacgcaaataatctaattgcgaaattaggactatgtggcaaactcgatgctggatcctggatggggggtggacacgatgtattgtaccgaactatcgatcaagacactacaatcacataatatttgtcctctgaaatatttaacaataatgctagacaattttgatcggattaaccaagtaaagttggcctctataacggttgggcgatagcaaaagatcatagcaaagccagtagcaatttgtactagcaataaattaggttgacataaggaggaacatattactagttatatcatttgcaattgtctgaatctcagtatgttggttggaccaatcatatattttattgagataggtaactgacccgaaaccccctcggagaaccgtatattagaatttcatctcgtccaactcaagcggaaacacaaatttttaatggataaaaaaagtttcaaaacttaacttcattggattgggtcgatttgccttgaagatatggtttgcctgtgttgatgtacccaattttaaattttagaatcactttagaggggattttccgtcttttttgtcatttaaccttatagaacactaagaatttttttaagaagggatagaacactaagaattactcgtatgtttttttttactttaatcatgtgttttcaacgtataaaccgcaacccaaacaaatctgaaacaatcacgcacttagttaaccctctttacaggaagagagtttattcaacatgctcatatcacaggatttctattagcatcaagcaccggtacacaaactcattactagtatatttatctgatctcctttcatcagtatcactacggcaagtcaatttggtggtaggcgtggtgggcgcgggaatgcccgtatcgcagcatagatcagctcctctcggccaactggagcaggagtgggcagtgcagacgctggataagggaaaatgcagttctttgcatgagattcggaaatagtaatataaactgaattttgctgagaaccagaagctgagaaacaggttagtatagagcaaaccttgaacgtcagcagattggagtacagcggtacccatcagtggcgggcccaggatttagaggttgggtattcgaaataggtaggggtaaaacaaaattctttttacttctagaagtccaataattaattggtataatattacacattactaattgtataatattatagcatatggccataactttataaattgatagaattgatcataagtccaaattctttaacatatataagtactaattgttcgacatatgaaagtggcaacatatataacatgtaaaggatagaaaatggtaaaatgataaaaaaaaacttacaatttagaggagaacttttcaatgcttgatattttaaaaatgagtgatgatgtcctcatcctttaacttgtacaaaaaattctcttccaataaatgtagattgttgctcatcttgcttcttgtttttatatagttcatcgaagaaaacaccctctctaaattctctaaattcctaacaacagctcatatatagcctcatactatcatcatatatataaatttaacacactgaaaattaaatattatggttctaagttatctaaattcctaatatttacagctttatactatcaatctgtcaataaatatacacttaacagttaacactctgaaaaataaagaagacaggaactgaggaagttgaatccttcggtgctagtgaactattgaactactatagaacaaatcaatgaaacaagccgtcgccaccggaaaacataactactattgaactacctagaacaaatcaatgcaatgaatcaatgaatcaagcccctcacgcaatccatgccaggccggcaagccgtggtcgttcggctgccgcatcgcgtacctgtgtggtggcctggtggactggcggcctgcacgcctggccgagccccaacgccgcacggccgcagccgtcgacgcgccgcctgcacgcctcggcgcctcctgccgccgacgcagccgcgcacgccgcagccggaagcctctgccgcagccgccgacgagcacgctgcagactagactgcagtcgccgccgcccgacgcgctgcctaggctcctacccgccttggcgccgccttccgccgacgcagcaggaagtcgccgccgccgcactgccgcacgtcctcgccgccacaccgcgcacgtcctcggtcctctggttagggtttggccgatttgggaattagggctttggtttgctgtgcctaggcgaggaggggaaatgaactagttgtggcccaaactgattgtgggctgagatgaaaggggagggaagtgggaaatttaggcccaatagagaagaaacgatgaaacagggcccaaaatgagtagttttagcctttttctttaatttcttgaatacatatacgaggtatagagtacatatacttattttttttgtctaaaaatcttgggtatacgtctgaatacccttgaatcaatagtgggcccgcccctggtacccatcgttgggttgatcgtaggtccatctcttgctactgcaggagatgcaaggctgctaacaaaaaccactaaaataatgaagaatgctttgaacgccatcgtcactcgtctattgtttttctcagcttatgacagaaagcttcctatggtcctccaatttatagttggcaaggaatgtttcagcagcctaattctggtaataaacaaaccagcaaaaatcctattcgataaggttttgcagttttgctttaacccaaacagaaactatgattgtggctcgatggtatcaacatctcctaggctgcctaactcaatagtcccttgaaacacatgtttttcttttattagaatataattatatgatattttattgtaaagatttaattacaacgaatataatggtacaatcatattacaaattggataaatagtgtaaaagaaaaaaaatatttaaagcaagaaagaggaaaatataataacaagcaacctagagtattatatgactgtgtgttgcaactggtgaatgctaattcaatcttattgttgttactagcaaaaatgctcgtgtgttgcaacgggtgaaaaaaattctaacgataatatactttttcatgcataatcatgtcaatgacaatatttatattttaatgagcgacatgtttttttataaacgatgtattttttttcttgcgcgattttctcaaaccatttttcaaaaatggcgtatttttttctaacaatttttttcctagcatgttctttttgcttttttttactggcgacgaaaaccatatttttctctttttttgcttttcttttttcgtgtgtttttttatgttttttctgacaattattttctcacgcgcgttttttgcttgtttttttcgaatgttcttttttgccttttccaatacaggaaaatatatgacgaaataaaagacgtgtagtagatgacaaaaaatcgatggatcctacccggctcaagcgtccatcaatttagcgttttttctgacagatttttcggactgatttgtttttttaatagacgatgtttttttttggcacggttttttcaaaccattttttagaaatggcgtgttttttctgatagttttttcatcgcatgtttttttaaatttttttaccgacgatggaaataatttttctcgcgcgtttatttattttttatggaagatagaaaacctgtttagcgtgttttttttgcgtttttttctgacttttctcacacgtttctttgaaccgtttttattttgttgtgcattttctctttttaaatagttagattagattagacatagcgaagagatatatactgattagaaatcggaatttgtttctccctttccatttttttttctcgcgcatattttttattttacatgaaccatttttttcttcttagagaatgggacgaacttttttagatgttttttcaaaaatttttcgcctttataggaatcgaacttttttttaaaggtatcagatctcgcttttttttcaccatttttttgccttttataggaattggatctacggttttttttgccacttaggagaaacggagttttgttgttgttgtttttctttctttttctttattttcttttttttgtgcggtttttctttttctttttatgcagctttctgcctttgttctttcccttttatttttttaataaaaaacgaccttaagtatcttattgcaagattatagggacttagatataaatataaaaattatagggactcaaatacaaaagtacagactcaaaatttaaaatcatataaaaataaaatgctctcgaccgataggttccgtttttgcaaacagatcttcaatccgacacatcaattttattttttgtttttaagggtgaattggatctatagtgggacttgtttttccctttctgagagggaattggtaggagtcggactttatttatttatttttcgctattttttttaataagtagatagatagatagatagatagatagataacagaagttagggattagagattagatctgttcccttttgtgattaggaatttagattgtttatttatttttttagaaataaaaagaaaaaaagatctcgggagatggggaggagattttttttccgcctccgattcgcttttgtttttttgttgccacgtttttctttttaggatctctcttttttttaagttagacggacgacggaaacatcataattttttttttgcgggggaagacaggggttttattaaacttcagaataaggattacaatcctgagccagttgctcagcaacacacaccggcgcctgcaggcgcaagaccactgcctccctattccgaatggctagctgagcaagctcatgagccaccttattagcacccctgcgaatcagagccgtacgagcttcaggagcagcacgcatacccgctctcacttccctgattagtggccaaatctgggacctattagccgctgccaacctcagatagctatcaacaccggcacaatccgtttctagaatgcatggctccttgacccactcatttgcaagccatattccttccctgcacgcagctgcttcggcaaattcggccgatgcgcagttcctgatcagcttctaggaagtgagtaaaacattcccctcactgttccgaataacaatgccgacgctaccagtgctagtctgcggaacatagtccacgtttattttcacccatcccatagctggtgcctgccacacacctgccacttgggttctttcccggcacccattcacatcactttgtcttccctccgacactgtttttcctttctcattttcctgcattgcactgctagacgggcacaaggaatcccaaagattcagaaggaaagctgtagatcccttcaccgtcgcttgcccagaaccgaaaacacagtcattgcgcaggtaccatgctcgccataggacaaggagaaactgcgcccgctccttttcgctcagcttatcgagtcccccaagaagccaccccggacctagcttcgacagggaacgctcatccggtaacctccagctcgcccgaagagtttctcggagggcccttggctaggtacatgaaatcaccgcatgaaactcatcttcctccccatggccgcagatagtacaggtcgcatctgcttgcagctttcgtttacacctgttctgctgggtagccagataatttcgggctagacgccaggcgaaaatacggacctttggtggcacaggcgtactccaaattcttcgccaaatggagcgatcactgtccgcttctctactactgccttctccatccggatggaacttgttcaaccacgctaaacgataagcagacctcactgagaaaatcccagatttttcgtagtgccaagctaggaaatcctcatcctggtatggcgacaaattgatttcaagatctcttccacatcaagtgggtgacagacgtgcatgatcagatcaacgtcccagctcttttccccttgtttcagcagctgcgagacccagcgaagacggcagcgtccgctccttcccataagcatgagagaggaggctcggggaatccatttatcccgccaaatcctgaccttggtcccatcaccaattcgccatataagtcctgtcttcagcaattgcagcccatgttcaatccctttccatgtcggagacacttcagctgggaagaccgcatctactagctcacaattagggaaatacttagcctttaaaacccacacacataaactatcagggaattgaattagcctccatgcctggcgggcaagcaaggcctgattgaagagcttcatatcgcggaaccccagacctcccattcctttaggccgagtaatattttaccaagcacaccagtggatcttccttttattctcctcatcaccccaccagaaatctcgaatcatcatcgtataagcctcgcaggtagaagctggcagcttgaacactcccatcaaatatgtcggtatagcttgcaccaccgacttaattagaacatctttagcccctgatgacatatgtttctcagcccagctatccattctttttgccagtctctcttcagtaggtttaaatcgtcccgcatgcattctaccttccggtgttggaagtccgagatacttactttcaaacgccggtgtttccacttgcagaatctccttcaccacttccacagtcgcatcagggcaacttctcccaaccaagagagagcattttccgggacttaagagctggccagtacaggcttggaagcaggttagggcattctggactacagtagcttgttgcaggcaggcacggaagaagagcaggctatcgtctgcaaacaacaaatgtgagataccagggctccgacggcatactttaagctccgttaagcgccctgcctccacctcccggttaagcacagatgacaaaccctcagccacaaacaggaaaaggtatggggacagaggatccccttgtctcaacccgcgagtaggggagaaggcctctagaagagacccattgaaattcacagagaacttaacagtcgttacacattccattatccaatcaacccattgtctgcagaagccaaccttcaagagagctctttccaggaagtcccaatctactcgatcatatgccttgctgaggtcaagtttgtaagcacagaagctattatccgggctgttgttcctttggatagcgtggatgctttcaaaggcaattaacacattatccgtaatcattctttcaggaataaatgcactctgggtggatgaaatgatatccgatagcaaaggacgaagtctattaaccaaacacttagagattaccttgtagatcacattacacaggcttattggacggaactcctttagattttctggctgtttcacctttggaataaggacaatggatgtgttatttacctcatctggcatagcacaatctgcaaaaaactttctaactgctgccattatctcccctttaagcgtgtcccaatttctttgaaagaaacgagctgggaagccatcaggtcctggggccttgataggaccgatctgaaacaacgcatctgagatttcctcatcggaaaagggcttgcataactccaagttcatgggttcgtcaaccagctcttgagcagatccaccacttctgctggggtaacggaatgatctttcgtgtacaacttctggaaaaaagctgtagccatttgttctaattgttccttgttctccacatacttgctatcttcatcttttaaacggatgattttattcttcttagctctccatgccgcatgtctatgaaaatatttagtattgcggtcaccctccttcagccaagaaatccttgatcgttggagccacatcatctcttctcgatataggagctcgtccatccgtctataaatcgtactgatttcgtcggaatgatcagctgaaggatccagcaagagagcttcaaccttctgacgaagatctttcagttcctttgagaccgaatcgaaaacctttatgctccactcacgtagggaggacataaccttcctcagcttcacagccacttcacctagatctgctgccaacaaatcctgctgctaggcgagttttataacttcactgagagactcctccctctcccacatgatctcataacggaagacattcgtcggggtagacgatcgctttgttagacacaacaggatagggcaatgatcagacctgggagacacaaggtgcaacaattttgcttctgagaagtgattcgaccagcttggggaggcgacagcccggtccaacctcactttcacattcctatcccctctctgtccattatcatatgtccaagggcgacccaagaagcctatgtcatgcagatcacaatgagatagtacctctctaaaatccatcatctgtttttctggtctccttctcgccgagaactgctcgaaagaccaaagagtttcattgaaatcgcccatcatcaaccacagggcatttgagactggttttatgcgacggatcagctcccacataagatgcctatccgtggtcttcggctcaccgtaaacaaaggtacatctccataaaaaaccatctcccggatttctgattagcacatcaatatacatgttactcatcgacaagagatcaacggttatagtctcatcccaaaacagcgctataccaccacccgatccttcccctttcattgataggaagtgtttcaatcctagcctccatctcagttgctgcagcttcccctcatcctgacgagtttcagatagaaacactaacttggggctgtagtaacgcactagacgtataagttcatgaactgttcgagggcgccccaaccctcaacagttcgaaaccatcacattcattgctcctggtggggctcatcctgagcgcccaccaggtctggcaccaatgcttccttcagcattgcatgtgcctcactagaatcctcacttgtatccttagcatccggctgtaccatgtgattaaaaggctcaatatcactagcagacagtttgatattcatttttctcggtttcccaatgtcccttctcctgataaagaccctggcgctactcgatttttcaacctcacgagaaggcagtccctgcatcttttttattaaccagtctggggacttccttctgacctatgtctgcgctcctccagcttttgccgaatctacctcatcagctttatcatccgatagaccatagtcagaactcatagaaactctctctctactgcaaggcccacgagcaaccaaattcagactgggaccaatatcttccacctgcatctgctgcacacttttgcccaaaatctcatctgctccacacatatcatcctttactaactcagtaacagcttcgtcatccttccgaacccccaagtttgcgggcgtaccacctcgagcacgacttacctgcgaattcctagatgaactggactcagaaaggactttatccttctgaggtccaacaaaatttagccctctgactactcttggtgctgatgaagaacccatctactgcacacgattcctcaacggtgaagcacgcagctccttccgatatctcacaggattatcagacattccttcctctggacactccctttcagcatggccaatgcgcctgcatgagaagcagaagaacgatacgttttcatactttattgggcacgatataatacctcttcctttgattctcatcttaatgcaggtttttagagcattagcaagtgaaaactgcactttgactcgcaaaaagttaaacatcgccccttgcacttcaatcaccgcacccagtttctcgcccaaaaacctgtggtcatcattacctccgagagatcgaagaacctgacccagaggggaatagagtcaatgacaacctctaacggtctcacaataccatcatagggaactactatcaatgcatcccccttgtgcttccaagggcccccattaataaccctcttcaaatcagcttcacagccgaactcaatcaagaatttgttttctcctaagtctcgggttcttcttgtctcatgtaaaccccatgccgtactcatctcctcaaacaaacccttcacattgtaccgttgccctgaatagaacctcgccagtgccagccacttaacctcctattcctgttctaactctcccagatcaacataaaaaagatcctcctccgcctcatccacagaatccagattttcgccaaaaagcacaatcgccttgttaagcccggaagcctgacttgcagaaccagcccccaaacctttcaaagtttggtcaatagttgcacccagctcgccggccagcaatccgatctcatcgttctcgccaacccccgttcttccatctatcagccccctaacttgcacatctttgccagcgtccatcgctcgttcgcagatcatgcagatccacccgtcaacggcttcgggtgggtagatccctcaccgggttccccttgatcaccctcaccgtcaacaagaggaagagcacgtgaagaggagacgaatcgacaggcagaagaaaccagtaccccaaccttggctagggtttcagcagaccagcaacccgaggacaaaggcacgacctcggaaggaagagtccggactaaaaatagatcacagccaatccgcccccgattacaacgtggcggtataaatccagcgaatcacaacagaaactcctcaattaccttaatctccacgtaaaatcgcagagaccagaacggagatgatcagatgagattcaatggcgaaaccctagaattgcctaagaatcgcctcccgtaatcttcggagccataactaataaaaatcatctagggtctcattcatcataaattttttaagtagtaacagatatgatttagttagggtgaaatacaatgtggaaatttgcttcatattttttttagaaaatcatgagttataattaggagtctaactttcatctcaagttagcatgtaatttttttctaaaaagatttcttatacgactccttttgtatttctaaaagccaacgaacttaaaatctgacttaaacacggatttgtagtttcaagaatgaacgtttaaaaactgactcaaatacaaatgacgtattaaatactgtcaaaaatatctttaatttttataacagtagagaagagatacagatgaggaccgatttcttttctctaaatcgggctacggatgcagagcaatctcgactagaccctcccctgagaaaacggccttgggctgatcggaggccaccattagggcaatagggcgtcgctgaagtatctcaggccgctctccgccgccctaattctccaatcggggaggtaaagatcaactttcccccttttttttgttctggttttctcccttcaattccgtctttcagagccactcctctcaacaaatcctcacacatcgtatattttttgtttgatatacgacggacaagcgttcaatttcagtttctttctctggctctctaaattactggtcaattgatccacaagagtagggattgtagtactctttggtgaatctgtcaggctggttctcgattggttggtgagactaccatttccctctgatctatgaactcctttattttgagtaccacttgcatcatagtgcattgttagtgttcgaaaattctctctctcccccaaattttcaacaaagtcttagttagtaccaacctcttggcttctctttgccccgctaattgatcaatatgttgtattgggcttgtcctaattctctctcaggaacaaacaatgttcctagtatttttttggaaaaaactactgtcttggcgcattcgtccaaccacactacagattgaattggctggccatcctttgtgcaatattttatcttccgcaaatatctttgcttgaagcatgagcattactgtggtgaagcattagcattagcattagcctttactctccaaatcggactaaggggctggggatgcaaccctgaaactgtatccagtatgaagatttcgctacaaggctattaatgtagaatggacagttggaccttctttgtttcactcattctacaaaaaacaatgtagggtcgatatgatattaatggatctaagcgtcttaacaccattacaattttggaaaaaaaaagggaattgccatactattaaaattttctgttactgaaaagtttagaaaaagaaaatagaaataccaaataacagggtacccaacttgcattagaaactgtctcatctattaactgagcaaaaaaaaaagcgaaaacactaaaactatataacttttgaatattttgtcttaatcctccaaatacgtgtggtcaatcttgtatcttttgaagtatttgccatactagaaatatgatatgagatacattgattcaaacttcttctgggaacacctattgagagggttggaagttgtacactcattgttacggtaatttacttttatacttttctgtaggaaatgctctttctgcctaacccaaaagtgaacgacactgttcaaaactaaaaattggtttgcaagcacgtagtactaactaaccatactgcgtttttcagtcgtctcctggctcatgctttaagttgtgtgcaattcaattattagaaatgcattgaggtactacttgcaacagacttattcttttgttaactattatattatttttaaacaattacagggacttgggccaagttcaatggtcactaaggccgctctatatataccatatttgaattatttgttgtgcttattgttaagaatgaatttcatagctacattgatgatatttagtgtgtaatgttcttgaacagataaataagaacgcttcaaggtggaagcagcaatgctggtacaagttatcttgacatagatgaaatggtgaagtcttaaaaattgaactattacctatctatagaatgttcacatgtgagggtgagtaaatcatgcaaaatctccagagttccagaacacattcggaagatggatcatggggcttatgagccaattatgttatcaattggtccataccaccatggattgtcgtacttgctagcctttgagaaggaaaaatggaattgccttgatctttttcttaaactgaatcgtgaaataaagttggaggactacctaaatttggtcaaagatttagaggaggaagcacgggcatgctatgaagacattgacatgcaacatgacaaatttctgcagatgctactccttgattcttgcctttttgttcaccatttcagaggtttagagggaatacttccatccactttgggtgcaaatatatgtagtgctgacagttcggacattataatggaaagaacaatacacaaaagcactacaagtcaaggtaattttggtgagcaatgcagcagggataactctatctgcacacagagagaacttgtccttgctggttcaagtcgggaagttactagtcaaggaactgactttgatcacactgaggaacttgaatcttctcaatgtaataattggcaaattggaacctggtttgacagctgtattgaacaagacctgatgctactagagaaccaaattcctttctttattgttaggaggatatatgaactttttgctggaaatgagaggcctatttcatttctcacagacaaagtagctcaatcgttggagaacttcatacaataccatccaagagcaatccaggaagcacatcggcctaaagatttccatcatatgctgcatttgttccagatgtacctcaagcctagtaaaaagctggttgagggttcacaatacctggagagaggaagatattttcattctttcgctaatatatgctataggtatttgaaaattggacgtaagcttgccgatagcaatcacgatatgtcaccagatcctttgcttaactgctttcaggatcaccatccacgtattcgtggccgtcgggcagtgcaataccatcaagctggagttcaattcaagaaaaagtcatttgataggaataatccccattctctgttagatattagctttga

SEQ ID NO: 5510 - DNA, 36150 bp, Oryza sativa
  unsure (1)..(36150): unsure at all n locations
ttcttttagctgtgaagaagatttgtgttgccttgggaaatgaagcaatcaaccaagctacttcaaaattcaaaaggtttgtttcgcagataacagagcttcaaggaagcatgggccgcatcaagagggagctcaggctgatacatcaattcctttctcgaatggatgtacgcaatcgcaataatgagacgtatgaaatctgggtggaagagataagaatgctggcacatggaattgaagatactgtggatgattacctgcaacttgtttcccataaacatgatactggatggagtacctatctgaagaaaggattcacacgaccaaatattctgctctctttaaacaagatagcattgtccattaaggatgcagaagccaacctgatgcacctattctaggcgaaagaccgatgggtttcgatggtaggtgatggtaataatcctagtaatgacagctcaaattacattgttgagaggtcccaacatctagcaagcatttcacgctcccttggtgaagaagatcttgttggggtcaatcaaaatagagaaacacttgaagagtggctggcagatgatttgttggaacgttcagtaattacgctgcatggaatgggagggcttggaaaaacagccttggcagcaaatgcatacatgagggagaaagaaaagtttcagtgtcatgcatgggtctcgatttctcaatcttactgcatcaaggatgttctaaaatgtttgatcactgaactttccagaaatgtgaaaaagactaattggggtaacattactgacatggatactggaggttttcgtgaagagctgaagagattcctaaagctccagaagtgtttgatcgtattggatgatgtttgggcgccagaagtaatcaatgatttgtttggagcacatgttcctaatctcaaagggagcagaatacttgtgacaacacgtatcgatgatgtagctcaacttgctttcccagacaggagaataacattagaacctctatgtgagaaggaatcatgggaactcttctgtagaacagcttttccaagggagacaaatcatgagtgcaatgcagaactgttgcacttgatagatcaaatagttagcaagtgtaagggggttcctctggcaattgtctctattggcaggcttgtctttgtgcgtgacaagaccaaagaggaactgaggagaatacatgaccagctcgactgggagttaataaataatccaagcctggaacatgtcaggaatatcctttacttgagctacatttaccttccaacacagttgaaaagttgtttcctatattgcagcttgtttccggaggatcatcttctcaaaagaaaggcattaatacggtggtggatagcggagggattcatcagtaagaggggtagaagcacaatggaggaagtggctgaagggtatctacaggaattggttaacaggaacatgctacaactaattgacaggaattcatttggcaggataaaatcattccggatgcatgatatcatgcatgagttggcggttgacttgtgccgaagagaatgttttggcgttgcatatgatgaagataatagacgttgggaacatgaggatagagatgaacgccgattggtagtacacaaacttaataaggacattgatcaagaaatttcttgtgcgcatagtcttcgatcagtcattacattggataatagtatgatatcatcatccagcatactatgtctagtagtggacaattgcagatatatgtcaatactggagttaagtgggctacccatcagcacggttccagatgctattggagatctattcaatctccgccatttaggtcttcgtggttcaaatgtgaagtttctcccaaagtctatcgagaagctaaccaacctgttaacactagacctcttcagatctagcatactggagcttcctagaggcattgtcaagctgacaaagcttaggcacttgtttgctgagaaacagactgatcgacatcggcgccttttcaggtggtgcactggtgtaagcatccccaggggccttgagaacttgacaagcctacaatccctacaagcactggaagctcaggatgagtctgttagatgcttaggagagctcaggcagatgagaggtctcagattatggaaagtgaaggcaagcctctgtgaacgcctctatgagtcgctgcttcagatgaaatgtttgtcctacctaagtatcacggcaagtgatgaggatgatgttctccagttggatggcttgaacccccttcctccaagccttcataaactacgtttaagtggacgattggcacacaccatgttgggtgcagagtctcctctattccaagaagatgccgggggacgaaatctgtactcgttgcgcctattttggtcccaactaaaagaggatcccttgccatccctttctcggttgttaaatctaacagagctacatttcaccagagcctacaacggagagaagctggtcttccttactagatggtttcccaagctgaaggttctacgtttaagagacttgcctaatctaaagaggatggatattcagcaaggtgccatggtgagccttgaaagattaagactaataaacctaagcagcatggaagaggtccctctaggcattgagtttctcatgcccctcaaatatctaagcttcgaggagatcactgttgacttcttactgtcattgcgccaatctagaattggtggtatgcgatggtggcacactttacgagaggagaatgatatggaagctggtgtaagaacgtaggctacttgattccgtggcaattagctactgttatgtaatataaattcaattcaatatcataaactacaacactagctagctatatgccaggttatgcatgtcacaacatttttgtccataagccttctcttactggctaggtgtggtagatagtctgaccgcgtgcagggagatgcatcttctcaattacaagattagagtttaagactcttttcatttaatgggttggttttggttgagggtcgtcctaattctgagttaaatgtgtattgaacttggtttgttgtcggtatgcatcataggtatgaagaggccggagtttagattgtaagccttccattatccaacatgttttgatgggtgctatagtggtcattggtaagtgagcaaaacaatttggttaagagagctgaaataacacatatataagtagtacatgagtccttttcgaatgattcaaaagcactcaagtttctaatgtaccggaaaaattgcaaagaaaaagatacaaatataaaaccaagcagcactactgtgtgaataaaaaccactgctacggtgaaattttaaccatcgattagggaatttgcatcgagcaaacaaaacagcttctacgtattaatatcccaagtcctaggtgggataacttcaaaaacatcaagtgggagttgctttggtctgtggcccccctagtcactccaggagggaccggttcgggcagcgaaaccctagccgccacctccgcctctcctccctactcccttgctcctcactgccaccctgagcatgccgacggcggctagcgcgaccactaggacgtaagctgcggagccagtttccgagcacacgctcgcttgcagcgacggtgacacggcgggcactcgcggtgatggagatggcaccgacacggtggcgctacgaagtaggtgctcatggcgatggtgtccctctcatgctatggctccaaggtggtggatggccagggtcggcggcccgagcttcagggaggggtcagatccatggccgccttggccagatttggccaggttggtggtgtttgaatctggaggctcggggcatgcatgtcgatgaatggcgacacgtggtgcgtggtggcggggtcatcaccttctcctttcactgcatttttttgtggttggtggtggcacagtgacggtccaggtgtgcagtaagtcgttcacccctctgttggccaacattctcccctccatgttgctcctccccttctatggtcgatctgcttccatattgggtcattgggagctccgtggcaagggtagatgtggtgcctttgttgagctcacgacgtcgagatgacggactgtcctatgtgtccgcttgagctggcttgggtgttggggctggatggggaaacggtggcgaaaagctagacgtgattttgcctggtttgatgacagcgacgccctatggtgcagatcccctccttgtaggcgccattgtggggttttatccctactcctaccacaccacactccgggtgaaaaccttgatttggattttcggacaagcggcgacggcgtttcacatcatgtcctctatggtgctgccactttggagagccttcctggtgcattaatggttgttttcttgctcctactcggctcaaggccttctgcctccacatcaatggtttaggtgttttcatgaggccttcgctgccttggttccagtttcttgcttgcggtgcaaggtagagtcagagttgtgttgttgggggtgcaataaaactaggcaacgaagacacattgtgtgccagccgtatttatgtgatggattttaatggctttggctgatgtccgtgtgggaagtggaagctacttgatcgctctataatgggcttagcattgatgacacttttgctgtggagtcggagctgctgtgttgcaagaggtgacaagctcggcaacgataacataaattctacgtggtcgaagcattcttgttactttgcggcaagctcggcaacgataccctatgtttaggctttgccattgttggttgtttggttggatggtgtgtgcagtgttcggtgtgttgcgcttgttcagccggcctcgtgtttggtgagacttgtgtagttgagttgttttttcttttcatttaacccgttgggtttttatccccgcttattgaaatataattggagcccttcggctggtttcgtttcaataaacaaacatattattatccataaaaaaggtgagtgatcgaagaaaaaaatttgctgtagttcagtggcaaatcaggacgaaaaatagaagaatggctcatgttgaagctatggcataagataagggtagtagagatgattttgctagccagtattggactattggctaccaaattttaatctcataatagatacgtaaaaaatgagtagcaatttgtaggcttgttagcatcttaatttgtaggctgtgttcttttggaggagttgggaaccccctcgcacagaaaatggagcgatagattaacacatgattaattaagtattagctataaaaaacttcaaaaagggattaataagactttttaaaacaatttttctatataatcttttttgtaaaacgcatacagtttagcagtttgaaagtgtgcatgcggaaaatgagggagatgagtcgggaactcatggaaaagaacataatggttgtaatgtaacacacgagtgccggtcagccacagcaagtcagtgatacggttgtaattgtgagtacatgtctacatattaaacattcagaactaattatgactgcaattcacacatccacgagttggctatagatggccaaaaggcctgaggcccgacggcccggcccatggcacggcattttggcccggcccaagcacggcatggcccgacggaggtcgggcccatgccggcccggcccgaccaccgggccatgccggcccggcccgaccaccgggccatgcctgggcccctccaccggcacgttggcccggcccggcatgatgggttggcagttaggcccgataaaaaaaaatatgggagtaaaaatagacatattatatgccatggacgaaagagtagggatctaaaatagacttttttttatctatacatatgtcagccaaagaggagggacggcaaatagacttattttagctatacatatgtcagcccaaagaggaaggatggaaaatagacttattttacctatacatatgaaatagcccaaagaggagggacgaaaaatagacttattttaaaaaaggcccgatgggccacccatgccttcggaccggcacggcacggcccgacagctggtgggccgtgcctggacgggaggtgcagcccatcggccggcacggcctggcacgaagtgcctatcgggtcatgccggcccgatgactgctgggccgtgcccagccatgcctgggccgggccgtgctgggcgggccctttggccatatatagagttggccattcctaaatcccctgtctccgccggttcagccactagctgcgcgggcgcagtcgtggccccgtgtctccggtgccgtcacgccatggttggcacttggaagccttatgccctttatattgcccacgaaggcccaaatatccaatccctgtcaaccagcagaagcccgaagcccatgttttcaggtagaaatggaacaagttcaccaccaagtttgtttgacatcccttattctaaatattagaaaccttcatcccctaaactatacataactgtacaatttagatccatagcagtttgtatgcccggtttcgctggcatggcattctattcagcaaagttaaaataaaaaaaatatgtggggcccgcgccaccaacatctttctctcctttcttcccaagcaaccgccccgagggggggggggtgaggggcaccgggaggagaggaggccggcgagcctaggagggagagggcgagagaagcggccggaggaggtatggacagtgccggacgactgctcgacggactgcaggaacctgagcaccttcttccagctgccgctgcacctctccaggagctccccgcgcgtggcgggccagggcccatggccgcgagtgccgcacgtgcgacgcatagtcttgacacggcgtgctcggcgagcgggcagagcacgagacatgtggcctcaagcctcgcgaggttcccggcggcgaggcggccggaggtcaggacctccccgataaggtggctgggtagctcctccatcgaaaagcttgcggcgccttctccctcatcgccatggatccacccctccttctgcgatccccgcctccacgcgatgaaatcttggcggtcttggccatggacgacgacccgccaccgtcgaagatgccggtgatgaccgggtgactaggtgacccggcgagcagcgccatcaccatggatagccctgcggccgtcggtcccgtcctcctcggttgccgccaccgtctggcacgatcatcccaggctatttctcgatggctgggtactccagaggacaccgtcttggggtcacaggtaggcgctcgttgctgcccaactgcagggagccccggctcgccacgctccgaccatgcctccacatcgccaccgcagcgttcgatttcggccgcaccgccctcgacaggaataagttcacctactgtcgtgagccttccttctttagttatcataggtgtgaacactagagagggggaagaagaggccagcatccagcagcctcgcacgtgagcgtcgtcgtcgccgtcgggtgcggcggcggcagagcctctcgaggtggcggagctcggctgggcttgccggccgtctctccctcttctgccgccggcgacctcacgagaagagagcaggagagaagaggagaagaaagaaaagaaaaaagagacgtgggtcccatattattttttctcacttacatgtgggctcccatatactttttttttaactaggatgccacgtcagtgaaactagatatctatactactatgggacctaaattgcacggttttatatagtttaggggtaaagatttctgatattgaggataagggatgtcaaaaaaataagggatggcaggtgaacttattccggtagaaattagtcctgcatcagaatttctcataatggcgacatagattatggatggattattcatgttttatacacttctaaaaatacactttcttctataactttacattttagtaccaattaaatattttttttctaagctatttattagccttataatattacagaacttttacgctacaatatacgagtagtatgctgccattataaatgatctaactttataggccgatttgatcttccaattaattactccctccgttttgactttctttctagttaaattttgtaaagttcaatcaagtttatagaaaaaattaaaaacatctaaaatatgaaattagttttattaaatctaatgttgaatatagtttgataatatatatttgtttttttaaataatactatatttttctaaaaatttggtctagaaacaaaaagtcaaacgacttataaacggagagagtagattacagtataaaatttcgtaaaatttaaaaaggtagatttgtctttctacgtggtggttcgggtcccctttggctggccatggtaatcatgttctaccttactctgcgcgatgattcattgttcatgggaggagagatgggtgaccaggcttttctaaagtagggggattagcagtgtttagtgtgccttcgattcgggtcaggctatattggaggtttggatagcaggtggggctggaggtaaggaatgaagaagctttatcagttgaattggttcctcatttaaataacgatttatctttctttttttcggtgagtcatgtcaaatcataggctacaccaattttgatagtagctaaactacctcaaatggtcatctcactactatgaaaaccatttttcgtggtggccattttgaatttttgctggcggattttgcagccgtcaaaaagcaaaggccagtgaagatcaagatcttcgctagcggttattgaccgcaagaaaaaatggagcagccgccacaaagcaaaggccagtgaagatcaagatcttcgttagcggtcatcttaagccagccgccagtaaaaatccagtttcgctggcgttggcttaagacggccgtcagcgaaaatggatttttgctggcggctatgttaaatcggcctccagtgaaagtctattttgggcccaaaaagaaatacccatgcagctgcccattgattcattaattttaaaattcaaatccatatctagattcgccgctcatttccaaattcaaacatgaaatacaaaatcatcatcagcacagatcaaacagatcaaacatcatttacacagatcaaaacatgtgcatcatctggaataacatgcaaaaaaaaaagaaaaaaaaaatcaaatctagcagcacggtcggaggagggagccgcgggagcacggtcgacggcgtcgaggtcggagaggagggagacgagcagcatggtcgacggcaccgaggtcggtgctgccctccccgtggtccggcggcggcggatctggcctccccgcggcccggtagtggcggatctggcctccccacggccgggcggcggcggttccggcctccccgaggcccggcggcggtggatccggcctccccgtgcacccgagctcctctcgcggccacgcccgagagccgccgcccactcccgggtgccaccgcccacgcccgagctcgccgccgccttcgccgcgcactccgtggagggagagggagttggaagaggaagagaaggatgtttccttcaaccttgaaatcttgaatgcagcgtttggtaaagaacatcatcttttaggtgattgttcttaaataggcccggttgaacttaggaagatgtgaaaacaggagtttctgtctttctaatgacaaatttgtttgtgatatttagtacgtacgatgccctttatgcactatgaatgtaatgatctacatggaataatattatcgtgcttgtcacagctacttaattagaagcctatacaacaaagcaaaggaaattgcagatgcagatgatgaaaagagtaaaacctcagacgcttcattggtggataaatacaattcctccaaacgatcagtatctctcgtgcaaaagcataaagagagcaaaaaggaaaaaaagaaaagaagcagaagcaacgagagaaagaagaaagggaagggaaccatcaaccacccatggaagccttgtgaccgcgagaaggacctgactgctgggcggcaaaatgtcaatttagatcctgagaacatggcacaaggattgtcatcccgtttttcctctggagctgttcagaggaacttcaaggatgaccatgttggctaatcacagatgaagcatgcatgaccatgttggtcactagtatcctggtattatgagattgtcctgtttcttcatgatattgttggtttgaaaaagaaaataaagtggggtaagattgtcatgtttttccatgatattgttggctcccagttagtacttggtactcctactatcctaaatccagaaatagatttggtgcatgtttctttgaaggatctgttgaattgtcttgtggcatgtagttagttaatttttgattaaggtgcatatgctactatggtactaataagaattaattatgtctgattcatgtggatagtctctaagttattaaataaaattgtagaggaattacttacaatcaaaagttagattagatggggctggtcatgggctgaagatttgacgaaatgttccttctgtgattatgaacatgtatgcagttagctgattattaatgaacagttagctgaatttttagaagtgtatttacaggtgcctgtcaggcttttgacacaaataattatactaactttgacatattgttttggtgtgcagttttctgatatgtgatgtccacgggccttttgtttgctgcaacaatgatgcaaggaaatgtattatgatgtatgtcggaaagtgttgttactagatagaactattaaggcaatgaagctcaagttatgtcttgttcaatttgatactggtaactgggagagatatttgtgtgtcctaaatctcaatgtgtattggctcttaatgttggttgcctttttttttttgcaatattgtaacaattacgacatggattttgcagcaggtcttcagtatttctttaattttctacaattttcgtaattttctaggcattttcggaaaacctcatggcggccggccgacgtggagtgagaacttcactaccactggcgcggggacctttactactttacgacgatgggtgaccgcccgtagggggtttattgcacaaggcccctgcagaggaaaagcttgatcccagcgaatagaagatggaattgctttgctcttttctttctttgatgcttggaaggaaggcctataaccaatcaatagtaaacatcccgctaacttggtcagggagcatttagacggtgcagttagtattgaccactaccgccaagtccataattcaaaaattgatgaattcannnnnnnnnnnnnnnnnnnnnnnnnnnnnnnnnnnnnnnnnnnnnnnnnnngaagaccccaccgtggtatgcgccaataagaccaccaaaggctcaatatgggggatttccgttggatgtgatctccttatatatcttttttctgtattttcctgaaaaattatattttgtttgtgccgtatttcgaattatgtgcataatattttgaaatttctggagtgagactattaaattgatatgatatctcaccactcactattatttaccacaccaataatatacttagatcccatgggttaaggggattatatcccacggtgaaggggattgacgtggggattgggtggtgggaggggatccacccaatccctgcctagtggtattttccctggggaaaaacaaccccaactaccgaacaagcccttagtcgtagctgttttgttagcatcgtatttggatggaagcgggagttatcctcgtgccaagaaaaacgagagagcaccctcatcatcactgaacggctaattaatcctccactggcttgcacactagcatatttaatttattgtattgcaatttgcaacagggtgttttgtttcttctcaaagttggtaaagacctacttcctggtcgccgtctttttcttaaattaactttgtgactttgtaaagaagacctgtctgcagattccaagataccggtcgaagagtaggtcttccatatgatttatatcatgtccatgtacgccctgctcattggctaattaattaagttccagggcaaaggaagactttgccaacttgcataactatagaacgactcgcagatcgatctacctcccaagagtcactattaatatatatatatatatatatcaagaaccgagaaatatatatgattactccatatatatagtgtgtactctttgctaggtaggagtagatcgatcgagccagtcgcccagtgctgctcctgcagcgatggcggaggcagccgggacgagggcttcacagcagcaggaggaagcagctgggattgagaacggaggaggcaaggaccagctgccagaagatacaagtaagttaaacataacagtcctctggcttgcaatctactttaggttgatggacggcttcgggaagctggcacttgcctgggccaccgttgtgctgctaggtggattctccaccctgataaagcccaaggacttttggttcgtcaccatcatcgtggtcatgcaaataacaaggtgcgtatcaatacgacatccctatatatataaagtagaagttaactaaactgctaattagtttccgtttccaccatcaattgatacataggaaaagtgctggcttgttcttgggcactcgatcacaagagaaaaattgggcgtcccatggctacaggcagtgcccctctttcactgtgaatagcctgcacacgccagcccctctctctctcctatgcatgcatgcatgtgtgtgtatcgctctaacgagtttcaaatattttcccttaaattagttattatctcacatatgatccaattacacccatatttattaaattactagaaaaaatatccatgcgttgcaacgggaaaataccttaaatcacttagatccgtactttcctttctcaaaacttcggcaaactcaatttgaaaatttgaaagcgaattcaactttcccttttgaattactttcttcttttactagtctccccttgtttaaaattcgtttaaattctcgtatatcaaaattcactaaagatacaaaagtccatataatcacacgttgtgaccgatgatggatgaaaaacggaagcccattaagatttttctacaaagtaggtggtgaagatattccaggagaaaaacaagataaaaagaggagaaaagagaggagattgaaaggagagggagataatcaagattatcggcacaaaagaaaagaagaaaaagaaaacgaaaaaaaggaagagaaaaaaacaagctgattaggggaggggtgtgcgtggcgcccaagtgtaggagcgcgagatggacggtgggatggtgttgggttggttgggttagactgggagagagagggattgggatgggatggtggtgtttaatagttattctagactcacgtgcgtggaattggatatgggtgacatataactagcttaaaaccaacttaaacacggatgaagcaccaaagtttcggctgaaacatcttcaatttttatatagtagagactagaaaattaaaggtgtccgtgcgttgcaacgggaaaaactaatgttatgataataattatagttattttatagtttcatgggaattaggatatggcatattcatggacataaataatgaattaaatctatacctaattctatatcatgacaaagaaataattacatttttgttgactccatttagctagaaataatttaatatgaagaatgaaaacatatttcaaatttaagtaatttttaatggctaaaaatagtgcttgaactaagtttgttaacggaaaaatagtttaaatcggttgaaaataaataaaacacaattagtctcataattagaaggatgttgtgaccggcctgttaagtgcactgggcccatgtgacaggtcatggcacaagtcgacataggtgcgctgagagtcgttggattcgatagaacggttaggaacttaggatcactcgtgatttagataaacattgcctgttaaaaccctaaccttaaattcattcctcctctctcccaccgcgagcgatggcgcactcccccatcatgagcgatggcacggtgccctcccttagcatgtgtggcggcggcgggggcggcgcccttcccctccatgagcaacagcagcgtcgccctccttaatatgggtggcggtggcagctccctcccccaccacgagtgacggcgtcctcccacggcttcaacatgcggatccagcggcgacgacgaagtcgacgacttgttgcgggcggatccaacgtcggcagtgtcggcgcaaatccggcgacgaggcggcttccaacgggcggatccgacggcggcttcccgagagcagatccggcagtgacaaaggatttcatatttatctttgaatttttttatccaccttacccaatgtgttactcgcgcgtgtgagaacggaggacatcattcgattggacttacagacaaaaaattgatgtgacaaatggatagcccatattgatcagtaacatacctaaggccctgtttagatcccacactaaaatttttcaccttgtcatattgttgatgcgaaaaacacacactggcctgcgagatctgcttaactccagtgcaggtccaaaggttgacgagatgcgggagtgccagtcagtttgactctgcaactgacaagatatgcaaatagtagatcaataagccgatcggctgacaagccgatggagcaattccagccgatgccgataccagctgatagcgatagggttttgaacaatcggctatatgtccaatgtagataatgatataaaggcgatcggctgatgatgataaataataataatataatccagtataaaccaatcggccaacattatgatataatagaacaagtactgatccgaaggttaaagcatacatcggctggaggtctgatgtcataaaatccacaagattagatagatcaattaaacctttgttgtcatcggctaaatcgaacttatatgtatatgcaatccttataagccgatgcaacatctagataacttatcggctagcactccgataaaatattagcatgaaccgatcggcttaacaagacctatattatcaacaacaatctagtaggttgaacctaaccgatgcagcacgagattgtatatagtaatctaatactcgatgagccaatagatctgtctaatgtgatagatataacaaatctatttagaacaacattgtgattgtagagatatatcggctaagatagaagatcggacctaaccgagacagtcccaactaaaccgatgtgtctctaaacacaatgtaattagagatataattgagatatcaggtaggcaaatatatcaaccaaaccagagcgatccaagagattgaagcgatgcagccttgaacaacaccaatgtagccgatagattcaccagggctggtagaacgtaggacttacctcttcgccggagatcgaaagccgatgcagccccgcgtcagctgccaaattccgtcggatgataagtaaaaacctcaagaaagaggatggcgatgcgccgagagtagttgtattgatcgtgtgattgattacaatgaccctgggtgtacatatttatactcatggggagatactagtccttataggacaagaaagaaactttcctaaagataaaaggaaaacataaagtccttagaggacactaaacacactttcctaaagataaaaggaaactaacaaactattcctaattaatagataacttgccatgttgcatcctccttgaactcggttacttctcgataaacttcctttaatagattaatttccttaaccgaatatagcaggaattcggctattgacgacttggtaattctcatcggccgattccaggactctgaaaccgatattgactttaggccgatgataacttcgggcttaccaaatttgatcgttagcacatgccccccagttttggagtatgaaaactcatgcttcaaaattatcttatttcttgtcttgataactacaaaactgatcttcctttgcttattgtaatcagctttcatgagcctatactgtttgcattagatgagccaggttgtcaaactcatggcaaaagaatctctctctgataggtgttgacaatccttggaatgcgagatctgctagttgctcatcatttaggctcaaaccataacatcggctgcggacattacgaaatctctgaatatattccatagccgattctccttcttgctgctcaaccgatattaagtatgaaagcttcaactcattgattccagcaaagaagtagtcattaaattgcttctcaagatcggcccaccctctgatagaatttgatgatagcgatgaaaaccatgtgaaagccgattcagtcaaagacaacggaaaaaatctaactttcagagcttcctcagccgatgcttccccacattgcgctaagaatcaactgatgtgttccattgtagatatatcatcttgccctgaaaattgggagaagtctagaaccttgtattggtgtggcaatagaaccctatcaaatcacttatgatatgacagtcgatatacagaaatatgttccttaggtttaattccaaactgctcttctatcatctttgcaattctatcggcccaatcattgttatattggcattcttcaccatgcccatattgatgaagttcgtctggccgatattgatatagcccatcatgttgatactgatatgcttgcccccaagccgatactgttgttgttcatcaatctgccccccgagctggcttttctggataattaaatcgtcaactgataccttgatcaaattttgtaacgtatccgccaaaactccagattgattaaacaatgcgcgatgaactgcttcatcaactgtatcttgaagtatttcaactatcggctcaggagattgttccttcttggtattgacttcctcttcagacatgttgggtgcgaaattcgggtcccatcgggcatgccaaaaatgtgttgatgcaaaaaacacacactggccttggagatttgcttagctctagtgcaggtccaaaggttgacgagatacgggcgtgccagtcagtttgaccctgcaacagacaagatatgcaaatagtagataaaaggaaaacataaagtccttataggacactaaacacattttcctaaagataaaaggaaactaacaaactatttctaattaatagataacttgtcgtgctgcatcctccttgaactcggtcacttctggataagcttcctttaatatattaatttccttaaccgaatatagcaggaattcggctattggcgacttggtaattctcatcggccgattccaggactctgaagccgatactgactttaggccgatgataacttcgggcataccaaatttcgtcgttaacacacatcgaacgtttggacacatgcatggagtattaaatataaacgaaaaaaaataactaattacatagattgcatgtaaattgcgagatgaatcttttaagcctaattacgcttgatttgataatatggtgttacagtaaacatctgctaatgacggattaattaggcttaataagttcgtctcgcggtttacaggtggattctgttatttgtttcgttattagactgcatttctctactattataaaaattaaagatgtttttgctgtattttggtacgtcacccgtgtttgagtcggtttttaagttcgttcgcttttagaaatatagatccgcgtttggcttggattttaagcttattttcttttggaaatacaaaaggagtcgtagaaggaatatctttaaaaaaacatgcatgctaacttgaggtaaaatacggacttctaattgtaccttatgattttctaaaaagaatatcaaagcggattaccacagtgaattttaccctacttaaactgtataacaacaataaaactaaaatagcatttaccgttacaacgcacgggcatttttctagtaatacttgaaatgtgcgtatgtatatatgatatgacacgccaaaactttacacccctaatctaaccacagcctaaatcaaaccagcccaaaacttccgttttctttttttttatttcttttagtttttcttatggccagatcgctccacgcctcctgaaactaatatttgaatgtttagttcatgctaaaattgaaagtttgaaagtttggttgaaattaaaatgatgtgacgaaaaagttgaaagtttgtgtgtgtaaaaaaattttgatgtgatagaaaaattgaaagtttgaagaaaaaatttggaactaaacaagccctaggctgaattggagtgctcgatccagcgatctaacggggtaggaaaactgatgcacgctcaatacacagatgatttgacacggcgatgaaaaaaagaaaacataaacaattaattagtgcgcaggttacttctaatcggatacatatgcgacgtacgaaaattttcgacaaaaacataaacttttataatagtagatataataattagaaaaaatacccgtgcgttgcaacaggtgaaggctattttaattttattattgttatatggtttagttaaggtgaaaatcatgagctacaattaggagtatgatcatctcaagttaacatgtcagtttttattaaaaaatatttcttatacaatttcttctgtattttcgaaagcgaacgaatttaaaacccgactcaaatacggatatgtatttccaaaagcgaacaaacttaaaaaccgactcgtacacggataacgtaccaaaataccgataaaaatatctttaacttttataatagtagagatagagatagatctatctataaatgtgtcatcctaaaacggaggcaaactttagaccatacgatacaaaaaattattacgatagtcggcaagcccatccaacatccacaaagatcgtgggatggactggttggaatttcaactattggacgaatttccgtaacaccactcgaccacaaaactaggtacgtagagaacatgcatcctccgacttacaaaattagatcaatttacatcccttcgaagtttgcacgatgtttttgttctgatatggtgcatatgtggccacggttcgacttgtcgtcgccttgatccttttcactcaaatgaattttacaataataatcattaggtgggacccacatgtccgaaatcctttctccacccctcccttgccaaccaacagtccaccacgccacatgcatcctctaggattgaagacaccgaggtcgtgagaaagagcgcgggtgtggtagcggctgaggacgatggtggcgacgacaccaccgttaggagagggatggatgcacgtccgtcgtcgacaaagatgcagtcagtgtgagcagaggaggaacatggtgacaacgtccaaggtccatggcgatcacagcggcgaggagctagtgctgctgggtccccaccccacggcgacggagctgcagctgctacaacaacccatcctgccaactggtggaacaggcttaccccacgccgcctactcgagctcagctgcggtttgggctgggtctgtgtcacgcccagaaatttagtccaaattttcagattattttgtatataaatccctatcaaagaatcaaaccagggtacacaatatgatgaattaatatacaaatctaaacataaatattgcgtaaatattttcagaagaaacacttggtcctcacaccgaaaagaaagcagaatcagcggaaaaaggcgatcctcagctccactccacaggcaaaacttaatcggggtatgagccttggtactctaacttcgtcttcggctcaaaagcactacacttctaacctcttatgcctaggtgaatccggaattcgcaaaggtcatcgcaaggcccatccaaactccatcatgctcacccttgcctcgtacgtcacaaaggaaaaagctgcactacaagttcagcatttgcccattctttcttgtcataagcactgtaagtcttaattgccatggtgtgatcataaaaaagatgcacccacaacccaccattaagtcatattttaaatggatagttacgaccaataaaacatggccatgtagttcgagctcgcagctcatcaagatactagaagtagataatgtgattatcccattaggatactagaagtagataatgtgattatcccattaggtaaggtagtggtaattaagcatggctaagcatatcataattctagcaagatcaatataagtgaaacaagctagacaaattatttcccaagtctaacaaaggatggatcacaagtaaacatggcacaagcgagcagataggtaatcccatagtcccatgtaattagcaaagcgtgcaatttatttgcaaacggtaaaaacatttataaagtaggctcaatatgctcaaggggaaggtgtgacttgccttgcttcttcgattgatcttaggaacatttttcctcgcggtcacgatattctgaaaactagcagaatctacacgatggcacacaaaatgaacaaaaaccctaataaaaaccaaataaatagtacatgaaaagtataaacatgtagaactcaattttgtatagaactcaattttatataaattatgcaagttgaatggctcaatttggagttcatatgaattagttatgaattttagaagtttttaaccatttaaatcaatttatggaattaaaccaaattattgcgcaattactaattattttaacaaagaaaaacaaggatgctggtgtcatcaatgggccggcgccaacatgtaggccccacacgtcagcaggccaaggggtgtgggggggggggggtcatattgcaacggtcggctgggctatggaccgggtccacggggtgcatgggcgaccgatggcccaaatggcccaaggctgaacaggcggccaagatcagctaggcggcggcagcgaacaaggacgcaggcgcgccggccagcccgagaaggcggtgaccaccgccggcgatggtgagagacacggggagcggcggctggcacaggaagtggcactgcacgcgaaaggcgccggcgagggcgaaaaaagggaaacaaggagagagggggagggtgatctcatcggcaaacatcggcgggcggtgcaggagaggacggcaacgacgatgaccttgcgagcgaaggggcggacaagcggcggcgacaactaaggatggacaataaatcgattagagagagaaggaggatgttgctagctggaggacgggaaatggtgggactcaccggcgtgcgagggaaattgggtttcggtggcggggaacgtcaaccgagtggcggccgtggggctcgtcgtccttgcaaagctggaggaggaagcaacggggcatgggattgccccaatctacggcaattgccggccagaggtggcgaaagggtggtggtctggtggagctcgggttagtgatggaggtggcagctcggtggcggattggagtggagtggcggccaggacgtggcgcggcgctgcgatgcggcaacgtgaacagcacggtgcgatggtggctaggcggtggcagcgtgcgcccggagtggggaacaacggcggtgttccagtggtggaggggaaaaacacgtagtggaggctaaggtggagctcgatgcggtgaagctgctggtggtgggggcgtggcgcagcagtggcgctagcagcagtgatttgtggccgaaatacgacggcgatggtggagcttgtaggtctcagcgagggagtggtttcgggcatcggcaagctcgcaagagaggggtaaacggatgagtggagtaggggggttgatttttctaggcttgggaggctggctcgagcctcgaggtcgggaagagcgggaacaaccagcggagtgaggctccggcgacttgtgcgaaatgtggccttagtgggcatttaactatttgccacttttagatttggcaattaactatttgcacccctatctcaatgacatgtgggtccaaatgtgtcaatgacatgtgggtccattaggaaatagttaattgccacatctaaaagtggtaaatagttaaatatctcacacagggggccacggggatgtgggggaaatgaggcgggaacgtggagacagttcgacgctgtttagatgcgagctcgtgaccgggggggcgccggatttggcaggatgtgagcggcggtgtggtccggccggtcaaccaaccggaggttgaaggagagcccaacaggtgggccccacctactagcggctcgggagataggagggtggcagtgtagacttcgcaaaggggaggtgcaagcgggcggagcagcgagctaggtcagggagagagaagaggggaggatggcctggcccgggagagggaggagaaagcaggtcgtgcggggagcttgggcctaatgtccctggtggttgtggcatcgacatttgtggtcatggcacgggacgcccgcagcagcggagtggtaggcgctaggtgccaagatgtaccgacagccgccttattgcagacgcctaccagtgagctcctgccagggcaagtcaacgccgtgtgtaggttagagcaacggtgccatcttcttccttcaccaccaaagaggcaccgccatgccttgctctttgaaccgagaagagagattagggagacactacagccgaatgctgatgagatcgggaagagggagcctaaggggacagaaagggatagaggcagtacatggcgcggcgatgtatcttgaatcgcccccacgaggtcagcgcaccagcttcaccaacaccgcccaggcttctacaaatttattgatccacagacatcacctgcaaatcaacaaattcacatacaaatcaacaaaatagacatccgtgcagcccgccgtgcagcccaccgcaccgcccgccgccgtgtaggccgctgccgccgtgcacctcgaatccgccggcttgctcgcttcctttaaaggagaggataagagagaggaaagagagaggataagaaaagggaggaagaggaagttaaaatgaggagataagggagggggagtttgcttgaggataatggcgaggtattatatacgacgcatcgatttttaagtcccggttgctcttatcatatgagtctaaaaatagtagggggacacacactttttgaacctggactaaaaataatctttagtcccgggtctaaagatcataaagtggtggtgggcttttcaaccggggttaaagatgatctttagtcccggttcctattcaaaccgggattaatgtggtttttgcaccacccagtaaagatcatttcttcagtagtgatataattaatgcatgtgatataattaatgcatttaatttaattaggtaaactatgacaggcttctaggaaatagctgttgttggttaatgtaaggaaaaaaaagtacgaattacccctaaactattgcgacagtatgaattgccccctcagaccacaaaaccagacatattaaacctcaaactattgaaaccggacgatttaccccctgactcaacccgaagcggttttggtcctacgtggcatacacgtggcaccgacgtggaaatccaatcagcaaaaaataataaaaaataatatatatagggcccacatgtcatattgaccccttcttctttgtcacttctcctctgtgatgttggcgttgggcatggctgggcaagcggcagtgggcacagatgggtggctccggttggcggcaggcacggatggggagggggaataggttggcggcgagctgcgacaggcgcgaatggggggactctccaggcggcggcgggagcagcgggaagggggtgcggctgggagtaagctccagatgacgacgaggcggcggggaggaagcttcggtcgagcggagcgcgatgacgggcatgactggaatgacggtggtgaaggtcgcctcatcggtattcgcatcacacctcggggggacgtgcgccaaggctctgtcgaggtggggactctcatggtcgtggacgtgcgcgatctgtcgctgctgctccttgccacgccctctaccgctcccgccgcgcctgccgccgcttggcgctggcatgctcccacaaatccgccactgccgccgcttcccgtgcctgccctggagggcgacgacaccgccgtcacttcccccgctcgccctagagagcgcagccgcacgtgaccccgctcgacctggagggtgccgtcatcgccgccgcttcccccacccgcccttgacgtcgccgctttccccacccgccctggacgccgctttccagcccgccctggagagcaccaccgccacgtcgctttctatctgccctggaggagatgaagagaggggaaagtggaagaaatacataagcatgacatgtgggaccacctaattttgctgattggatttccacgacggggccatgtgtatgccacgtaggactaaaactgctccggattgaggggggggggtaattcgtctggtttcaatagtttgagattccggggggggggggggcaattcatactatcgcaatatttcaggggggtattcgtactttttccttaatgtagtaatgtgaaacaaccttaagcaagtagcgtaaaagaaaatctatttttcatttgatacatggttttaagaagagtaaatactagacacatttcagattgctacaataatatatagtctatgattttatcaaaaatctgccactttattagtctgacaattcttggagccatctgtcattcatagatgcaatacttaggctggtgtaagttaggtctacatgtcatatacatagaggatcgtaaagtagtagttttgtgataattaaaatctttttctatagctggagtttttgtgaaatacctatctaaagttgttgcaaattaaagcgttatgtttgacaaaataatggtagttttgggaaatttaggacctgttcagattgtagccaaaataaaccttattaagttttggcaatgtcaaaattttggcaagatagcaatattgccaaaattttggcaggatttcttatgtattgatcaaatttggcagcaaactaaatatagacatttttttagtaactttaccaaaaaaaaatgtatggttgaaaatgacatcaaagtgaacagaaccttatactatcttaagaaatatgtgctgatcattttgaaaatggtagggtttttggcggttcccagaaacccgaggatcaactctttattcgggtaccactctcgatgctgcaccgtgacgaacttacgcatgttggactcggaagttggcggaagaacacaataaagaacggagaggccagcaaaggctcgtcaagcgtacgacagaatcaacgcaatgtcctagttcgcatgttttgcccaaagcgccatgtcaagatgaccatattccagacaaccctgacatggatggaggcagctgcactcgtcgcttgcatcttcatatcgttccggcgtttactcaagcaagactacgtcgatccaaaagacaaagttaaggatgaccacaagaacattagaggttccctgaatgtcttctatgggctggcccttgcccatagcatgtcctactacatcttgattgttgcgttccagtttttagtggctccattggtaaggttggtccattctagttacaagcttcatgactggggcatggatgcagtttctgagtatacagccaaaaagctttgggcattcattaggtataatgttagggaagctctcgagatgaatttgatcacctttggaaaggagctggcacgatccgattcaattgatgaccagttgaaaggagttaggattcttgattacatcataagatgggagaagcagcacttatctagagcaggtgttcttgacatctacaagattgagaagtacaaagggagggtgcttacaagtattcgagcttccactgagacactagagagagtggtgaatatgctggggctgaatttgaagagcctagaagaggaagaaactagaggtcatgcagcatccatagtgcttgaacttgctccatacctcctattcgagaatttgcctgcaatgccacagcttatagcctcactactaacgacaggccgagagaggatcaatgaaggcccccatgacataaatagtgtggagctcacttgttatggtgtgaaaattcttgaaaggcttgtagagaatccagataaccgcagatctgtggctgatgccaatgtcgttttgtcgaaaattgtagaactgctaaacttcagagatgattgtaaggtacctgttccagatgaaactgagaatagaagccaagaagagatagttgaggcctcactaaatgtcctgcacaagctagttagcactactggtgagactggcgaagctctacgaagcaccatttccaagaattctgagatcatgagcaacatcagaaaaatcctgtatcagcatgataacaagaacagtagtttatctgttcatgctgtaaaaatcctttcttgcttagcgatgcatgagactgctagagaagtgattggaagttcttgccagatcgtcaggaagcttgtttcgtcggttcttccaaggcctatggatattgttcaagatggcaacaatggatccacagttgctgactcagccgcacaggcattagttctgctaagtactgggagtgaatacaacagggcaaccatccttgataaaattaatctggaagagcttgtcggcatgctctttgatgcttccatggagcaaaggattatgatagcacatctgcttaaacatttgcggacgtattcaggcccaggttatggaaaccaactgaagaaagtaattgacggttctctgccaaaggtaaattctgtcatatagttgagtttttgcctaaaattggaattcgatactaaattttctgcatcaccataccactgaagaatagctgaaatatgtgtcaatgaatacaatttttctgaaggtaaaataaagtgttcgcgtgctataagtttcggtagtaaactatctattctttgtcttccgttacatgttccaattctatttctgttaaaaagctaaatcttatgttttccatgacaatctgtattgcatatttagttagaaacttagaagaaaagtaatatatgttatcaattaatgccatttcagttattggaagaaatcaaagttgcagttcagaagctcgataatcctgaattccctgatggacaaccttctcatgtaacaaacctctctttctaagacatcattgattccatgtagcttccctcatttaaaacgtacactcacttttcttgagtaaactcacttaaaattggtgctgtgtacaactaggacctgaaagaactgaaagctgaagaaggcaaactactagacagctttattggcctcagctcacagatttgccactccttgcaagccattgattttgataaggctctacagagtgccaaccttacaatggatacgtatgctcaagatggtactgagcgtgtgcaaatctcctaccaccgatttcccggggataagaagagtaacactcagtcagatgaaatggctgataaaaaataacgaagattacgttggggtgttcaagaggtatgaaatggacaaggcgctgaaggaagtggcagagacagcaactgagctcgagagcttcgagctattctgcagtggttctggtgttggcaagcatgatgagcccatctcttctgctgtcagatctactttggcgctgcttgcaggagattcagcataatgataacattgattactgcgtttgaaggtatcaaggatcaaggtatatgctgtttgctgctacgtctcgacttccttactcgtagcaggaccaatttgccgtatgtcaatttaattatctacactagaaagatagcctcctgaaataaaattaatgaaattttattatgaatatttatgtgcaggtggctttttattaaaatatttttattatattccaaactaaaattaaacttattttgtgttatttgaatgctgattttttttaattaccattgcaacatataaattctaaaataaaattacttgagatcatgcggttttgaattgatgagaaaatattgtgtcgaaacaatggaggtggttccgtttttgtcaaaatttcactttgttcggttataatcaaaacagcagttgatttttggtaaaataatcatgagcatcaaaaaccaatacccctattatagctagtcatttagattgatccaaaatcatgttatctttcttttcccatcataaaatgtttccaaaaaacttttcaaataagaaacttcttttgtcaaattagcacaaattttacaatcaatcataacacgtttgtttttgcgatatctagagcaagaaagcacttcatcagattttacaattatttttttatgtagtcactattattccttgcataccatttgaccttgctttgttagatatcatgatatttttgagaatccatataaaatttagtatttgaagaagctattgacctaaccaaacatatcgaattgtagtaaggatcactctgaaattttgttaatcttaattggttttttatgaattttctataaatttttaaataataaataaaatctcttcagaggtggtggcttatgaaaaccacctggaaaacgaagtgagatcacatatcagtgagaatccacatttgtacgggtcaactttatcattgagaatccacatttgtgcaggtttacttgtcaactcttttgacactatggagatgaaagatttaaaatatactaatttggacaatagattttaagtttaagatattattttttatagtagatttaacctatattttactttgtacaaaagatttaacatagagaacatggtgatatatcagaaagcaaaagtttctccccaatttaaactacttagaaccctcttgtcatactctggggctaataacatgtttgtggagtatatagctgtcgacgagtgatacttgtataccggatgattagggtattgggatatgttggaacgaggatctacgtaatacgacatcaagcagacaaaagacaaggattatactggttcgggccccttatcaggtaatagccctactctaatttatatgagattgatgatggaaaaccaaagattacaatggaagtagacagaatcggcgacccccggcgacttggttccgcgttttccggctttgtaaactatggtgtgtgttagcgatgagattcgatgccttgcacccttccctgggggtcccttttataccatggatcatcttgatccccaagtaagactcgaagacattggatcttatacgatataacaaaaactctatcccctccgagtaggactttgaaaatcactcgactcgtgtagatattttccatgatttttaacagattccactaacatacatagaaataatccacgtacgtgaaggtataccgtatctgcatattccataagtcgtcgggtaggaggtatgccctatcaggaacctgacaatagcatcttcttaacatagatatgatttagttatttgaacttaacatagatatatgtagtatgagcaaactgtgaagtcggagtagagctcagagtttctaggtgaacattaattcattgtggctgctgcttacggttgtagaagtatatataagagcaatgggaaaacttgagaagactttgcttgcttgtcataataacaaagacaaacgactagcagacctcccaacaaggcggtcttaattcatttgctccaccatattatattactacggccctagattaaaactcttcaatataatactagtatttcgcatgataatatatagatgtggcacggatcgttatgtcgctacaaaaaagcttcgaatctgcacgcatgtggcttcgtatctccagttctccaccccctgcatggtaacagtctagtgatattaaagggcaagaacagttgaacctactaacatatatatactcgctctggcactgaaaaaaccaacttctgggacgtgtttgaacaagtactttttatcccagattcattattgaaagttgatttttgggacaaagaatgaataagtgatcagaataacgacataagatgaaaagaagtggagaagaaattaagttaaggaacgatgaaaattaattatagaattaatatttgcactaactatatatttaagttaaggttgtatttttccttgacggtaaaatgtatttttctgatggtttcacgctcatatatatacactagtacaatagctatttttctgtgcggtcgaatcggtttttgcgtgcggttgcttcacccgtctagaattaagggtctgcgaaaatcgtgatttttttttgcgggtgacgcatacgcacgggaaaataaaaaatcgaaacaaaaaaaaagaaaatcaaaaccaaaaccataaccctaatccaccgccgccgctgccctagccgaggtccgtcgccgtcgcccgcgcggtcgccggcgacggatccagacgctggaagaccgctgccgtcaccgccgccgtcgtcgcccgctcccgacgttggatccgtcgcccactcctatcaccgacgccggatccgccacccccatgcctcctcactgctgccgatgccaccctcccctccggccgttgtccccgtggtcgccggctgaagacgcccctcccctccgccggatctccaaggggagggaggggagggggaggagagccaaagggagagggaggagaggggccacgcgccgccgctgtctccgctggatccgccgcccccatgactccccaccgccgacaacgccaacctcccctccgggcgtcgtccccgtggttgccagccgaagacacccctcctctctaccggatctatcaaatcattattttatatcaaaattttcaaaacacgttgtttaatataaatgttacgcaataatattctctaccagtaaattccaatttatgatctatattaactaattttttacattaattactgaacccactattttatactatttttaataaaaatattttgatatcggttttcgcttaaactgatggacctattaactagacctattaaggacctattaacacgcatgccatatctatcttttataaaagtaaaatgaaacatctcaagacctcatacatgtgcatgtttgccttctgcacatatgacgaagcatcgtatctgaggcagctaaggtgatttgtcaaggtgatccgataaacactatacataccaattaaatttatataattttgctcttatttcaaacaaatattgtttcgaggaaaacaatcaaacatgcgaaaaagaaaaaaagggaaaacttcaacaaattgctgatattttgcactacccaaccaagcaattctgccaatgatttgtgtcctaacaaaaattctttaaaactttggaaaagaatatgaaaattttgaacttctacgaagggaaaaacaatccaaccattaatctatgattaatttggttgtcaataaatcatgcatgttcatgagacgattcgatcaaaataactttgagtccttgtgttgacagaaaacacgagacctaggaaatctgcttaactccagtgcaggtccaaaactcgcattcggatgtgtgagcgtgccagttgatttgatcctgcaatcaacaagaaacaaaaacaaagaaaccgaggttaaattcataaatgatagccgatcggctaattgccaatgacatatcatttatccttgagccgatgtcatatgtgaatcgatcggcagtcataaatatgtaacaaggaactaaatctactcgatcggctgtagatattagcaatatataacccttatatcgatatatactcaaatcaagtgattgggatagatcggtcgtcatgccaagacagtacaaatcacttagattgaaatatatattaacaacaagattatatatgctcatagcatagccgatcagacagatctagtatgtatcagctaatactccgatactactctatattaagatattaaagcaagtagaatacaccaaacaggagcctaatgtacttaaatgcaacaagatcttaatataaagggcagatttaacatatcaattgagcgtataaaatagaagtagttaaatcagataagatcggctaaaactccgatactaccctaatcggcaaccagaaggcaggctagggattgaaattctaagcacgacttaatagatcaaactcaactgatgcagcattaagtatgaaaagaagaacaatatctagacaatcaagccgctggatattttatagggtggtagatatcttatataatctaagccaacgtcgctatttaacctaatcggccgccttctactaacagatgttagccgattataggttagataatgatattgtcagagattatatagaatatatggtaactcgatgaattacataaacaagattagagtatcataaagatggaagcactaatcccgagaacacaagtcgtcataacaagttttacctcttgttgaagatcgaaaccgatgcagctcaacccgaaagaaagaactcgtcgaaataaaactaaagcaaaagggtggcgatgcgccgaaattgtattgaacgtatgtgttaataattacatagggctcgaggtctatttatacccgagaattataagatatgtccatattggacacgactcttatctctaacaaactctaagataccataagtctttgcggcagacttttgcccacatttatctctaataaaatatcctaattaatagatacaattgccttcccaggactctatccatgcgtggcaatcatcttgaagcacatcaacttgaacccgatgtcgtacacaagtcgtattgtcggaatcggctgtatcacttaacccagtctgactcggatttagccgatcccagtcgtagccgacccggactccagccgattcttactctgtttccgcaacaatccttatcttcgattccgcttcgatcctatcttcatctccgatgctgatattaccaaatttggtcattaacaccttgctatcgcaatttttacttgtagcaatattgtatggtatgtgttcaaatggtatacatgatatttactcactcagtccaaaagtaaattcaaatgccatatgaccttgatctatcttctaagtcaatgaatggtttttagatatacccgacctatagtttgcccttataaaatatagtttctaaagaaattataatattacgttacgatagtatagatgtccgcgcatcgtgtgggccaccttcctagttattatatactaaaaatccattaaacttcctataaacattcctaagtcgccacatgtcttcctacaaatgctcttaattcgacacgtggcacttttaaataaggtggacccaccaatttcttttatttaacaaaggacccactattttccttcattgcatttactttaataataaaagaaaaggcccatggggcctgtacacatgtacgtgtgctgcaaactgcacatacgcatgcctataaccggccggtgcatctcctcttttttatttccatgccctattagattgaacatattttgtagtaaaaatttttttgaacaactataacatcttacatcatatatatagctaattttttatccatgtacactattagatcatttataacaaatatttataattcacgtcccaaattaactgtatttaacaagtaaaagaaatacattgctttggaccagctattggccactcaacacacatttttacatttttaatggaaaaacacatagatttttaaaccatgtgattaacaacatttagtttacactagacaatataaaacacataaaactaattaataacattaaaataataagaagttaattagaaaatacatattcccccgtcccaaaatataagaaatttttgttggatgcatggacatagatttagattcgtagtactatgatatcccattcaaccaaaatcatttatattttgtgccactacaaatatgtcattttagaaaaataccactactattcacgatattgcggatggcgtcaaggatggcggtggcggcggcacccaagacctcccatcgaagatgcgatcgaggacagagacggcggcggcggctcccgagcgctcccacgcggacccctgtcccaaaatataagaaatttttgttggattcatggacatggatttagattcgtagtactatgatatcccattcaaccaaaattacttatattttgtgctactacaaatatgtcattttagaaaaatgccactactattcatgatattgcggatggtgtcaaggatggcggcggcggcggcggcacccgagacctcccattgcggatgcgatcgaggacagagacggcgacagtggctcccgagcgctcccacgcggatggcgtcaaggacagcggcggctgcggctgcaggttccgagccctcccgtcgcggatggggtcaaggatagtgacggcggcaggggctcccgagccctccagtgtggatggcgttgaggacggctactcccgaacctcttgccacagacggcagcggcggcgacagctcccaaccctcccgccgcggatagggccgacaatagcggtgacggactgacggcagtggctcccgaggccttcacggaggtggtcgatgacggcggcagctacggtggtggtcgacgacattggtggagagagaggaaggggagagagaagagaggggagggaggtgaagatgaaactgacagctaggtcccacgtgcggttggggctaacggagatttttgacggaaaacgtgatggagtgatatgattctaattttctcaaattccagtggcacgtagccaatatcgtgaatagtaatgatatttttctaaaatggcatatttgtagtggcatagattcaattaacccttaaaaaatatcacttcatactgcatgcacgcaaccggccctcctcaccttctcttccctttcctttaatctttttttatagtagttgagataatatttgttatttatcataataaattctaaacaactataaattcaaaattacacatacaatttttacatacataaaatgtaatagttgagataggcttaaagtggtgctgacatattttaaattataataaataaataaatgttttgggtcatatattgacccttttcatcgtatatgacaaacaaatggcgacatatattattttatcatatatcacttttacaaacatgcataactaaattcactctactattgaaaacgaagtttagtccatcatattatttaccattaaattaatattttactatctgttttgaatatatttcaacttataaaataaaattatattttaggtcgcatttttattcttttcatgtaatccaaacatacatgaaaattatataacaaatgacaatataaagtatatttattagttgacaaatatttacgactaaataggatgacaaaaaccaaaaatgctattgacaaacgcccaatttcaacaaatgtcatcaacaattttatttataaatggaaaaagtacgaattacttcctcccgaactatcgcggtcgtctgaattaccctcccccaaaccacaaaaccaggcattcttcaccctcaactatacaaaccggacaaattaccccccttgacccaatccgcggtggttttggtccacgtggcgtacacatggcagtccagtcagcactctatttataaaaaaattgtgggacccacctgtcatctcctcatcctctcatcttctctttctcaaacgggaggacgcgcggtggcgtgcggggga

SEQ ID NO: 5511 - DNA, 13949 bp, Oryza sativa
tttggagactggcttccgaaaaagaagttgcaacttgttgatatgagtattctattaatcctattaagccctaggccgggatgttacaccctcacccccttaagagagatcgacgcccccgtcgatcaaccctaggccaggaacgtcctctcttggccacgtccatgtgacccccttaagagagatcgacgcccccgtcgatcaaccctaggccaagaacgtcctctcttggccacgtccatgtgtccagtgccagcgcatgtgccatgctgtgtaaccactcccggtctacaccagccatgcgcaccatgcctgcgcaactgcgacacacgcgcccgtgaaaccgcgagagtcggctctgatcactcgtgtgcacccgggaagaatttcccggtcggtcacccatcccaaattgctccaggccagactggcttccggaaaagaagttgcaacttgttgatatgagtattctattaatcctattaagccctaggccgggatgttacaacatcctataacagaaatagtaacatgcacatgcataataacaatgcaaaaactatacagtgttggaccttctttagcaagaagccaacaaaaacatttcaaagcaatttggcttcatagcatttgatggttatcttctctgatccccgtacgggattcggtccatatattcggggatttctagctgtgaacaaacaaccaaataccgcattatatcaattagttagacttttatatgcaaaatagaattattagtcgatcatgaagacaaaatcaaataattttaagaattaaccctacaccttaattagtgatgctacttaaaaagtcttttttcggacattaggcttttatcttcacatagacgatccaaaagaaaaaatacttgtggaaatggttgaggttgtcttagggtcataaccgcctgttaaaaaaactatttttacgggttggtctgaaattcccctttaaaaatatgtatactttttgggcagatcccaaagaaatccacctataaaatctattttcgtggaccatgcattctgtacaagacgttaaaactagaagccccactaaaatacgaaaaaaattataactttttcatgtgaagtcggatgatgacaaacttaatatgaaaattgtaggtcttgatgaaacctataactttgcagtttaaagttgtttcattttaggttgtttagtgtggcaaattttttgttactattctcgtaactactttttagttttccaaacaacgctggatggagaaatgttctatattgaaattatcgagctcggccagatctacaactttgttattaaaagctattataaatgagatcgttcaggtggctaatattcattacaggctttgatatatctattattacggggaattgttcagaaagttcaaagtttgaaaaattctagaaaattcatatttggcccaatcgaggtaaaccaaaagttttatagattgttatctttatttattattttctttgatatgagctacttaatatttcttttagtatgcccattcattatgcaatatatcaacatatagagactacaggacataagtgaacaatcatatcaaaagaagtattttaaggaaacatcgacccagaatgttgtaaggttgagaacttctgttcaccttaatcggacataaaatgaattttctaaaaaagtaaagtttagtcattatcaaagaataaagaaaaaagggttttgtcagcagacttcttaacgaaacaccctaaaatgatttttacaggcagacattttaaagagtcgcccttaaaatattttttatggtcggttcacataagggaaagccagtaaaattttgcgtctatagatgcctacaaaaatctaaaatattttttttggggggttcttttttacagttaaaaaaaatcaaaagcatgatattcatttttacatgtgattccttaagagagttgccagtgaaaatcaattttcacgggtggttgtggaatgcgtccataaaaatcatgtgatttttacatgccattagttataggccgattgaaaaacacccatgtaatgaattacggaccacatgcaaaatatttgggtcgtttggttcttaactaacattgccataactcactttaggcaatgttagacaagtgtggctttgccacatttttttgtggcctacaaattgtaagccacacttgtggcaaagttagacaaatgattgagtctatgacatgtggggtaagatgataagaaagtgtggcttgccataactatggcaatgaatcaaacataaggctaaggaggtgtggcatcctaaagtgtgatgtggcaagttgaagcattgaaccaaacagcccatactatctctatccaaaaatataagaacctatgatcggataagacatatcataatattacgaatatgaacaagctttctatttgtgctaagatgtctgaagcattgaaccaaacagcccatactatctcaatccaaaaatataagaacctatgatcggataagacatatcataatattacgaatatgaacaagctttttatttgtgctaagatgtctcatgtgatattatattattatattttggaagagagagtgagtattttcataccagtgtacgacaaagctaggatcgactccattggctccattttcaaattaagctttacaaagaagcagcaatattgctgtattttgcagcctatatgtatcaacttgcactttctttcgctgtcctgactttgttgtctttatggtttaccttttggactcatctgttacgaacatggaggccagctcgaagtgcatgcatatggaatgccagtccggtcctaatacttgcacagttgaccccgagcgcgtggttgccacgtgcacgcactcttgcacagcagtgtgtgccttctatttgacgctattttattttttttatttttagcccaagataatgacatgtcacggcagagtaaaaaagtgcagtgtgtagactcttctggaatgcctcgtacggatcagtttacacgcatcttataaatttcgtttagtcatcgctgatgacatatttgagtactacttatcccatgcggttatgcatgtacgagatccgtgtatacgaatacacgtattgccagtgcatatatgatcatacatgtgcatgtgccactgcccactgccatacgagactttggatcctccaagtgcatgcatgcaggcaggctccaattcgtgctgcaacttcaacaaaataaattgattcgcctcgcctagctgatgttacaaaatggcggacgtatccaaaacgaataatacttggatgaaacaactgaagctcaaaagagtcaggggaaaattaatgactacaagtttgttattgatctgttcgacttcatcgaaaaatcccagcctcggctcgcgccagaaatatgtttccaacacacagcaacgaacatagccttagtacagcacaaactagccacttctatcaacgacaaactggcctactagaaacagcgcgggaaagttaaaaagctcaagctcgggttagatagcactgctttcttcaaagcgcatgcctacaacaacttcggacgaacctccatcaaatcgatcaaggcggcaggcaccgaagtttctgaccacaacagcaaggcacaagtcatgttcaactattactcgctcatcctaggatctgctgaatccctgcaatggtctcactacttaaaaaaaaaacgtataagtcgacactatacctttaaacgaagataggtgtcgattttagagaaaaatcaacatcaataataataatataggtgccagttttttttaaaaaaatccggcacctataatgtgcccgtttttttaaaaaaggcacacatgaacacacattccatcaagaacacacatgaacaaacattccatcaagaacacacatgaacaaacatcaagaacacatatgaacataagaacacaacttgaacatatgcctcttccaccgtcccggccgccgtcgcccggcaacctctgccgcctccacgccatccgtcccctaccgtggatctagcggagggaaggacgtcgtggagacggctgcggcccggcgggggtgggagggtcggcgcctcccccccccccccctccgccagatccggcgggaggggacgtgcagtggcgacggcagaagaggcatatgttcatgttgtgtttttatgttcatatgtgttcttgatggaatgtgtgttcttgatggaatcagttatcggctcaactgcagtcgagccgaccttttttttttcaatcgtggaacctcaaaggtgccggttcctaaaccggcacctttgattcaccatatcagtgccgcctccggggtgtcgattgggaaatccggcacctttggaagtttcacaaccggcacttaagggcttttctgtagtagtgtcttttcagcttggaatgctctacgacacagttcagccttcagccttgagcagtctgatgggcggcttctccaaggaagaaacactctttgcaatcaggcagatggacagaaacaacgcccctggaccttatggcttcgggccaagtttttaccaagcaacgtggcatctcctcagcacagaagtgatgaatctccttgaaagattctcgctacaacatgtctatcttgaaaggataaatcggccatacattgttctgattctgaaacctggaaaagagaatacaccagatggtttcaggccgatctctctacaaaactgctcgatgaaaatcattacaaaagtgttggcaaacagacttcatcgtattctgcaagagctaatccatttcgatcagagaggttttctcaaaggaagaagtatcactaagaatttcatatttgcgactgaactgatgcaaacctgcttcgtcagaaaatgcccaaccctaatcctcaagctggattttgccaaggcattcaattccatcagctgggatagccgcctccagatcctcaccgccaggggcttcaacaccacttggaatacatggattcagaatattctttcaacctctaagtcagtaatccttctcaacggagtctcgggacgctggattaactgcaagcatggtcttcgccaaggagatcctctatcgccacacctgttcattcttgtagctgatgttctccaaagactcctccttcacaatgagaatctcacacccgatgtgcccagacagcccctttaatcatatgcaatgcttgggtcacaggtgccagatcaatgaaattctcaactgcaagaaggaaagcttccctttgtcgtacctagctaggactacctctgtctctccccataagctgcgagctcaggacctcaatccaacaattgctaaagtgtacaagtacctagctggatgggaggcaagcctgctctcatatgccgagcacatagtccttatcaacttagtcctgaacaatatcccagtctttgctatgttttcctctaagctcccaggttgcaaaacgacacactgctaatcaagatgttgttccatccacatagctcaaattcgtcgtggtctatgtggctctagtaggaagctgaggacaaatcgttggcggatgacttgaaccttggacccctctggcgctccctccaatctctcatcccgacggttcaagacctttcaagcgtccaggtgggggatggattccgcacgtccttctagtgtgactcatggctctgcaatcaacctctcaagcttcgcctcgctacccttttctctcatgcagtggatcagctagccactatcaggactgttctttgcagaggactagccacctgtcttgttcctcgcttgtccttagtagcccagtatgatttagctctacttaaagtggaattgtagcaggtcattcttcaaggctgccctaacaaaaggaaaagtaaaggaactccccatcttgaaatcatcctggccaaacaaaactatgactccaggataatgctgcactaaatctgtccaaactggagcttcgtctggaacaacagagcgccactaaaggtgcaattcttcgcctagcttctggcaaaagagcgactccctacaaagcataatctcatcaaaaagggaattgtttcagttgatacatgtgatatctgtgccaatgcctcggagaataccaggcacttcaacctgcactgccctcgggtcaggacaataatcagcgtgaatatgatgggtcaggacgtcaaaaacctggcgaacattaagccctctgggggattaccggcgctccattttcaagttttcttcatgttatatttttggacgctctggaaccatagacatgatgttgtctttcgaaatgcagccccctaacttcagttggttttgcttaagtgtgttgaagagtgtgggatatggctagaacgaattaagcgcaacgatcgctttgtaattgcgatttggaagaacattttctcctcttccctccaacctctaaatgttgtgtagaactgcctttgtaacatcaataaaattcaggtggggaatccccccggcccccgcgtgacttgtctaaaaaaaattagtacagaacaacaccgtataaaacgacaaattatcttctatttttgaaatagatcgagttaattttcttttggagaaaggctaatcaattataatgtgagttaaaaagtttttctctcagtttcacaacttgcgtcgagattgttgcaccacttgcgctccgtgtcagttcctgtctatctcatattgatctgtagctagttttcgtagtttcgttggaataaattttttagatgtttaggacatcgcaatgttgtaaaaaaaagtaacattaaagtctctaaggtgaacaatatagctattgtgacattgaagctaagtcataacaaaaaaaaataatcataagtttgcgattggtcgctagcgaataaaaagatcagagaatctctcttctccctctgctccattctctctccacctaataaaaggcttatttggatagtttttatttatttatgaatgagttacatatattatttatcgagaacttaatttcgtgctaaggtaacaactacgatcaactgacaataggacctattttaatgctatatgttgcgtaacaaatattagccttgcccttagatctatttagatatatggttttggccggttgtactccccgtgatgtttatggtggtattagaattgtttagaggttaaagtactctatgtacatctttatgaacaacggatgtgtttgcaaggtttttaacaaaagatttaaaaatttgtctcctaatttttgatcattcaatttatcggtggcactagctatatggtgaggatcattgactttcctatgtgctctgttggtttgctataagaatgaagttgttggccaaataagataatcaccgtaagaactaagatagccagataggagctattgtaagttgtaaccaaggcctcttatactaagtagagtaagagtatataatacttcctccgtcccaaaatataagcatttttagacttcaacacagtcttcgaggtgctactttgaccaataatatctataaaagtaagatgttttaaataaaaggagttgcatattatgatagtttgtttaatgataaatctagtaacatctaatttacattattgatcttttttttctattaatactcaaaattaaaaatgtttgacttgacactattctaaaaatgcttatattttgggacagaggaagtaatacttttcacagcgctcgtgttacatgaaaaaaatatgcatgatagaacatcatagctcttttttttttttgaatgtgttgaagtatatatgggactgtgtacaaaatactcgaatgttttagctaggtcaacgatcatattttctaggtataagatatatagatcaaacagttaagatatctcccttccggtcttctccttcatcctactttgctgtatcccatgccacctcctacctctctagtgacatctttggcgctaatgaggcccaacaattaaaccgtgctaccactcccaacggttaggccccttccaagccaccatcacttctctcccctatccttagctcgtgtccgttgtccatgtcacccactacaccaaagcatatgaatgcactttgtttagggcatcagcaatatgctcacaaaccgatagtaagcaataaatacatccttactaccgggtagtaaacattgtgagactagtacgtaattgcaaccgggtcatatccctactgccggaagcaaggaaatagaatatgcatgtgcacagtattttctgacagcaaaagcattgcttctcccaaccgttgcatgcatgcttcgtccttgctgcgatttttttaccccatggactccaccttactgccaactcacagaaataagcaatgtgaagcacgcctctctttattaccgcctgttatctaggcccacgctaatacccatgtagatagtatacattgctgatgcccaggtagaggcgttttaagacatgccgtacatgcatgtacctctcctctactcttgcagttgcagctgatcctgtcaagctccaccaccaaaccactttgtcctgtaagctcatctttcccacggttttcactgcccccactgccgtccctacatgtatacacaataaatcagtatgtcttttgatcataatatccaacatgtactgttattaattaacaatatgctactgtaggatgtagccgcaaaccgtgccatccttctcttattatatggatggaggtcttgagcatgaacagtgagacgtacaagagaccaattcggatagctacacacaaagacgtcgtcgatcgtacaacttttctccatagtttttaaagctacacacccttagaatcatcagtctctttcttgagcaacagcacacacgccagaaatgccagctgcccggccgacattggagtagagaggagtagagagcaccaagtcgtcttcttccccccggcaatgcaagacgacgtcacgacgaccctgctgggaaactagtgctccatatacaaatgtccagaaagaatcagttcggtcggtcagatccacctgatcgatcgagtagctctgaaaaagcgagaattttatcgttaaattattccaaaggcgcgtggcggacacgcacgggacatggatctcgggcctcggctggggggatgaactaattgtgggtgatcaaacagttgtagcgatgaaataatttagctgcaagtggaggtcagccaggctggttttcatctgccattctgcgttcacgcgggcgacggcaatgcaactgccgatgtcattgctcacattagcaccggctctttttttctaaagcttaattggttctctgaatttctgagaccacacggcattcgattattcgatcgatacatcgcttactatgggcgatcgagttcatgctactactgtcctgctactctctccattttaatttgtaacctaagattgaatgaaacttaacctattatactacgaatgtaatataaacataggatatgttcatattcatagtagtacatattgagtatcatctgaacttatgatactatattatgagatggggttaataatatatatactatctccgtctcaaaatataccaacataggtatagatgaaatacatcttaacactacgaatctgatatatgggctatctaaatttatattattaggatgtgtctcatccaatagtaagaggttttagcagattataggagtataggtcttttgaaaaagttgatgtgtgctttgatttgattatttaccacaccttctgaaagcaaatttaccacttgcaagaggcctgactagcatgtctgtcaatggcaggaaaattgatgtgggtaagtgcgactaaccagctgtaatcacgaacatcgatcacgactagataatgaacgtcgacaaggaactttttccaaggcgagtgatgcatatgtatgacatgtacgtccattcagaagcgtgtgctgtgagagttttctgcagctcgatctacgatcgatatgatcgaatccagagtagtatccaacaggcagtgccaatactgtacgcaagaccaaattaaaacgtactcatatccaacagcagtagtgtactatctctcgctgcaaaccatgacttctttctaatctttccagttgcaagccgatctactgataatataactaacatattgcatacgtacgtgaaataacgttatccatgcttagcttaattcaaagtttatttttatatatcaagcaggtgctcattgacattggtgagaaggacgtagaagtaacggcgacacaacaaaattagtactatacgttaatcttgctccgatcctctgccaccccttcatttctatacccaacattactttcactagctaagcatctattatttttcatatatatctgcaggcagcaagcgtacgtataatcacagcttaatcagccgacatgaaagtatttaatcatacagtaccacattaattaatctcccgcgaggaaacatctatcctggtcaaagcatgagtaaatacttaattaattaaactagctcctcttaatccatctacataaaaattcgtgcaaaagcatacacggcatgtactgttcgtccgtacgctgccgtctcatttcgctttcgtagaacttgctctaggaaaacaactatgctagctataaatacgtacaccaccatactcttcgtctccactccaagcaagctagaaaaaaaaccaagtgaaaacctcaaagcagctaggcacgcgtcaacgcatcatctccttcgatcgtctccttgtagtggctatagtgtgctcgatctgagctagctttgatctctttgccatgggaaactgcaactgcttggagagggcgagggcgaaggtgacggcgtggggcgcggaagagggcgacggcggcgaggacgagttctggggcgccacggcggcggagttctccggcggcggcggcggcggggcgcgaggtggtgtaccgtcgacgaggaagaaagagatcatcaaggacggcggcggcggcgagggttcttcttcgccgacgaggcgcgtgaagatccggatgaccaaggggcagctgcggcggctgctggccggcgccgggaggggggcggccgtcgaggacgtcgtcgcggagatcatgagcatgggcgacgtgcacgtcgagcccgtcaaggcggaggagggcggaggcggccgccgcccgccgccgtcgccgtccaagctggagccgatacaggaagacatggacgagtagcaggagcagccatgggaggaggatatgatggagatgagcgtgagatcgtcagatggatcgatcatctggagatggacggtggatgttgcttcaccgattttgcatgcatgctggttggccctgtttgttttggatcttgtttgtatcttttctttgctctagttaagttttgtaggacgtacgtatcatgccatattagaggtagaaattaggaggggatatgtatatagtaatagatgtgtacgcgtgcacatgtacatttttgtactggtatgtgtgatgatatatactacctccgtttcaggttataaaacgttttgactttggttaaagtcaaattgtttcaactttgactaagtttatagaaaaaacaataacattttcaacccaaaacaatatatttaattattgattaaatgaaactaatttgatattataaatattactatattcgtctataaacttagttaaacttaaagtagtttaaatttgaccaaagtcaaaatgtcttataacctgaaacgaacggaatagcatattctttctgtgttttttatatgggaaatatctagtgataacttcaaataggtgaaataccctgtgaaagccatgtctaaaaagttatctcaattttcacaaaaaaaattactaaatatagatataggttgataggcatgaaatatattcatgtaacaaggtaataaaatagcgtatagcgggttaatagcagattatattagtgtctgggtagcagatataagctccaataacggaattaatgaagcaaccttaaatttagattggactatatcaatactaactttaagtttcacttaaaatttataaatttagattacacacttaattactcatacattacatagcataaaaaaatatgaataaacctatagagggacaagataaagaagatacacaacgttaaattttcctatccatatatacgaggaaaacatcgttacatgttggattattgccaatcacaatcctaaataggggtttgtttgtaaaatttcatttcgctactggttacaatgcaaaactaagggtctttttgcaaacctttggatcgctaccaataattgtgatacaaattatgggaaatacgtagtgtaaactccctatgtagtgtaaatatgtaatagtactcgatagtgtaaacttgtacaggtttgcaccatatatgaagtttgcattatatattttccttacaaaaaataacctgtttttttaaggaaggaattgagtttctgtcgtttaatattggtaggagataaaaaaaaaggtttacagttttacatatctgttacatgcagtgcaaagaaaacaataaaacatttttcgccaaagccatagacaaaagttgtgttcgaactagtagtttctatgtgctaggccgagagcgtcgaattcttgcataattgcaaaaacaacctgctcttcgctttggcttgtatcttgaaaagttattctattcctctccagcgagatgagccactcctttctcatgttgtctggcttgactcttgagtttggtcagctaaatcactagctattttccctacaaaacagggcgcattttgtaaaggattgagtaaggctgcgttcggcaactgaagaaagtgagtgagtttgtttcgattttcgcgtgcacgcttcccaaactactcaatggtgtattttttaaaaaattttctatagcaaagttgctttaaaaattcatattaatctatttttcaaatttaaaatagttaatactcaattaatcatgcgctaatagctcacctcgttttgcgtatcttcccaatcttctcaatctcctcctcctcaaactacaccgaatctaatttttatccttgaaccccaaaaccaaatacaaccggtcgtccctgaattgtcaaaaccggtgcaaacgagatccctcgtcggtttgaaaggcggttttggctgacgtggcgcctacgtggctggtttgactaggtcttcgtcccacgtggcactgatatggcgctcacgtggtaattctatccccgaaaaataataaaaactatgggcccatatatcagttacacaaaacaataatttaaaaatggtggggcccacgtgggccccacatgtcagcctcactcatcccttcatccctcttccttctctctcttcttcctcatcctcactcctctcttctgccctctcccctctttttctctctcttcttcccggggaacgccggagcagacgggcgggtgggaggcggagcaggcgagcgaggcgggctgtccgagctccggcggcgatggtactgagtggaccgcgacaaggatccccaagacgatggacaacgacgccggcgacgggagcctcaaccgagggagaggaggcgccgcgatggccagagccggggtggtcggcgcaagagtcggagcgcttgaccgcgggctccgatgacgaggacgaccactctggtgccattgccaccgcccgcgccaagaaggcgccgccctccatcaccatcatgctcgagaaggagatatggagttcgacggcggcggcggcagcggcgg

SEQ ID NO: 5512 - DNA, 22767 bp, Oryza sativa
  unsure (1)..(22767): unsure at all n locations
atattttatagtattcctgagcatattaagttgatcgatggatatttgttatagcttgcaaaggttgccatccctgccataccaaatctgtaatattttgatcctttttagagtgtttattactttatcactgacttggactgacattctgatttgggttttcttaccagtcgtgcgatgcctcacataaaaacttttactcgatacaatggtcaagacattgcgtaagcatccatataaactgttttgaactctagaattaataacagtatttccattgaatcattgtctggaatctttgtatatcctcatcagatggtttctactaacctcggcaaatttaagcaaagctgcttggggtgcgttgcagaagaataatacacaactgatgatacgctcatatgaggtggatgattttgttccattgttgaattgaggaaattttctgaacatccagacttttacaggaaaactgctctgcaacatagtgttggtcatcatggaatcgtagcttataccttgccatttgatctcttttcagttaggtgtactgttcttgcccaaaactcaccaatctgtaccacaattttcatgtacggggaagaacaattcaaacctggtactatctaatttctccttccttttgtattataataatgtgatcactttgcttttttttttcatcattttaagttccttacccagaataacctggcccctgggaaagagatcaaaaccaaactggtcacactctgctggaaaagcgacgaagaaaaagaacaatccacggaaattatcagattgccagtgccatatcaacttcctccaaagccttacggcacagaaggtgagctggattaatttaacgattgatacaacttcagtggagtaacaatagtaaaacacttagaaatgttttttttactttcagatgtcccatggtcttgggacaagaggtacacaaagaaggacgtgtatggttcagtctggccgcgccatggttagctaagcggtatgcggacaatatatgatcaatgaaaggctaaccctgctccgatgtcgacaacaagaaggccggtagctgatcgcctgtcagtgcccactactcaaccattagcaggaagtagtactatttcctgggagagattagatatttctattactaatttgtacgagcacaggatattttctttcttgttggtacgaatcgtgtgccttgtctgcttccgatcgtgatgtttatgcctccatcctcttttacagagtagtactcctacagtccgtcgtcatccagcgatagcgatctgaaattttaacgtgcaaaggacgctacctaaaccagctttttccagaaatcccccgtgcttgttcttgcggctgtccttgccttgagccgctccatgaaagcagcaaattagtggtactgcgtaaaagaataggggcaattgactcgacgatctcgcttccgtcgtcctgttgtgatcctagacgagaatcgtcgtcggtgatcgatcgggtgatgcgaagcgttcgtccaaatcacggtgattcaatcaccaacccgccgtatgaacgaccacgagcacgggggtgtgcgacgcttccctcggccgcatccgccaaagggtaaacgccggcaccaccacccaccaagcgacacggggcgcgcgcgcaccgcatgaatcgcgtggtacgtacgtacgcccccatcccaccaacgggccaccacgcgacacgagacggcaccacgggttccgccccccgccgaccccttgcaccaagagcccacgtaccgcaccgcgcaccggtgccggtgcgtgctcgcttttgcctccctccgcgagccgggcgcgccacgcgacgcgcgcgcgcacacgtcgcacgccgtctcgacgtctcgctcgctagtcgctacccgcgtccgccccacgcaacgcaaggagtgaaagaacgcgatgccgcccgcccgcccgccgccacgtgaacgcgcggcgcccctatcaatccgcgggcggcggggtccgcgcgctcgcgggggccccgcgtggcggtggtggtgggtgggtgggtgtcaccgtcgcgaatctcgaatccgcgaaccgcgagtccgggggggaatcgggtccgtccatccatccctcccagtcgcgtctcgcgagtcgcgacggcttcgctctctcacctcctcggccaaggtgggccccgcctagtggctgctcgtatcgattcccggatacgggagatcgacgatgctccgctatgcgccgttgccgtttgggattgattgattgattaatataattaattttggtttaatcacgtacgtttcgtcgtaatcccggcatagaccgcgtctgatgctgcgggttggaatgaccattagcgtaggtcggtcgtctggtccggattctctgcaagtagcgggcacgtagtatgccttcattcctttaggaagaatcgtgtcaccatttcctcgtaatttttttctccatccgtctccgtcctaaaagaatgtagtagttagttttagttagttaagcaacatttcattaattaatacaaagagaatgaaggaaggaattactacttcttcgatgacaaaagagaaaaaatatgaagtattttctatgcaataattatagctattttttttattacgaaatagaggcatgttcgtacctagagagatctaatgggctctacttcaaaatacaaacaaatttttaaatatgttcatacacaatgtcctattttattttgttagagtatttaagaattctattataggtgtggtctaatatgaatttaattttaaagttaattggatccatatgccattgtactttgctaaattgaaaaaataccactactattcacaatatcggctaggtggcatcgatattttgtaaaatttgaaacagaccattatataaatcccaaacacagttgtaccaagttttttatattgtattttcatacttaccagaatgctccctatcccttagaggctgacaaggaggacccacacgttaaacttatcttcttccccgattattcctctagcttgacgattccgcctacaacaacaacagtggtgaagggccggcactagagcttaccagcgacgacgtccccgcacctggcttcccgatggtgtggtagatcctgcaacggtgtgcttgagcttgagcgtagattgcagccccagaggcgaacagcaacatctagattgtggcagcgagcaatagtagccccagtggcggcggtcggtcctcgtctcattatcgtcggtgagtcccagcaccgacccattcaccacatcactgccatggagttcgagggagttggcagcattcctcgtgtgaaaaccccatcgctagcctctcgacagcgtggcggcaaggtcaatgcaggcgggctagattggggcggtgaggagcagtagtagaagcaaccccagtggcggtgatcgtttctcgtgtcgctgtcatcgacaagccccaacgttgacctctccaccactgacaccaccttcaacctctccaccactatcgccactgccactctactcccgtcagtcttgctgtactagtggaagtgttagggaagaagataaggttgacatgtgggtcccactagttagcctataaggttttgggggcattttggtttatacgaaaatacggtatgaaaaaatcaagtccaactacgtccgggccgtatatagtggtatattttctcttacaatttcagaaattaaaatttttacaaaatataccaatggcacacgaccaatatcaacggatagtagtgatattttttcaattcaacaaatttgcaatggcatggattatagtaaccataattttaatttgtgctcatcagttcaatattgcttttttactttgtgcctcacacaagctatcttctctctggccatcactaacaataggggtgaaaacggtacggaaacggacgaaaacaacttttatcattttcgttttcatttttttttctgaatcggaatcagaaaccccggatatgaaaacggaatcgaatattatcgaaaccgaaaacggagcaaaaacgaaccggcgcgaatacggtatggaaatttatcggaatacaaaaacccctcaaactgataaatctaattctcaagtctcaacggtcaacaattcatcataaaacacaaattatataagttcaattgttaagtctcaacagtacatcacaaaacacaatgtatgaaataaattatctatgtttaagagagtaatgctgttgataaatcccaatgcgggaaaaaaaattcttatgtaacttcagatttgcataacaaatattttttaaaaataacatccaaacaccatggtattcactgttcagtgctaaaaaaaagaacccagggtatttcaatcataaaatttctagaagtttcgagaaaattccaaccgacagatttcattttcaaaaataggtccggaatccgaaaagtttccgcaccgtttttaccccctaactaacaatatagggaacgtgtgctaaatataaaataagaccttatatatgtagcgctgataactagaactatgtaagaaaaactcatccacctactttagtggcaatcgggctaaataaaaaagagtcgctacactagtttcgttttccttagtaattaagtgggaaaatgaaatcattattgcttagaatatacgttcacatctctgtcatgaagttaaattattcgaggtagccataattgtcatcaaactcttcttgagtaaaaaaaatctttctagctgaactcaatgggtaaagagagagatttttttttaaaaaaatagaatgaagatattctgaacgtatcggcaaagatttaaacatataattatataattttatagtttgtgcattcgtcatatcgcacgtcattaaggacatgtcttactccatcccaatttttatttagtaattaaagacaattgacttatttttattatttatcttttttcgattagatgcaaggtacttacgcacacactttgtgctcatgtgcatgtgtgagtgcacctcctcaatacacgttcaaccagcgacacatctctaatatcactcgcctatttaatacatttaggtagcaatatcggaattcaagcactccaccatcaccagaccacttttaataatatctaaaatacaaaaaataattttacagaatagcatgaaaagtatgaaacgaactatttaggtttttcacataaaaaaaaagaattttgctcgtgcgcgagcgccaatctcccatattgggcacacaggcaacaacagagtggctgcccacagaacaacccacaaaaaacgatgatctaacggaggacagcaagtccgcaacaaccttttaacagcaggctttgcggccaggagagaggaggagaggcaaagaaaaccaagcatcctcctcctcccatctataaattcctccccccttttcccctctctatataggaggcatccaagccaagaagagggagagcaccaaggacacgcgactagcagaagccgagcgaccgccttctcgatccatatcttccggtcgagttcttggtcgatctcttccctcctccacctcctcctcacagggtatgtgcctcccttcggttgttcttgaatttattgttctaggttgtgtagtacgggccttgatgttaggaaaggggatctgtatctgtgatgattcctgttcttggatttgggatagaggggttcttgatgttgcatgttatcggttcggtttgattagtagtatggttttcaatcgtctggagagctctacggaaatgaaatggtttagggatcggaatcttgcgattttgtgagtaccttttgtttgaggtaaaatcagagcaccggtgattttgcttggtgtaataaagtacggttgtttggtcctcgattctggtagtgatgcttctcgatttgacgaagctatcctttgtttattccctattgaacaaaaataatccaactttgaagacggtcccgttgatgagattgaatgattgattcttaagcctgtccaaaatttcgcagctggcttgtttagatacagtagtccccatcacgaaattcatggaaacagttataatcctcaggaacaggggattccctgttcttccgatttgctttagtcccagaattttttttcccaaatatcttaaaaagtcactttctggttcagttcaatgaattgattgctacaaataatgcttttatagcgttatcctagctgtagttcagtttataggtaatacccctatagtttagtcaggagaagaacttatccgatttctgatctccattttaattatatgaaatgaactgtagcataagcagtattcatttggattattttttttattagctctcaccccttcattattctgagctgaaagtctggtatgaactgtcctcaattttgttttcaaattcacatcgattatctatcgattatcctcttgtatctacctgtagaagtttctttttggttattccttgactgcttgattacagaaagaaatttatgaagctgtaatcgggatagttatactgcttgttcttatgattcatttcctttgtgcagttcttggtgtagcttgccactttcaccagcaaagtttcatgtctgatctcgacattcagatcccaactgccttcggtatgcatgttgttctcttccctctttgtgatggtctgagtgcctggaatatttgtgctcatcatgttttcctgaacatgtacagatccctttgctgaggccaatgctggagactctggtgcggctgcaggatcaaaggactacgttcatgtacgcatccagcagcgtaatggccgtaagagcctgaccactgtccagggattgaagaaggaattcagctacaacaagatcctcaaagatctcaagaaagagttttgctgcaatggtactgttgtccaggacccagagcttggccaggtgtgtgtaataaccgaaatttgtggtgcctgatctttacgtttttctatctttctgagctagtttttctgatcaatgcttcactctgtaggtcattcaacttcagggtgatcagaggaagaacgtatcaaattttcttgttcaggtagggatcattcttcttgtgcatgcttactgcaattagatgtacacatgctgtgatgtatgaaaagaatacgtcttgacttgttgtaacatgctatgtcccgcaggccggcattgtgaagaaggaacacatcaagattcatggtttctgagcaactgccaaaaccattgcaaagactatagtttggggtggagtatacttggttgtgtacatgcctgcgtgttccattgtacacacaaaacctagccacctcttgactcttgagtgtatgcttgttatccgtgtgttgaagtttgtaagaggcaccatcactatagatgatggcttgtgtccctctttcatcaagattgaataatatatgctactttgagagcgctatcctgcttgcctgattgtgttaatacttacatccgtcccacactcccacaatataaggaaataaggtattttggcagtttagagcaaaattcccttatatttttgggacggatgtcctcttttctgcatttttttatgttcatatgttcctgaagagtaaggtggatcttgatcaacctgtcggtttatggtgattgatttgagtggaatagaatgggccaacgtccggcatacagttatgcttcagctagctccaggagttgtggttttagattgctcattttctcattctttttcatggacgatagctgaactgctgaagtagtgaagtcggcatgcactggctactgtatatgtatggcaattgatactagtagtattgtcagctgaagctgcatgccttctactgtggagtactagctgttgatccaaactccagaccgtgaactgtttgttttttcattactgctgggtacggtacactagcttcattctgtgcatgagtcattctccggcatgtctgcaggacatctcatgatacttctggcacttcaacagtgatatttccagagtactgcaatgagtttattcttatggttatgtacagtactcgtgctagtaatagtgtattgtacgaaatgaatatgggtagtactagtagttacaggattcacaaagctgggtaagttagaaatgaacatgggtagtactagtagatcacaaaggttcaggattcagaaagttggatctgattctcgaagccttcagtgcttctacgtcgccttcatcagtcagcatgtatgtgtaccatcttttttgagtgatttcttcccccaagtttcaacaaacaaaatgatgttacgaccagaccatcaaggttgagaaatcaaatgcaatcttgtcccctgttcagtcagacgtgcacgtagtacatcacagcatttttcagtcccgaattcgctcatcctgctgctacaggtggtcaaacagtatagttcaacttcagactttcgtggtgcttcttctctgtcaatgtgtacaacctattgctcatgatgtgttcagatagataagattatagtgcaagatgttgccgtggaatccttgcaggtgcgtgcagtgacttgaacatgggctgcatgtgttcctgcccctgaaatacggtgagatcgatttggttaagataatcagtgttcctaaccacgtactgtagtagccgttaacgttgtcagccaattatcaaatacgctgggacatctctctgcatgacctggtgaccatcagagtagtcagtgcctcattgtgcttgtaattgatctactactagtattctcttcaaaataaactgcgaatcaaaccccaacatattcttttcttcagtaaaccccagacaaattttcatgccaggataaaatccttgtcacacgaaaacaaaaccaaaaatatgtagcttatgtctctgttagaacaacacgagatcactggagagtggagattatggccctccacggtcattcctgccgttgaaacggcgcacaatctttttggatgcttctttctttccccctctccatcttttctttttctcacacacatgcagatgcccacagatcgctcatcacttcatcagcagtagtaaccttttccttttgctatctccctttttcttccaattcgtgctcgccaaacgaaaggaacatctcgtcacattttccttttttcaagaacaatctcgtcacatcatgatgcattttccagcctatcctcaccttcatcacccagatctgtggcaggagagaaacattatttttttctctgacatccatgcctaacgagatgtgagatctggacgcatgtttcgcccatatgcctctgtactgtagtacatcttctgatcttcatcttggctgtcatctcgccattggatcaccactaaaattacccccacactaacacatgctttacaacgtcatttgtcaggctagtactacgatgcgtgtacactgaaagcagcaaaggaaaaaaaataattttatccatttcatcatccaaaaagaatatggtttccaacgtgacagccactctacgtggcccaatccaaaaatagtagtactgtagtagttacagtgaatctgagccgcacgatcgaaggacgatccgatcctggccgcacatcgtacggccatgtacgtcggcggcggcgccggcgatggcctcacgagctggtcgtccggagcaagcattcctccggcggggaggggaaccgcttgcggtcgtcgcagtagtcgtagatgacgaggttcctcgccacccaggcggagtcctcgcgctggccggcgtcgagcgcccacgccggcggctggtcccaccagctgttgccggtggacgccgcgcagctgggcgggctcgccgccgccgtgccccaggagcacgcgtcggcggtgaagtcgcggtaggaggagatgaacggcgccttggtccagtccgtcttctccagcccgccgcgcgtcgcccagtcgtcggcgttccagatgctggagaacacgtacatcggcttcatgatcgggaagaaggtgttgggcttgtccgagttccggtactcgcggatcggcaccttgtccacgaagaacctgatgatcaatcaccaccaccattgcaaagaacatcagaaatcgagattaattgacagaaaatggatttgggtgggcacggcacggggaagacgaaggtggtggcatggcattggcagccattgcttggtcctaaacagaatgtgtccaagtagcagcaacctggagtgctcgtacaagcggcagggtttggcaatatctgcaggttcaattaatcgccatcggagcgacccatttcaaggggtaggtaggtaggtgggcgcattcaactcgtagtcgtcgtcgtcgttgacggcggcggcggcggatgctatctccggcgagcccggatggccacggagtacgattgaaacaactagaagcttgattactattgttcggttgatcacttacacgatctgcttggggttccagaggatggagtaggagtggaagtcggcggtggggtcgaaccacagcgagtggcgcatctcccggccgccgacgccgctgcggtacacgttggtctggatgatgtagggctcacccgtccggttccccaggaactcgaagtccagctcgtcgcgctgcggcgccgcgtccacgtcggagcacatctgcagattacgccgtcgtcgaggagctcggtttcagtttcagttcggagttgacacaaagaagacgagctagctagttcatcgtacgtacgtagtaggcggtgacgacgccggcggagtcgttgccggcgagcttgaggttcatgctgaaccacccgaagagatacctctccttcgtctggaacccgacgcctgaaacacaaacccaagaaacagggcagcgtcagcattagccattgccggagtggagctcgaactactctcactcaccagtcttgttgtcgaggtagaggtaccacgtctggccgtcggcggaggtcttgacgtgatcctcggctccggtgatctcgaagttgtcgccgaacgtcggcgctgccgccgccgccgacgccccactgaagcagaaaccgcacacagcaacagcaaaaatcatcgccgccgtcaacccaccaacccacggccgccgccccagcgaccccatcctcgatcgtcctcgacacccgagccggccgagctcacgtagcagaggacagcgaggcagcagcagaggtcgatcgatagtgagagcagcacagagagacaagaggcgcaccaccgcgtagtattataggcgtgagagagatgtgaagtggctactgtactaaaaaagcctaaagaaagacacaagttggggcttgggcgcgccccggggttcacgaagcgtgtagtttttgccggctgtttccgtctcggcgcggcgcggcgtggtgcggtgaaaatcgcaccgttgctgctgctgctgccgcgcgcggccgcaccaagcccctctttttctatcgagaaacccagctgccttctccctttgtttatgcctttctccctttgtttatcgcgaccgttttttgagttggagcgatagtggattatattatggggagggagggcaacagttgttgtcactcatcagtcatcacgcatggtgttcgatcagatctggggcttggaccggtcagggtatctcatatatattctcatccgttttatccgctccgtggtggccgtcacatgaagttcgtcgcgtcgtgttgacgaggcacgttacatactcctgtcctacgagtgtactagtggatctgtggatggatcatggatggtggtggattaatggtgagatggtggtactagctagcagggcatgtgactgttgatgacttgatgcgagtgagaatgagcagtcagtcagtctgctgttgattgcgagagccgagaggagaggaaggggatcaagggaggattaaaggcggtgcaccgcccaaccaacctgccctctgtgcctctgccctctgccgcgagagaccgggtgacggaggaagtgagcacgaacaggaaacccctagtgcagattcgcagtaaaaaaaaagaccaccagatttacggcagttttggattgccaaaatttgccctaccaatatttggtagcctaaatagtacccaccatttgtttgtttagattgatgccaacattttagtaatacccatcccaaatttgatataaatctagaactttcttcactatgatatcacaatttagctatattttaatagcaaaccaaataagatgaatacaaatttattctaccaaataattggtagtgccaaaatttatatatgttttagcactaaaaaaattagtagggcactgatccaaacaagcccttatttatttcatgcattgatgactggaaggggccgtgtttgaaagttgaaaccacacgcatgtttgttcatcggacggccacttgctctcatgcatccggaccgttgatccgtgctcgtgtactacacgtttactcgtgctgtacttgtaagtcatcttttacagtacactggcaatgctgttagatttttcacgtcccgtttttatttaccccctttcttttggacgtctgtcctttttatccctttcttgaaaggcaaaagagatgctttcttgcaaattgcgtgggtcgtgtctggctgtaggacctcggccgacactcctgacgagggcgcaacgaataaaggagcatttgttgtcttctgcgtgtggtgcacagttgcagtgttgcacaagggagatatctcaagactcgaggggcagtaaaggaaaaaaaatgtttcagcaggagaaagaaaaaggacaactcatgtagacatctatctggtctgaatttttcaccaatatctacaaatagatcccaaaaagtttattgtagaaatggacattttctcgacaccgacatacgccgtggtacaacatgacaacgctaatgaaattgacacctatttgtaaaagaattcaataaaatctatttgtaattaaaaaaaattaaaaataggtcatcgacgccaatgtatattattggcgtcgatgacctatttcatattagtgacttaacttccactagagggcaaggggagatgttagaccacgtgccaataacgttggcgccatgaaaatggtccatttttaaaataagttttttgggtctatttattaaatcagtttttttaattggtcaaaaggtgaaaaatccagcctacctagtactagtacattgcaagtgtactgtttcttataccttctactgtgcagctgtagcacagtacactcttctttagataatggaaaaatatatataatgcaacctatacattagtacaaatctggaaactactgtacaattaaaaaaaaagggcatatgagatgtgtttacgttactatgagtaaactttttaccatgataacatggataaatatcatacgtacatttttagattttgcggtattttcaggtttgcacttaatttttttctcagaaaacatatttggtacagtgcgagtaaagcgcgggagggggggggggttcagaaacttgaatgaactgagagtacttcggccgtttgggcaaccatgatatcgccatacttttgtccctccgatttcaggtgtactacactctaatcatgggtcaaagcctttatttggcaactttgataaattgggcctatgatagatggctagctagatgcaaccaaaaccaaatgggctttggttctcagttcaaggctcaggtggatggacgttgggccagttgagaagttgtcatccaagggcccttcacacggtatgggctgtagttggatcacatcaactcatgggccatcacctatcggtagtttggtcttaactcagcccatctagtctacttcggccacaaaacaccaattcaatgtgacgtgtgatagttttgcggtaacgccgtaacaatatactaccttgctaagaatgaaaattttttactccagaaagaattttccatgagagatatttctcgaactaaaggaccacgcagccatggttgctggcttgctgcttgtctgttcttgtacagaggtgacaaaatggtatggtagggccaggaaactgttggtgtatgtgccaaaaacgaaaacgaattggaaaggaatcaatgatggagatatgcttttgtcaccaatatcaaatttcgaatagtctggaatatcccactagctccagacatgctgaggttgctctggctaacattgttgtgaaaatgaaaattgctataaccttattctaaacctgattagtgactgattaattccttttcctgaaactgataaatgtgtgatactaagaagggatttagcatcaattattgagagagagaagaaaatggtgagaaaaccactgttgagatctgagaaggactcgaaagcagggcagctggccagtggctttgctcttgatagctttctatatcgaccgttctcattagtgactgattaactggaccttttgtttttcgacatatttccagtgaatagaaatgctgaatgcctccagatattatgggttctggctagattttctatgagctgttgcattttcttggtcatgtggtcatgctgctgttctaaaacaaaacagagtttctcactctgtccagtgtccacatataaaaacatgcagccatcatattagcatcaacctgaccaacaaatataatggcactgaatcatttttatttcctcatcctttttattcattcctcccagagagacggatccatggaagttttcttgccctcatcaggcaagcagagcacacacacacggtggcagtggaagtgctatgaacaagacgctaatcaacatccagagctaaaacaaacaaggggatcaaagcaaatcccgaaaaaaaaaacacaggggaaagtccacatcttcttctcgtccccaacgcctccgtgtcaccaccacgtcttgcggatttttttttaccctgttctattcgctcaggcgtccacgatctcgccgtcgtccttcgacgccaggatcagctccgggtgcgccgccgccgccgccgccttcttgatcgtgccgtcgatggcgttcggccggccgagcgccttcagcgccaggtgcgccgccttctggccggagatcatcatggctccgaacgtcgggccctgcaacaacgaatttgttcaattccaagaacgggggagagattatggtgaagagtttgatgtttttttggtgcgtaccattctcggggcgccgtcgatctcggcgacctccatgccggtgacgatcatgccggggacgacctcgcgggtgaggcggacgatctcgtcctcggcggtgttcatgtcgagggcgcgcatgccgggcacggcgtcgatcatgccgatgtcctgcagccgcttgacgcccgtggcgccgaacggcccgtcgtggccgcaggagctcaccaccaccctggactccatcacgttggggtccatgcacgactgcgtgtcgtggttcatcgacaccagcgcccagttggtgaccacgccgccgacgcggccctccttgacgatgaggtcctcgacggcgacggcgttgaacagcttcacgttggggcgcgccaggaggcggctcatgacggtggaggtgaagagcgcggcgtgcttgatgacgacgtagtcctcctgctcgtcgtacgcgacgccgagctcgtcgaggaacaggtgcgccggcttgcgcaccaccatggcggagaacagctgcccgccgagccacgcgccgccgccgggggacaccgactgctcgatgacggcgacgctgacggaggggtccttggagagctcgtacgcgcaggagagccccgcggagccggcgccgacgacgacgacgtcggtgtcggcgtaggtgatcatgtcggtcatgtaccgccgggtcatctcgcgggacacgatggactccttgatggggctgaacctgatggcgttgaggtcgtaggggggagtggacgacgacgacgagatggagttgcagatggcgccgccggtgcgcggcgcgacggagacggtggggttgcgggcggcggcggggaggcgcgcgccagcgaaggaggtcttgaggaggctggacgcggtggtggccatggctgccatgcgagaggaggaggagatgagcttcttgctctgggatgaggagtgtgtgcgtgagtggatagagcgtgggttggcgggggtataagaagaagaggagagcgcaaatatctgggagtgccgtccacgtgtcagcagtatgggcctctgggtttcggattgattggaggagatattttcggaaggtttagtgagggtttttggactgtcttcaggagaacgggacaagtgctgctaagtcacggactcacgggaacagtggtgctgtgttcagtgacagtgtccgtgataccgtgacgactaaggctgtgtttgcaatcccacgttcccaacccctctccctcgttttccgcgcgcatactattcaaactagtaaacggtgtgttttttttaaaaagtttctatacaaaaattgcttaaaaatcatattgatccatttttgaaaaaaaaattagcaaatatttaattaatcacgtgctaatgaaccgctccgttttccgtgtggaaagtttagctcccaaacttcccatatcggaacacaacctaataatggtttttggtgatcgattttttttatggctacctgtagtgaggggtactagtggtggagcccgggtggtcactcgacctgtacaggagctggctttgtcgctgactgtaataacatatcgagaattttttagtctgaaagaaatccaccataatatgttgttgatatcgtctaatatcgagaagtgcggttttaacttcttgtcacgcgttggtaaacctaagtgtctgtccctaagaaaactatctttgccaacttcttgatggatcgccttgactgttttgttgcacgacagtcgttgggaacaaagctcatcttcacaaattacatggaggcatggggtatactagtggtaaaggttccgggggatgaaaaccttctagttttttgggtttgacgatcgcgagcggggatcgcactacatgtttttgttgagcaacaatcatcgtttatttgttgaagttgtcatatttaggtctttggacgtagatctaggtctaatttcatatgatagcggctatctctgtttatgatagtaattgttttcccgaaaaaagttgctttgttaatatatcctatcaatcaattgttttaatttctctttttttctaaataattcttttagaacttagttgtatttctctgttttttttcctacatctttgttcctaataaaagatgagaaacacccaggggtctttcggctagctccacaaggtggtgggctagacgacttgggttcgaagcctcaacccttctaattatttgatattaggttattctctaatattcgcgttcctaataaaagataatgatacactttcagggataaataatggatgttttctgatctggtatatatttttttcctctcgaactaatctgatataaacgaaaagagacaaagtcatttttatttgttttttatcattgcagacaagcttaaatgatctacctaatttgaaatgtctcacagatcaatatgcatgatattgattataattagaatgattttactacagggacagtgaatttcataacttgaggctagtagatggtagcttttcttgcactgaaaaatctctggtaaatatctgcaactgctccagctttgtccacatatcagacaagtgtcatatcgcctttcttcgagtgatttttctacatctttttcaagacagatatttgcatgtctgcaatcttcaaaactatgcagaatgaattgaggccgttgaagttcccatcatatctcgtcagcaaagcatacaacttgctgatagggaccatacgacgaatgaagaaattccaaatgctacactgctttcagttacattttcttaatttatatgatgattgcaattactactactactatctgggtaaaacaataattgtcatgaccttccgctgcagaagtgattgaggcccaattataatctagtaagacagtgcaaagccatctccattcagatttgtgccacacatttttgtccatccaattcctgaaagtgacactggatcagacaggctcttttctgaagaaagatcacgttatatggcctgttctcttttcctggttgtgatcatgtgatccttatatcatttctttgaagatgacccctgcattgtttactggcaaatggcaacatatagtgatgatatatttcttatgaaccacatacataggcacagaggtatgattttgacttcagatattttacagcgaagtagtctgagtgggtttaaattattttacttttcttttttggaaatatcaaacctgagaagtaaaaaaaacagagacgaagttaagttttgagtgaaaagcacagggaaaagaacttttttttcttttataaagagaactacattcaggggttgcaaggtttgttttaagggtaattttaccatccttgagaaaaatactgggtgataagtttgggtgataagttaaagtgagttcaaatttaccctttcccaacttctgctctttcgtttttatgcacacatttcttgaactagtaactatatgttttttaaaatcttctatatgaaaattactttaaaatattatattaatccattttaagtttttttttctaatacttgattatcatgcgcaccattccgtttagaatgcgtgaagaattagctcccaacccatgataacaaacattcttattgggtacttcgagttatcaaactttttagtgtcaaatttaggtatatcgaggcatttttctcaagtaccaaatttttttcttatattaagctcgaatgtgtatcatgaaaaaagcagagaaatgtttgcatcagtgtgagggagaagctcatcccgaacgggaatacatcacgatcaacagaagaaattggaatgcaaagtacaaactatagaagaagactgaattgtttctcagaagccgaaccttgttatgaccctgaaactggcaatcattccgggctgcacatccaaaggcatgaactttgaagtggttaatccattgattctgcttgcacttagtggctccatccgaggaaattcggatactacatccttttttacagaaggacttgtttgattaagggaaattaatttcacatcaatagacgtgaagtagatcccttttaaatcctcttctattcctttaggtagtgtttggttgcaagaatgggatgagatgggatagaatgaacccacttttaggggtgtttggttgagaggtgagtgggatgggatggtccttggagaggaatatttctctcagatccgggatgaaacggtccgccaaaatcggccggaccaatccatcccacttcgacggagcccacggcgttagctcccgtagcctcccgctcggctccgccgccgcctcatccgcgtcgacctccgcctccgcgactggccgtcacctcgtccgcgaccgcctccgcgaccgaccgccgccgctcgtcgtcagctcccacagcctcccgctcagctccgctgtggcaccgccccggctgcccgtccctcccccggcaccgttccctcccccagcgccgctccgtcctccttcgcctgctccctccacctcgcctcgcctccacgaccgggcgccgccttgtctgcgactgaccaccgtcgctcgtccgcgttcgcctccgcgactggccgtcgccttgtccgcgactggccgcccgtgctcgtctgcgcctcgtcgcctccgggaccggccgccactcgtatgcgcctcgcctccacgaccggtcgccgccttgtccgagaccgnctcccgggacgaccgccgtcgctagtacgagcgtcgcctngactttcctagnctncacgaccagtcgccggctagtccgcgaccgaccgacgncactcatccgcgcctcggctcacctcgcctncgcgaccggtcgncgacgctcgtacgcgcccgcctacgcatntnctncgctcacgccgacgagctcctccgtccccattctcaccactctctccaacctagccgttgggagcggacggacctaactgtccgtgaaacattgtccatcccatccgatctcaatcctttctaccaaacaaaaaactataaccatcccataccataaaccaaacacacaactagaaccattctatcctaaaaaactaggataggtctaacccatcccacttggtcaccaaaccaaacacacccggtggggggtaaatcaaccagacctacccagcctacaaggaaattcggatataagcctaaattttactacagaagaaattcttgggttcttcaagatagctgcacaacctgtatttcagtccttgcaaggagctatttgtcatatacttgtatagaaagcagggttgagaatatggttcacttggtgtaaatagcgcctacgagaacttgggcctaacaaaaagtgcaacagtttgtgtagcggttaattttggcccatggtagcggtccagatggtagctgtcctatttctatagagaaagtctatactcactcttgtccttaatcggatcgcttccctcaaccacaaaaccaggtataacgtcggagcttgctatctcgtgcgcgcaccaacaactaagctggcacgcgtgccggctggcggcccacgcccctcgcctacatgcgtttctttttttctttttttttttgcgattttctcctattttcaagcctcttatcctaggcgcgttttaatttctttcgtgttttttctaatttttttaatctgcaggcacacttgttttcaaatctttaagttgaaagattttaaattaagttgaaagttttggaatcttgacttgaaagttttccaatctaagctgaaagtttttaaatttcgagttgaaagttttcaaatccgagttgaaagtttcaaatttgagttgaaagtttttcaaatttcagatgaaaagttgaaagtttcaaatttgagttgaaattttttaaatttaagttgaaagttttcaaatcttaacttgaaagttttccaatctaagttgaaagttttcaaatttcgagttaaaagttttcaaatctaagttgaaagtttcaaatttcagttgaaatttttaacatttaagttgaaagttttcttgacttgaaagttttctaatccaaatcggaagttttcaaattttgaattgaaagtttccaaatctgagttgaaagtttcaaatttgacttgaaagttcaaatttcaagttgtaattttttaaaatttgactttacagtttcatattttaagttgaatttttaaatttcaggtatgttttaaagttttaatataaagttttaaatttgattttaatgtttctttcacgtgtagatttctttcagcctattagtaaaaaaatacttatagaaaaaagaaaaaaactaccttaaattttaggtttgtttttaattttcaatagaaagttttaaattttatttgaaagtttctttcatgtgtagatttctttcgatctgttagtaaaaaaactcccagacaaaaaaaaaacttaccttaaatatcatcaatatccaagactagacagagttagttacgagagttagttacagtagatgcgcgcgtctcccggaaaaaggaaaaagtccgattgcggattgggtgacatcgtgtgtgtgctacttctcttcccgacgtgtactcacggtacaagaattctgtgtaacgtctcccccaactcaaaaaaccggtgcaaaatcgattcctcgatggttcggtaagaggttgtgcggtgggcctcacctatcagttacactttttccccttaccccacctctccctctctcctctatcctcgcagacacagtagacgagataggctatagggaaagcggctgccgccgaggaacaccggcagtagagacgaaatggcgcatggaggaatacaggagggcagagaatgaaattttaaaatatgcactattttcctcgattttgtatatatatatatatgattttgaaaattttacagaaatatacatccgcatcaccgtgccgtcggcgcagctcgaagacgcgccgcagcgccaacacacgtgaccgggacggtcccgtgaggcccggcgccgcgtcggcccgttcctctgatgcacgtctgccagagcctggcagtggcgcagaactggcatgcactacgtgaatggtcagcgtagcacagtgatgcatatatagcatagtacagactgcattagcagcattaggaacaagagttttatttgattccgcttgaccattccgcggaaccgcgacctagtctgacgtttccacatcatgccgccgtcactcccggctgctaccacactaccacctgtgctcgggctggtggggacggcagtggtggtgatgagccggacgctcagtttttgttgtgactagggaagtaattaagtttttaaagcaatatcatccatgtatgtaaaggggtttcaagagcatcaaagctggaggacagaacattgt

SEQ ID NO: 5513 - DNA, 67834 bp, Oryza sativa
  unsure (1)..(67834): unsure at all n locations
gatagtatacattgctgatgcccaggtagaggcgtcttaagacatgccgacatgcatgtacctctcctctactcttgcagttgcagctgatcctgtcaagctccaccaccaaaccactttgtcctgtaagctcatctttcccacggttttcactgcccccactgccgtccctacatgtatacacaataaatcagtatgtcttttgatcataatatccaacatgtactgttattaattaacaatatgctactgtaggatgtagccgcaaaccgtgccatccttctcttattatatggatggaggtcttgagcatgaacagtgagacgtacaagagaccaattcggatagctacacacaaagacgtcgtcgatcgtacaacttttctccatagtttttaaagctacacacccttagaatcatcagtctctttcttgagcaacagcacacacgccagaaatgccagctgcccggccgacattggagtagagaggagtagagagcaccaagtcgtcttcttccccccggcaatgcaagacgacgtcacgacgaccctgctgggaaactagtgctccatatacaaatgtccagaaagaatcagttcggtcggtcagatccacctgatcgatcgagtagctctgaaaaagcgagaattttatcgttaaattattccaaaggcgcgtggcggacacgcacgggacatggatctcgggcctcggctggggggatgaactaattgtgggtgatcaaacagttgtagcgatgaaataatttagctgcaagtggaggtcagccaggctggttttcatctgccattctgcgttcacgcgggcgacggcaatgcaactgccgatgtcattgctcacattagcaccggctctttttttctaaagcttaattggttctctgaatttctgagaccacacggcattcgattattcgatcgatacatcgcttactatgggcgatcgagttcatgctactactgtcctgctactctctccattttaatttgtaacctaagattgaatgaaacttaacctattatactacgaatgtaatataaacataggatatgttcatattcatagtagtacatattgagtatcatctgaacttatgatactatattatgagatggggttaataatatatatactatctccgtctcaaaatataccaacataggtatagatgaaatacatcttaacactacgaatctgatatatgggctatctaaatttatattattaggatgtgtctcatccaatagtaagaggttttagcagattataggagtataggtcttttgaaaaagttgatgtgtgctttgatttgattatttaccacaccttctgaaagcaaatttaccacttgcaagaggcctgactagcatgtctgtcaatggcaggaaaactgatgtgggtaagtgcgactaaccagctgtaatcacgaacatcgatcacgactagataatgaacgtacgtcgacaaggaacttttttcaaggcgagtgatgcatatgtatgacatgtacgtccattcagaagcgtgtgctgtgagagttttctgcagctcgatctacgatcgatatgatcgaatccagagtagtatccaacaggcagtgccaatactgtacgcaagaccaaattaaaacgtactcatatccaacagcagcagtgtactatctctcgctgcaaaccatgacttctttctaatctttccagttgcaagccgatctactgataatataactaacatattgcatacgtacgtgaaataacgttatccatgcttagcttaattcaaagtttgtttttatatatcaagcaggtgctcattgacattggtgagaaggacgtagaagtaacggcgacacaacaaaattagtactatacgttaatcttgctccgatcctctgccgccaccccttcatttctatacccaacattactttcactagctaagcatctactccctccgtttcacagtgcaagattttctatcattgtccacatacatatgtttaaattcattaacatctaaatgaatataggcaatgctagaaagtcttacattatgaaacggaggaagtattatttttcatatatatctgcaggcagcaagcgtacgcataatcacagcttaatcagccgacatgaaagtatttaatcatacagtaccacattaattaatctcccgcgaggaaacatctatcccggtcaaagcctgagcatgtacacttaaatatagttaattaaactagctagctcctccgatcctcttaatccatcttcataaaaattcgtgcaaaagcatacacggcatgcactgttcgtccgtacgctgccgtctcatttcgctttcgtagaacttgctccagcaaacaaaccctgctataaatatgtacaccatactcttcgtctccactgcaagcaaagctagaaaaaccaagtgaaaacctcaaagctaggcaccacgcgtcaacgcatcatctccttcaatcgtctccttgtagtggctagtgtgctcgatctgagctagctttggtctctttgccatgggaaactgcaactgcttggagagggcgagggcgaaggtgacggcgtggggcgcggaagagggcgacggcggcgaggacgagttctggggcgccacggcggcggagttctccggcggcggcggcggcggggcgcgaggtggtgtaccgtcgacgaggaagaaagagatcatcaaggacggcggcggcggcggcgagggttcttcttcgccgacgaggcgcgtgaagatccggatgaccaaggggcagctgcggcggctgctggccggcgccgggaggggggcggccgtcgaggacgtcgtcgcggagatcatgagcatgggcgacgtgcacgtcgagcccgtgaaggcggaggagggagncgacgaccgccggccgccgctgtcgccgtccaagctggagccgatacaggaagacatggacgagtagcaggagcagccatggaggaggatatgatggagatgagcgtgagatcgtcggatggatcgatcatctggagatggacggtggatgtttcttcaccgattttgcatgcatgctggcctgcctgtttgttttggatcttgtttgtatcttttctttgctctagttaagttttgtaggacgtacgtatcatgctatattagaggtagaaattaggggatatgtatatactaatagatgtgtacgcgactacgcgtgcacatgtacatttttgtactggtatatgtgatgatatatactacctccgtttcaggttataatacgttttgactttggtcaaagtcaaactgtttcagctttaactaagtttatagaaaaaataataatattttcaacccaagataaatttattataaaaatatatttaattattgatttaatgaaactaatttggtattataaatattattatatttgtctacaaacttagtcaaacttaaaatagtttaactttgaccaaaatcaaaacgttttataatctgaaacggagggagtagcatattccttctgtgttttttatatgggaaatatctagtgataacttcaaataagtgaaataccctgtgaaaaccatgtctagaaagttatctcaattttcaaaaaaaaattactaaagatagacataggctgataggcatgaaatatattaacgtaacaagctaataaaatagcgtatagcgggttgataacagattatattagtgtctgggtagcggatgtaagctccaataatgaaattaatgaaacaaccttaaatttagattggactatatcaatactaacataagtttcacttaaaatttataaatttagattacacacttaattaattactcatacattacatagcataaaaaaatatgaataaacctatagagggaaaagataaagaagatacaccacgttaagttttcctatccatacgaggaaaacatcgttacatcttggattaatattgccattaatcacaatcctaaataggggtttgttcgtaaattttcatttcactactgattacaatgcaaaactaagggtctttttgcaaacctttggatcgctaccaataattgtgatacaaaatatgggaaatatgtaatgtaaactccctatgtagtgtaaatatgtaatagtataaactccatatacagtataaatctgcaaactaccgtttcatcctatggtagtttacaggtttacatcatatataaagtttgcattatattttttccttacaaaacatgccctgtttttttttttgatagaaacatgccctgttttttatgaaaggaattgaatttctgtcgttttatattggtaggaggagataaaagaaaaaaggtttacagttttacatatctgttacatgcagtgcaaaggaaacaacaaacatctttcgccaaagccatagacaaaagttgtgttttcgaactagtagattctatgtgctaggccgtgagcgtcgaattcttgcataattacaaaatcaacctgctcttcattttggcttgtatcttgaaaagttattctattcctctccagtgagatgagacactcctttctcatgttgtctggtgactcttgagtttggtcagagctaatcactacctattttcccgcgctacgtgtcgaacgtccggagatttttttgcaaatctctggacgatgttgcattatatgttgaaaaaatgttgcaatgttttattgctcgaaaaaaaaatgtttcaatatgaattgttttttgacgttacatctttcactgaagatagtttcaccgctttatcaaaaatgtttcaaacgaatgcagcacttaagaacgctgattgcaacgacaaaaaacacattaggtgcaacattcaaagaaatcaaatgcacagaacttttgaggaacatctagaaaacacattactgatttaagaaacgtattgaaaagacagattgcaacatcacaaacacactgtgtgcaacaaaaaaagaacacgtggtgtgcaacaatcctcgctagctcgaccttgtccgagcgccgccgccggagcccaggcacgatgaaggtgtgctccgtcgcctcctcccctcgagctgccgtaccgccgcgtcgtcctcgtccgagcaccgccacgctcctcctctccggcaccaccaccgcctcgtcgcaccgcgtctacccacttcgtgtcgatgctagcacaggcatggagagaggagaggaaaattgatggttggaaatgaggataaggttgactgccggggaaagaagatggagagagtagttaggtaggagtgggacccactaggttagcgtccgattttttatcgcgcgccggccgacgtacgagttaaagcattttcgctagaaaacaaggtgtattttgtaaaagttcggatcgtacggttccaaaatacctcggcccggcccatcataaaactttgagcaggtcaggtaagcgcatacgtcaacctgggcctcaaaagtttaatggtccttaacttggaagacccctcctgcccatcccggcccggcccatgatttcaccatccttctctgccatcgaccggccacgctcccactccgcacaccgccgccgccgccgccgccgccgatgacgacgaccgccgcgctcctccacctggtgatcccaggttagcgatctctacgcagtacccaggtatgcttcgttctctgttcgggccatctttctgcctctccaaacccctccggacagacggatcggagagctaatacagaaggagaaggggggcaatgccgaatgcgtgacggagatggggaaatctgattctggaaatagctatgggtaggagcggagagagtgatagcgatgatcccccatcgatgatcagtatctaggatttccagttcgacagggagatgcagcctttttcagaagaagcaactttgcctgtgcgaagactggagccagaaagacacacagcatatggtaggttaagtgatcatcagttcatcagtaggatttagtttataggatgattaccgattgcatctcattatctttgaattgtgtgtttgattaatttggatactggcacagggggcaagcatcatgcatcatgcttccgttttattttcccttctgtattctgaaactaacgcttagcattatgttcttgagttcttccattttatttttccttttatagctcataaccattatctatgcagatatctgttacgaataattcggattccttggaacacctttatgtaagtttctcgagataccaatttggttttatttacctttttaaattacaggaaggaactgccaacagggctgtttgagaaacacgtatcctccctccaccaccaaagtttgattactattgcttaatttgatccaaagtttctacatagtatctttgttttctttttctcgtatggtgatctaatgattgggaaaaaaatgaccagtagataatgcaaaatcagtcatctgatcaaaatttcaagtaattttcaggctccttttttcttttcgaaactgaccaacgtttttcctcagtttgttgagtttttttagataatggatttttcattaatccggtctctatatccacaaagatatacacaaccaaaacattacacgagttcttggactctaaatctcacacagaaaaacacactaacacaaaagagaaaagctagaagacttagcttcaaccttcatcgaatacttaatctatccaaccaagtgcgagagggggaagaggagaaacagaactagtccgtgctacccgttgccgcaccatctccgtctctgtagaactcaaccaacatatgctgccaactgctatgcctaatgtcctctgtcgctgtccaaaaccacttacgccgctgccgcattttgaacgcccatagtgcgtcacgaagccgccttgctgcgttaccaccgtcttccgcacaccatcgaactcaccgtagctcctagagcatcgtagagtcatccagcatgatatgcaccttgcctttactgccatcaacttgccaaagatgctccattgccgtccacacctatccgcaagcagaccttgacgccgacgctcacgtggcagcttccccctctaggacgccgccactgagaacctccgttgccatcatccttatctgcatcaagcaagtcgatgaccatcgcaccattagcccggccctgtcaccaagatatcgacgaccaccatcccccaccctcgcttggccgtgaacagaacggggcgtcggagctcgccaagtcactgctgcccctaggacgccgccatcgagaaccttcgccgccgtggtcatagactgtcgtggccacaccacaaccatcgaccaccaacaccatgctgtcgacctaccatcacgggtggagggctagcctcaccactgtccatggccgccggtggcagagtaaggggtggatgactagcctccgtcaccttccaatgccaccgccgcccaccaacacgccgacgcctcctgtacatcctagtcgccttagcaatcacgaccacacatcaccggagcaccacctccactatcagctccctcagccaccaccagcaccctcaccaccatcgcgccggcggaccgccaacgggcgtcaccgccatcgcctagccggccgcctaacgggcactgccgccaccaacatcggcacctccatcaccgttcgccggagcttcaccgccaccgcatagacgtccaccagagcgtccccgccacctcctggccggccgccaacaggccctgccaccaccaccatagcgttgctcgccagatcgaaagttgacccaccgcaccgccgccatcccagcaggcccgcacaccggcgagccgctctggcggcggcgaggttgaaaagcggcggcggtggctagggtttaatgggggagaggaagagtttggtttgggggagaggaagagtccaatcagtttgttgagttggcaatcaaaagtggtaaaatagaaacaatatggtagacccggatggcaaatagtgttatttgagaatgcacaattgagaagatgacaaacagtaaaaaaaacttctaaaatgcagagatctctaccacatacttcctccgtttcacaatgtaagtcattctactatttcccacattcatattgttgttaatgaatctagataaatatatatgtctagattcattaacatcagtatgaatatgagaaatgatagaatgacttacaatattgtgaaacggagggagtatatagtactgatttgttaaagggtgatccaaagcaaaccatactagtaagaaagaaaatcacacacaccccacacaggactcatatatgtccaggctttcaccggaccaaagatatgcacgttaattatattcctagtaattgacgacggagcacttcctccggacctcgccatcattccccggcggcggctggaggttccccatattcaccatggcctcgccgaagtcaccgaagaactccatgtcaaagagccccgtcgcgtgcttcttgacgtaggctccggtgaagtcgtcgtcgagcagcacggcgtcggaccggaacagcccgcggcgccgcgcgacctgcgtgtagtagcccgtgtcgaacttgggcgatctcttgggggagatctccaccatgacccccgggttgtcggcgttggcagtggcactggcagcggcgccgcacttggaccggagctcgttgaggtaggccgggtcgagctccgggtcgacgtcgttgagcctgttcccgccggtgtagttgtagaggcggtcgtggaacggctggcagtgcgagaagccgatggtgtgcgcacctagaatggtcacgttaagtaattaagatcgatgattgccgcagtcgatctgatgataattgatgatatcttgtggcggagctgcacccgataggacgacgagatccttggcagtcaagttcttatgggcgaacgctgcttgcagctgtgccatgcctgaatttggtggcgggagatcaaccgtctcggcggcgttcgatatttttccatcgagccgcccagttggtacaggccaaaacgggccattactctgaattaggagtgcacaaaattatatttagttgcatcatatttgtatgtactccatctcatagccgttgctataaactcgagtgctttcagattttagttctgcgttttctgattaggccagctttaacagagaaatggccttataggattttttttttccccgatgttgtatgccgcatgcatgcaggatggaaatggccggtaattgtggtttagggcctgttcactttaatgttattttcaacattactaaattttggtaaagttacttaaaaaaaatggctacatttagtttgctaccaaaatttggtaactatctaagaaatcctaccaaaattttggtaagttgccaaaattttgacagttatgctaaaatttggtaaggttttttttaacatcaaagtgaacatgcccttaagctcgaaatgtgtcccacaacaactgagatattgagtcgcatcaagatagctgagttacccaatgaacagcgtccctggcggcaagggcgaggatgtcagcacacgaaacagtcccaggacaagcctgctccagcttctccttgatgctgtcgatgacgtcgaaccctctcaggcctgcactcgtttcagcttctttctcggcgtcgacggcgccgccggccaccgagtccaacaggatcgacccgtcgcatccctgcttatatcacaagcacacacatgagtacattgacacatatcaacaccactgcataagcactactactcatctacaatctctgaactcagtatctactcaccctgacgaagcagtcgtggaaatggagcctcaggagagcgccggcgagatacggcgccacggatagaacagatgcaacctcctgcctcacggtctcttctgcgccgttgcatgtgtccccgtaatacccaactttgagctgtgcctgcgcagcgctggacgagacgagagctgctgctgctgctgctactaacacgacaaagattgctgccatcatcagggggcttcaattcctgagttatatatatgccccccagaaatttgtgctaatcgatgcaggatcgatcgagcactactatgttgcagcttatataggcagtagatacgttgacaaatcacaaatggatcgaggctggagtatcttcagtaaagtacgggctagctagctgttggaaccaaaccaagtactatcgtacatcgaggtaattgaatatgatgtattctttctttcggggtgccaaattgctagtttcatagaacttgcataattgggggtacacaaatgtcatcacttggaaatgatttttattatacctgtcgagcgtacagtgattatggttgtgcattcttacatataaatatttgtttattaacatcgagctgattgtcaaagcattttgtttaggattaactcaataattctcacacggaaagaaataagatggaagaatggcataaagttagttaggaactgcttaccgttacaggcatatatataaatatttgattactccaccccctctttgataagtctgtcgggcgcttggccgcctagagaggctggaacatgggaatcgccgggagaattacattcgtgcaaccggttctctcctcgcaaccggtatacctcctaaccgtgctagaagtgcacaacgagtcactggaggtcctagacaagcagtgcaagcattatttcctccgggcgggatgtgaaaaccttatgagaggaaaatcaaggtcaactcgacaaaaacctactcccccatcgctaatggcgccctaggagtgctcgacttggtgaagttctattgacggaaaacacggcggtctgaccgatgacatcatgctggtcggcctctgggtgaaaaacccgagccgccagagccgcagctggtcagaccgagccagcagcggtctgactgagccttggccggtctgaccggccgctctatggctgtctgatcagtccccgtgtctcagtgcatttaatgcattgcaacggctagttttctagccgttgtaaagtagtcaggtctgaccggaagtgcacttagttggggattttgaccccaaacggctagttttgtgagtgggagtataaatactcccccaccaacaacaaaggggctctcttggcacttgcttcacttacatacatcccttgcacactctctcacccactccagtgcttgtgttcatctatttggtgtgattgagggttgattagccaagagtcaagtgcgtttgcttcattatagagctagtgtggcacttgatcatctccaagccaggtcatcgcttgttactcttggaggttgccacctcctaaacggctcgtgaaggtgtttcccggtaacctctccaaggagattgtgcagaaggcccggcgcctgttgtgagtggtttggagttcaccaccttcggagtgaatgaagaactacccttagtgatcaaggcttgggtagtccacttcgtgggctgactccctccttgcccaccccttgacgaagagggcttgaggtggcttcgtggttttgaacggtgaagttgggctcgcctagaaaaccggcgagtttctgaaccttgggtgataaactccttgtctcttgtctcatttacttattgcatttacatttgtgcaatttactttaatagagacatatttgagcccatatcaccctaggattgcaaaacttaacttaggtgtgcaatttactttcacatagacatatttgagctcatatcaccttaggtttacaaaacataacttagttgcgtaattaactttgtacctcaccaagcctagcaacttaggttagttttaattatgtgtcgtttagttttaaatcgcttgttcacccccccccttcttgtcgacatcttgattctacagggtcagggacaaggaggaggaggcgttgttcccttcgcgcggcgagggcttgacaataaggctgttgatgaggggggcgcaagtgggggaaggtggcggcggttgctgcagcacggtgtcggcgtcgatctcggcactggtggcgggggtcggggatgagcacgccgctgccacggcggcatccgaggaggaggaggcgtcgttccccttgcgcggcgagggcttgacgacaaggctgctgaggggggcgcgagcgggggaggcggtgttggtctcggactccagcttcggctccggcatcggacttcctcgctcccccgccgccagcgtgaccgctcgcctccgccgccgccgctaactaggaggcgtcctgctgtgagtctgccgccacagcgttgctgcttaagcccgccaccctcgcgccgccgcttgaagaaacgggagatggggagagaggaggaagaagagatagggtgagaatggcatgtgggtttcacgtcgcccccaccattttttattaacttttttggtgtaactgacatgtggggttacaatttttattattttctaaatcaaattgccacacaagcaccatgtcaaagctacgttatatgaagaccgagtcaaattagccacgtaggcgccatgtcagctaaaactgtcatccaaaccgtcttgggacatatatattgtaccggttttgatatttgagggacccgttgtatctggttttctagttgaaggacaaaaatcggatttgttgataagttaagggaccttagatgaacttatttcgtaaaagttcggatcgtaaggttccaaaatatctcggcccggcccatcaaaaaactttgagcaggcaagtgcatacgtcaacctgggcctataaagtttaatgggctttgacttggaagacccttcctacccaacccggcccggcctatgatttcaccatccttctctgccatcgaccggccacgctcccgctccgcacaccgccgccgccgacgacgaccgccgcgctcctccacctggtgatcccaggttagcgatctgtacgcagtacccaggtatgcttcgttctctgttcgggccatctttctgcctctccaaacccctctccggacagacggatcggagggctaatacagaaggagaaggggggcaatgcgtgacggagatggggaaatctggttttggggaataggtgtaggtggcggcggagagggtgatagcgatgatcagtatctaggatttccagttcgacggggagatgcagccttttcagaagatgtaaactttgcctgtgcgaagactggagccagaaagacacacagcatatggtaggttaagtggtcatcagttcatcagtaggattcagttcaaaggatgattactgagtgcatctcattagctttgaaatgtgtgtttgattaatttggatattggcacagtgggcaagcatcatgcttccattttattttcccttctgtattctgaaactaacgcttagcatatgttcttgagttcttccattttattttttccttttagagctcataaccattattattcgattatctatgcagatatctgttatgaataattcggatgccttgaaacgcctttatgtaagtttctcgagataccaagttggttttatttatctttttaaattacaggaaggaattgccaacagagctgtttgagaaacacgtatcctccctccaccaccaaagtttgagtactattgattaatctgatccaaagtttctacatagtatctttcttttctttttctcggatggtgatctaatggttgggaaaaaaaatgacaagtagataatagcaaaatcagtcatctgatcaaaatttcaagtaactcaggctccatttttcttttcgaaactgaccaacatttggttgggattatatcatactagaagaaagcaaagactacataataacaagaaggagtcagtcttcttggcacgctcctgccaaaataaagttgcaacatattactgcgattactcaggaatcaaatatcaaatatcctcgtcatcgccggttagtaggcttgccagtccttttaacctcctgtttaccatgcccaagtttcttcgtgatccggtcaatgatgcgtgccgttgtggattcctcatcacggaacactctatcgtcccctttctttccaaatcttccaggtgatgaagactgatgtggatgaacatggatttaaccccattcttctcacttccacagtaatttgcagttcctgaactcccaagtaattttcagttcctgtactccactagtgaaggggatttcactcaccaattttcgtcgggcaagcttaggggcccagccaaactggtcctatatatctctctgctcttaggccacttctattttctttcattttctatgaagtgcccattcttttttccgactgaataaagcttagtgcagttggagcaagggcactcttatcatgccacatggtgatagatagtggtgtcacaatcgatttcctcacaccccacccagttctcagccatggacataaaagagcagctagctagtagcatgatgaacacgagaattaagaattatatagatactgctgctctaccaccctctttggtgcacgttattattcagagttgaaacgaccacttgagatcaatcccttttggggttttttttggctccatgataaagaaagagatcagaaagcactgcaaaagtgccattcatttcgtgctcgttgatcggtttcgttagagcaggtacaatagcaggctataagccagctataaacatattttaaagagataaaggaagacagagaagagcagcgggctacagatctgtagccagctgcagcacggactacaagacgtaatatgtgtatgacaggtgggaccaagtattaatagtatagtaagcaactattgtatgaattggctattacattggctatagaagatttggagctagtagtgggctgcactattgaccttgctcttagagcaggtacaatagcaggctataagccaactataaacataatttaaagagataaaggaagagagagaagagcagcgggctacagatctgtagccagctgcagcacggactccaaaacgtattgtgtgtacgacaggtaggaccaggtattaatagtatagtaagcaactattgaatgaattggctatagataatctggagctagtagttggctacactattaaacttgctcttatcgtgctgcacgaaaagcgccatggaagaaaggcaccatgagcatacctcgatcgcccaggcgttggttttatcagtcgacctgcaatttcagattctctgaacctttctggccggtcgaattctgaattgtctccatacggccatagtggagcacttggattcgttggaggacaccggccgtttacttggtaaacagtcactgctcactgctacatatgccaggtaaccctgtgtgtgtagcacatgaaagtaatggagtctgatctgtgtcactgtgttctgtgtggcctgtttcaggaaatgaccttggaaacagtctcttatctctgcgaaaatccaagaaaaatccttagagcaggtacaatagcaggttataagccagctataaccacatatcgagtagaaaagagaagagagagaagaaagcgggctacagatttgtagccggctgcaacacgaactccaatacgttatgagtgtatgagaggtaggaccagatattaatgatgtagtatatttttatagataactattgtatgaataggctattagattggctatagatgatttgaagccagcagttggctatactattgaacttgctcttagctccaaaatggactggaagtaccaagaggtaaagcaatgattggaaaaaacttttttttttgagtggacaatgatcggaaaaaacttggcttattattactgattttactactccctctggttctaaacatgagttactttagtcttctcaactccttcaaatgcgaattactccagaaatttcaagtcgtttaatttgtttacgctattctttcatccttgctgaaaataatcgctaccactcttgaataatgagtttagcatatatttttactactacactttgatcctgtttgggggagcttgtcccagctgcagcttttcccaaaagctgcttctgctagaagctgccctaaacagtccacatcttctgagaatctgtaattacaaattctgaaaaatgaactaagaacccagaagctggagaagctgggtttcagagcttttctagattctcagaagctggctaccaaacagctgcttctcagaatctaaaaactcccccaaacagaccctttgaatccaagctattacactttgaatccaagctattataccagattgtgaggttaactggccttcaatttattctttggtgaactggtggtgtactgcagatgaaacctcaaacagagctgttgatgtgctgaatgtgcttagagacccatagactggctctgtggagttggaattattttgttgcacacgtttctacgagtgacttctccacgtactccctccgtcaaaaaaaaaaaaacgacaaaccctggatttccatgtccaacgtttgattgtccgtcttatatgaaatttttttataattattattttcattgttgttagatgataaaacatgattaatattttatgcgtgacttgtctttttatttttttttcataattttttcaaataagacggacggtcaaacattggacacggaaacctagggtttgtctttttttgggacggagggagtagtcctaccttttgttttgcaaggaaggccatcatgtaagcaatcatattaattcttggaaatggtgatgtgataacactatataatcaagaatcctatactagtatgaggtaaacggtgatgagtcagctttaagccgaagatactgggattgattccagaatatgacgatagtccaagagaatgtgattatgtgatctccaaaagatggcacctcatggtttagataagaggagaaaaggtcagaaagtgacagcagccatgcattaatgcatatgaaaacaaattaacggtgaaagattacttgctcgatctgcatgctagcttaatccactgacgtaattgtccatgcacatcgcctcaaaagagttccaaaatcaattctttcctatggtgtaagctcacctttatccatatcctgatgacatgtcaaagcagcagaagatacaggcatttcagctgctgaaatttaattccttccaatacagaggccggcgatatgtaattccatataaattaatgaagaagatgaagatatgtgttggctttcagcagagttttgtacagactacttctgtttgtccacatccctcggatggatcaagagatccctgaatatttttatatctcatcttcagaatcaataatctccatgaatcctgatcagatcgaggtcgcctatctggcaatgattaacccgtacgtgacagacgatacagatcgatagcttccatttgcgctttcctcttctcttcctccctgaactgaactgcgtatcacactgtcacagaactgaactaaactgggctgaactgcaagagaagtcaaaggccagaggcctctcagtccagccacaagatgcggcgaagtttatacgctaagatcacgcgcgctgtggccccgtacgcatgtgcatctcatacattccgatccactactacttgattaagcatatgtttattatcatagtatcatatacagtaaataattatataatacctccgttttttaatacattataccgctgacttttgtcacacgttttatcattcgtcttatttaaaaaatttacgtaattataatttattttgttatgagttgttttatcatttaaagtactttaagcatgatttatattttatatatttatataaaatttttaataagatgaatggtgaaacatttgtttaaaagttaacgatgatatttattaaaatgagagggagtatgtatgtacgcagctagctaactcgtggattttagctgtgctgtcgtcagttcgatcttacagttgtaaagcacacaccattgttcccggcctgtaattaacctgtgaggcactagtccccgtgatgagtgccgcaagagatgctgagattaattgctgctacgagcataacatgcctggtattggtcctaacaagttaacaaaaagtgcacatattaattagcttttgaagccaggggagaaaaagaaataaaatgcaggtattttaggatattgtactatatattaataaaatgcaatggaggctatcagaaagctagctagtgatggggataagattacccttcatgatcatttcgctatcggaatggccaagtagagagcgccactgcaccatggtggatctattgggtgccatagaatggcccccaccaaatccgcaagtgcagtgaacgtaaacattctcccctcttcttcagggaacgcacgcctgagaatacaaccaagcctgtcagaccagagcaaagatcaactgatcaagcgtgcggcaaggaagaaacattgcaatcctagcatactcctctggttagtacatgaattggtaaatgcgcatgtaggtctcggccacggttttacttcattcgctggaacgatgatataggcatataggtgtttctttttttattaagatggagatgaagtccatgcccgtaaatgataaagtcgttagcatataattaattgagttttaattatttcaaacgtgaaaaatagatttattttatattttaaagtaacttttaagtttttatataagacgcgtattctagcagtttgaaaaacatgctaacgaaaaacaatgaaaaatctacatctaaattagaaaaaagagaaaagaacgggagagtatcaattttgcatgtcaatctaattaatttcctcaaataattttcttaaatatggtcacctcctaatccatgtccaaagctgccctgtgctaatccatgaagaggacattgcagtgtcctagagagtgcatttttatataaagaaaactaactgtattcaaaccaatttagccagtagatacagacatgcattatttcatttatcaaagggaaaacacataagtgcacacaccatcatacacatggcacatcgaagaatgtgtctcctatcacatggttaaaaagagatagagattaacgacgactctttaaccttactgaaaagttttattgaaaaatgcatctgtgtatgcttaatttatttttctctatttcgaatacttgactgtggtgttttatatccataatgtacttattttttcctattaatcaaatattcctttgcttttgcatcttggaaaagtgagagaaaagaaaaggggaaattggtgggtttggggaaaatactcacacgcttgctgaagaaaaagtgatggcaggcaaactggaaaagtggtagccatcgaatgcctgaggatatttgcctgccaaaagtgccaaatgttttctcccgataacgccctcggacccataaaaataagtgcattatctcttttgactcttttaatagatcagtccccaagaaacattggaatttgcagatctaaaattactttccaacgtcttggaaaccatctgagtatacaatgtttcatacgaataacatcgtatatgcttcactaaaacattttgaggtaaatattcatttcttgcttaatttagtaaggtaggagtattagcctctcaaaatgaaattgggataagctacaggttataagttataaccaattttaaatttcaggattactttacttttttttcactttcttcgcttaatctcaacttctaaatttctataaaaaggttttgtcttaaaaaagtcattcctgttgcttcaatcatatcctttcgcagtatgggcagccacgggaaaaaagacgccggacaaaccttgagcttctatgctaaatctttctactcggtctatttccaaatatgtttaaaatttctcataaccgttccgaatttaatttttgttcctccttaatctttgtgaagaacttagaggggtatatattttaagggtctattcattttgaagaaaaaccaaaagatttgggttcctaagaattaactcttatgagtatcattcggttcataggaatatactacatccgtcccaaaaaaaaagtaattctagtttgtttagcatatattaagattttataagaaagactataatgcccttattaaatgatgtataggtaagagtgagagggtagttaagggtaaaacagagagaaatttgagtgagaagtgattaatgggaccattggtactttacagtgacaactatttaggacagattcaaatcctagaaatacaattattatggggcataggtagtagatatagaaaaaccaaatgaaaattttctttccctatagacaaaacatagcaaatttttcatccactcaaacatcttgaaaaattcctatgaattaaagtgtggcattcttattcctccactttcctattcatatgtgttaaaattcctccaaaatgaatatcttatgatggagtacatggaaacattttgtaatttccatataactaccatgggcttctgtgaaaaatccatcatgtataaataacctgttctctcccattccccatcctctcctctgctctccatttgctcgcggcagattgagtgtgcccgtgtgagatagaatctttttgcccttcaaaaagagcaaagtggcagtgcttttccctccggttcctcgttttggtagtattccattgttcctattaccacttcccaacgaactaaccgaagccccggatacaacaaaagagaagacgcaaaggaatcatcagaagcagcagcagcacgcgaccatgggcgacgccgcctccaaccaacctgtaagttcatcttggtttttgccgttttgctttgtgtggttcttcgtcctgattaattgcgagaggtgaacgagttttttgaccttgtgtttactggaaaggatggaggattttgctttgtgtgttttttgctgaatttttttgttgggtgtttgcaggttcttgcggcgagcgatcttggccaatcgaacttggacgccggcgccggcgcgggagcagtcggcggcggcgggttcatcgccctcgacgtcagcgccctctcctcgctcgccggcgacggcccggacaccacggcggcgccaccacggacaccggtaagttggatagacgcgagcgcgcgcggcgatggcgacgtcggcgatgtacaattgtacatacatacgagcctccgtttcttccgttcgtttccaaagatttgattgattctttcctctttgtgtggttatgccgcggacgcgacgcaacagaaggtggtgaggtcgctgtcgaggaagggggaaaggaagccggccgacggcgacggcaatggcgccgccggtcagtccacctataaatctcatccaatcaaagatttcatcacttttgatatcaatatcttcagagttttctattttcgcttggcatttgttgggttttttttttcaattccatggagattttgtaatactcaattcgatcctgacagtgacagatcggttaccttgtcacaggatttagctagtaatccaagctgacaagtgacacctatggcgaattagtttacgtacgggtcaggattaatcgaggccgtgtgtgacttttggcactctcatgtgcagggacaggcaagaggccgccgctgtcgccgctcttcgtgcatgtggcggccgccgacgacatgggcggcctcggccggctcgtccacacgccggtggccggcacgccgggagggaagtcccggcggctcgggcggcagccggcggcgccgtggctcgatccccggagggtggtcttcttcttcgccacactgtaagtcaactggcaatagccacttatagcaaattttatagcagaggtgatactcatctctaattttgttcacgtcatttacttattattaattaatacaacaaattatctctaatacacttgctccaatttaccataatatttctttctttatttgttttcacttaattcattggtctgtttctcttatttctctgtaagtttgtatagaatttgtccggatgacttctcctttttttcccttctcttttccacttatcttttccacctcatcatgtgatccatagtatctcatagtatcttgatgcaagagctaagaagtccatagtacttgctctaatcatttacaagtgataatactgatagtataagaaaaagaataagttcaaaacggtaaatatctgaataaaatatttacgagttgtgcagtttcccaatagctagaagtagaaccatttcttttgagctgctacaagtacactcttgctaatttcttgctagtgattaggcgaaaaccgtggtacttaaagaaaaataattgacgaatttcctaaaccgtagggcacaagagtttaattgtcctgttgtccccaacaacgcaaaaaaaatgtggaacatggcctcgtattagcggctgcattaatctgcagccttttcagatcgtagtaggttcgctgcgaccggtggatgaatgaatgggtgatgcgtgcaggagtttgcagcacaaagagcggccgggtttctcgttggcgagtctacgtgtcagaactagttttagttgtcagctccggtttggctacagcgatatacgggagaaaagacggcgactgacgaacaaccgttctcgtgtacagtatgatgacccttgctttagaaaagaaaatccttcattttttgagtgacttttggacaaggtttactgaacctttaaaagtcactgaatactgcttccgagcgattttgttgataactgtgataaccccttggttacatgtgttctttccccttctttgccaactcaccctttttttttccacactcatgttatggaatgatgtgttttttaaaaaagaattataagaaaattacttaaaaaataatattaatctatatttcaaattttcttatattaacacttaattaatcacgtattaatgggtaacactgttttcgtgcgagaaggtgtagttcctaagtatggaggtgaacaattttagcaaactcaaccttactgacgaaaacagtataaagttgaacaattttaccaaaaagtttgacttctggtttgatttttttattcaacttgactagttatcgagcgatttatcaatgtgtacctattcggtaaatcagataatggagcggccatcgtcacatttatcaaccctcctttttttggtttggtttggttgatcttgtaggtagaactctgaatttacgaaatcgtttcattcatcagtactgcactcttcagagatggtgaatgctcatgtaggttttctgcttttctgcaggtcaagcgttggaacgttgatcctgctttacttcacactctccatgagcaagatgggcggcgacagcggcggcggcggcagcagcgatgctcggtgaaacgccggctgttgaaactgaagaaaaattttcgttttgttctcaaacctcaatgcaatctgtaaaggaggcatgatgttgctacaaagacccaggcatcaaaaaaactgatgctcttctaagggtcaaggaagaatatagagtgaatggcagtgaagagatcaggctgaatggggtctgatggtgaagtatgcgatggtagttgcattctcttctctgttgctgtcatgatttcttcagttatttttctcttcttttttttgcataaaaaggggtacatcatacatgtcgctttgaagcgatgatactagatttttcatccttgatgttgttgcagacacacaaacaatcaaaaatacaaatggacacagatgtatttgaaagaattgtcttttactcatatgtcatttccgtaagagtggtagtacatgacttcaacaaagagttaaacgaacgaacaaagaatatgacacacagctcacaaggtggtgatgatctacaaaatgaattaaaaccctctctatgcacaggtgatgctaacctaatatgggacacgtgaaaaatgccggatagtgggtagttttttagacttttggattcacttcacagctgcagaatagacttaaaagtccctagcaaaaatcttttgatactcaacgtgagtgttaaccatctctgacagataatcgtagattctaattggagccaccctgcaagaacagaaacagatttcttaagatattcagctcaatgcagacaaattcaggacacctaccttagcaacctaaaatgaacgcttttttttcagaagatttttcaacacaatgaaaataacaatgactatatccggcatttttcaggatgcaaccatgcagttgattgacagccacagctgccattacatactactcaggaaatagatgataaacgtatgtagtttgccatttgaaaagactgaattgtgaatttattcccactttttatcagacgcaaacatagtatcaagtgtgcaacaaggactatatctttggaacattttccccttgagctgctgctgcaatttccatctaaccagatttctgatcagctcaaccagacttcagtgactggaggtatggttcaggatggccctggtctagcagacaaactacaatattggttgaagcacatcttaccagagctccattctggtacttacaaccacatatccacaagataatttgcgtagtgcgaaaagcagccacaaaatagatgtcactccaaacaataacacccaccggaatgaatgcaacatgtgtcagaaaaatgatagggaaataaacaacagaaagaagaaaaagaagagtgaaagtagcacaggttagtttcaactttcaagtgtcctaattggaaactagacccactttcggcaacttctaaaaatccctcctgtctaatccaagagtgattcttcaacaaaagatcctagtggtcaaaactagaagacatcacaatgaaattcgtcatggaggatatctatatcttgtccacatgtaaacatatttactgatggctacttatttctctgaaagcattatgagtctagtttatctggcaaattttggacagtgcaacctagtgttttacctgattaattagcaatgaacttatgaccaaaacaatttctgctgttgaataactcagacaatgaaatatacatttatttgctgtgcactatgccttattcatttagatacagaagccacctagaaggtggtaacacaaattaagagttaataaaaataagtgcgggctaaggtactcttgacatttatcaaaacacatgtactttacaagacgcagaagagatagaacgtggtgctagtaccgttttgatatgcgtggcatggcgcacttctgtttcctatcatggaatatcctcacaacgacagcagctgtttcctctatagcttttccagtgacttctgcacaaacacaaaacaaactacacttcaacatatgaaagtacaaagaaaagtgtttccacaaagacaattaaattgatcgtaccgatgactggccatataggatgctgggcgaaaatttgattggcatgatccaactcccccctgacatgttccatttcagcataattgcttttttgcccatgaaatcctagagttttggcccttgccttcctgattgcttgaagaaccacagggtttattgtcaatccaaaaatcttgtcttgatcaatctcaaaaagggactttggaagattcactcccattacaattggaacatttgccactttataccctttttgagccagatatattgacaatggtgtctttccagtacgtgaaacaccaacaagtacaatgtgtgcacggttaaggttctgtggctgagcaccgtcatcttgtttgatggtaaaatcaatagcttcaattcgtcggaagtaatcctcagtaagttgacccttccggctaggagaacttcgtggaattccagatggagcaacaccaatatgggaagctatggcttcaatagtaggacgaagaatatcattggatggaacaccccaaagctcacaggccttcttagttgcctcagccattgaaggatcagcaagagtatataaaaccagtgctccttcttttgctgcttgctttactatctcaataagtctatccatgtcatcaatctaaagcaaatttgtagcaaaagacaaaataatcaatatcaagaaaactacacagctagcttcatttatcagtcaatgcaagtgcaaattagggtcagtgactaatacgcgaggtttctaaactaggaaaccagaataactccttttgtgcaatagtgattcaaccagacatacaatgatcatggcaaattggcaataagcacacctccatgcctgaatatccaaagtactatggtattcatttgttctgtgtcctaagatacgtgcaaacaagtgaacactaaattttcaccgatgaaacaaatagaagtgcatgaaggagtaaccaaccattcagttctcaatttacacaacttttagccatacacaactccatgatccacaaaaatgtcaatgtctgcatcactatttaataaaagtatgccgcatcaatattcatcttaagttccatgtggaaagtctttcctccattagagcacaagcaatttgtgcttctaactggaaagtctttcctccgttagaacacaagcaacctgtgcttctaactgcgagcatattttaatagcagccattatcatctagtagtgatagcatgaaataaattttatttcttccattctcaaacaaatataatgtgaagtaatcccaagtactcacacgctactgaccttactctaaatctgatctataaggctattaaaacaagctgaaaagaagcaggagacttatctccacaccattgattatggtgtagattaatcagacatatatatacagaacatcgctcttattatacaattgtattttcagagtaaacccaagagttgtataacaaataaaattatgctttcaattaaactatagtctagcttgtgaaagaagattcagctggttcttcgaaagctagatgctgataattaacagtgaaatcaagtatctcaaatccctaattagccaatcctgataatgtacagcaaggcaagggacaggtatgcagcaaccagtccgagagaataaagtgtacatgtgcaccgatcatcggtaaaggataacagtttatgttatacagcacaaatctacagctaaaatccaaaatcccctttattcccagaacaattgatatagtttctatgcactatgttggcatatcatgattttccagcaagaacgaaaaaattaaactattgtacgaagcagacatatctggctggacagtggagaccatatatatcccaaaaattgaagaatcaagtcaatagagggcggcaaaaaaaataataaaaaaaaagagacaaggagaaagaaatggatctttaccccgttgaagaggtgtgtgttgacggcgcagccgcggtcgacgaggcagtgctcgaactggccgagcgcggcgttgacggagtgctccgccgtccaccccgtcccgtcggacaccatgtagatcgacttcgccgcctcgtccctcccaaccaccccgtagccatcctcctcctccaccgcgaccttcgccgccgcggacgccgcctcgtcggacgacgggtgcggcctggtcggggtcggcggcgacgaggccccgccgctgccgcggtcccgtatcgtcggccactccagccgccgcccggaccggtgcgcgcgggcccgcgaccaccggtgcagctgcgagctcccgagctgcgcgggggagcgcggggtggtggccgacccggaccccgaccccgccgcctcccgctccggctccttgtccggccccgggctcggcagcgcggcgggggtgccgggcgtgcacgagggcggcgtcaggcggcggccctgtaggcgaggcgacggcgggaggagcagcgacggcggcggcgacgccagcttcgcgcttatcatcgagccgaaccgcggggacgtcgacgacgacgacgacatcctcgattcccctactgagcttgagcttactacgcgcgacgaccgtacgacgaggagagggattttttcttcttctcgttttcgcttcgtgttggcgacgagccgacgacgtttgggtggggttgtgaggcgcgcggcgtttttttatggccgagacgacggtgaaaagagaggaaaaacgtgggacgccgaccgggcgccaccggggttggactcggcgactagcggaatgaatagaaatgattggtgtttcgagacgatcgagctggtttttcggcgtctgctctgcttgccgttggaatctggtctggacagcgtgcgtttgcacgggtcgtacagcggtggtggtttcgttctttgttttggcctccggcgtcagtgcgtcagcccgtcaccatgttgattggatgcgggtggttttatggatcttcagggaatcagggctctgctccgctgatacactcgtcgttcatgtgttctctcttccacggctcgttagatatggatacgcatacgcctgttctattggagagtataattggacttggacccacatatatgttgtttccgtgattcaaaagtcatgtaggccaaacacagttgtgacagagtgaagtttgtgatgttttttaataccaagtataagtgaggtcctaaggttgagtattatccaagacttagtaattcgatactgtaatatataacttaaattttggatccttttatagtacacttggtggtagtagtatagtataatttaaatctaaccattgatttatcttgtgttttttttcctccatcaattaaaacgtaggcatatttttgccaaagattttagttgccgatgttgccgctgaaaaattcgtggccggagaagcctcaaccctgtagcagcatttgtgcgtttgtggtaaaaatatggctgaatgatgtcggggccaagggtgttggcctcgtttcttgtgtgttcagccgatgactaactgccgcgtcagagactgggtcatgtgttgtctcttatcatttttctcgccatctcagaaatgaaacgtcttaattaggaacaaaatatcttcaatacaccaactcagcaagcgtgagttcacggggtatcaactgttcgtcaacaagttaattcatatacatccacataaaatcaagttggtatgtattaagctgatggcaagatctagttgcgatggccacgatgcgtcgaaccagtgatatggtagtcgacggcggtgcaagagcgacagctgcctgacgatcgacgatgttgacgcggattctatcgaatcaaatgggttgtccatcagttccatcgtcactgttgcactctcaatacgcagtttgtgcccggttccatctaaccaccgataatatttagtttttctttactattttgtacccatgctcatctctactacacatactacaagtgggatgtagaaagagatttagtccatttgattgaatcgagtggacggcctatattcctccaagggtatctttgaaatgtcctagatttcacggtagctaagatgacagtatccctagaataaattatcactacaccttgttgattaataattcaataaataaataaatattgtttgctatgtactactcccccgttttaaaatatgtttctgattcgtagtaaaatatagatacatatatattttagaacggatagagtatgtattgtgccaaataaaaggtcaggaagcaaccctgtgtattttccaacctcataattttgcacatttttctcttaagtcaataataatttatgccggtaaaatattttaagcctagcattagtacataaatacatcaaggtgttgaaagttgtagagatagcccctctaactccaagactccaagagtatattagccaagtcttaaaaggttcgtattcctaaatatgttaattcttgcgtaaaatacaatctatattatcgtacaaacaataatattgtgccttacagttataaatataataatgtatagttttgtcgcccaattgtgacaaagaaggaattctgtcttaaaattttcagtaaaaacaaaacaatgaaaaaaaaaatcttatgctgccgctgaattgagctcttcaactatgactacgtaatgagctgcagtaaaatataacagtggcaaaaaacaaaacattatcacctttgccggttgcaattgcataatcagtatcctccttttttctcttttctcgattgcgcccgccctgccaaagtgccaagtgcgaaggttttactactagcggttggcacacaggatgacgcgtagtacgtctccggtcatatccaactcctccgtcacgagcttacaccccccaaatccccaatacctcaacatccctctcgccagttgaccaagacatttttccagcaactgatgtcatgacaacatcaggtgaagccacgaggatatcatcggtagcctggccccaaggcaacaaagacttgagccgcatgcagtgtcgacggcacagaaatctgccgcttcttctgccgcgttgcgcccaagcagcactgcagcagcagccgtgttcgcctgcaggtgagctcacacgcgggcgccgtacgtggagcgagtcgcaccgtttctgcggcagtcagcgccgagacctcgcggagacgcggacgcgcgtctgaaaaccgccaatctcccgccgcccctgccgacctcagcgcggcctgtggatttgggaggaaaataatgggcgcagcacgacgatttcggccgctttctgcctccgcccccgcccccacacacaccgaccgcgatcagcggcgacgtccctatcgcactactagtacgtactcctgcgtggcatagcgccgtagccattgtttcggcctgctagctgctgtcatcgcctgatcggtcgccgtgtccacgaaggattgaggttaaatgcacggtctttttatcaaaaaatccagtgactttggccgtatttagttgttttgataaaaaaaattgacgtgtactggtaagtatttgaagtattaaacgtaaactaatagcaaaataaattatagattctgtctataaattgcgagacgaatctattacggaaaagtatctagaacttcttccgctggcccttgcctaaatccgctatatatttgacacggatttgccgtaatgctggaactatggcgaatgcatctatcgtcattaatgcataaataaatataccaattagtagtgattgaattccttctatggttatacatgagaaaccagtacgaatataacctacatgtccaatcgaactatgagctagaggttttttgactttcgtttgagctatctgctcttccactgggagagggtttgattgggattgtttaagcaattctcgtaatcgtcgaccccttgccaattgattctgacttgttttatcgagagcagaggcgaattgtgcaaccgttgttatatcgctcgataatgggcatctcaagccttttccatttgaaggtacgaatataaaaggactatgtcaaacctacgaaatagagatggcctacaaggggccatgggattaaacaaagagaggcaacttatgatcaagaagggcattagtgactattttatcggtacctgccggtgatgatttgagaataaataaagaagcgattgaaacaactggcgagcgaatgtttggatcatatgctgccttgccgcctaattaatctgtcattagcaaatgtttactgtagcaccacattgtcaaatcatggcgtaattaggctcaaaagattcgtctcgcaatttacttgtaaactgtgcaatcggtttttttcgtccacatttaatactccatacatgtgtccaaacatttgatgtgacggaaaagttggaagtttgaaggaaaactaaacacagccttcaacagtagaggatcctgatcagtccatgaagacgtcgttgcatttgcctatgatccgcaaatgagtgtagacccaaaaatgttgtcctagaaaaatatgggaaacaaaataaactagtatatgttggtatatatatattctccctgtctttttcttttaatatgattaaccttttttattttataaagaatactaatatacattatttttttaccaggtactaatatacattattatatgctcgagtttaactcgagctcgaaccgagtttgcttgaaaactcgaagatggattgagctcatctcaagcttgtttcggtgaaaaccctagtccatggccaacggtgccaacctacttctcctatataggttcagtcaaggtgcatgttgccgtctataacgttattttgtcgtaagtcaatttcgtaggctatattcggttgcaactgctacaattcagccagcacacctgttgcgctgatacaaaatacaaaactacaaagtcatcgtcgtcttcgttacaagattgttctacctcataaatttcggtggttagtggcacactcgcatgttaacaccacttttccttgtatcctaattaaggttgtgttctaaggtgagggttgggaaccctcaccctagcatacaaaatagagtggtagattagtacataattaattaagtattagctaaaaacttaaaaaaatgaagtagttgtataatttttaaaaacaacttttctatagaaaattttggcaaaataagacatcgtttagtagtttgggaatcatgcgtgtcaaaaacgagcaagaggttgggaacgttcacatacgaactcagcctaagtatcaccacccaatttatcagtctttagtacactttgttagccaattacattgacgatttggaatacaaaaggaaatactagccatagacctcgccaaaaaaaatgctataacaacaaaaaaaatcttatagaaacttcataggactgtcacagaagaccgaaaaatgattaagttctacacggaacaagtaaattttgcaacaatccaaacagggttccgttgcaaataacctcgtagggtggcaaatgccacaacatcaatatttgcacatagatgtgcaatagttacatgtacgcacgtggtaatcattttaagctaacactagtacctctcactaacaaaaacatccccgcccactgatttctaatggagattagcttatttcttttcttttagaaaaaagttacggttgttcagaaagtatctcaagatacctaaattttacgctaaaaaattatagttgaggaacattacttagaggtatcaaattttacactagaaaatacattacctcctagtaaattgtatttaagatacataaatttgttcggtgggtataatccagtacatacacgaacttgttagaaggtgcgtgcaaaccaaaaccaaaagaacacaaggctaatcttgccaatttgagtgttaactaggatactacataaacatgtacacgagaaaaatgctacgtagacataaatttgtccagtaaaaagtttaatgcggcctaactattgtacagataaagacataaaaaagagaagcaatgcaaagatagaataaagaataataaagcacaaatcaaattgttatatcatgtctcatgccaacctatatgtatacgttgtgtcctaataaacgtttaacttggtaaaattagccatgacatgtccttttggttttggtttgcgagttcatacaccaaaatacattttacaaatttttatactaaattatactccctccgtactcgtaaaggaagtcattttggaatgcgacacggtctccaaaacacaactttgacttcttgtttctacaaaaatatttattgaaaagtgatatatgtatacttttatgaaagtatttttcaagacaaatctattcatatgatttttacattttcaaactcaacaacttaagagttattcatgatttatattcccaaggtttgacttaaacattgtcctaaactacttcctttgtgagtacggagggagtatccacctaataagtttgtgtaccgccaatgtatttttctctttttttaaccatagattagctttatctgtaataatggtgaagaaaagtccatttgagatttttctaaaagaaccaagtgatgaaaatccagttttgaatcacctaaaagaaatctagttctgaacctttagtaatgctttcccacacttaaatgatgtgcctcgaaatgatctagaattatctcgacgccacttaaatagaaaatcttggttaggagagggggaatgttttgctccatttcattctaggattcaaattttgtggaatttgatccataaaatgagtttgcttttgccccattttgtatttgattttttttgtcttgattgatgtatttgtaatattgcactacaatgtatatgttatttaattgaacttttaatatttgcctatcttaaaagagcggagtcatcatccttcgatcccttccttccaccatgtgcaacatgcatgtatgtggaacataaccactagattcaatgctttatcctcaaccactctctaggccatccctaattatatggacatgacgcgttacaagtcatggacatgttactagtctttataatattgtactaatgttgtaccaacatataaagtgaaccaacatgcctttcccaagtccaactgaatgcggagtctgtcaccaccaccaacatccacaagctcattcatatccaagccaaaagcatgatgtttcatttgaaactttatacttttctactagcttctttatttcttcaaagtcagtggttcagtattgtggacaaaaagttcaaataccaagtgaagattttttttcttatgaaacacaattgtcttagattgaaaattggtaaatcatatcaaacatttttgtacttgaagtttaagttcacattttctagatgcaaagaaatagacacattgcattccaaacaacattattttgaaaatgctcaaaactggggaggtgtgtgtgcctgacttgaacaagaaggtgaatgagacacaccttatagatgtctctatcctgtcaatttgaaaacccaaaagtattttctctgtttatcaagagacatgatttggttccttgagactacaagagcttatttcatgacaaactaagagaacttctggtattgtagtcttccaatgcacgaattaatcaaaacctttcaccattacttgccttgtaattctgacactaagaaatcagtaattcaagtattatgtgcaacgtggcaaaactattaaattgaaagtacattttgtagtgtgaatacaatcataaacctggatcgaatacaacaccactacatttataatagagtatatgttgaatttgccaaggaaatgaccttggtgcttcatgttttagaagtcaaaaacagaaaacaaaaggaacaaattatacacacatcatttttcatgaagagcccaatagaaatgttgctccaattagcccaatagtgtttttcttgttccatttgttctaggtccatataccttgggggttgtaagttcaagtgccttaatttggttttggtgattaataacaaatctaactatatgagactaacatttttatgagcttttctttgactagcctcatttggatatgaaaataaaaatgatgggaggtatgtattaaactccacatattctaatcttgtatctcttgtggatctaaaatatagtgtgagctctctcatttcttaattaattatgtgcatatgcattctttcatatccatatgtatgcacaaattgagggggaggttattctatattttgtttattgtaatatctctatcttgatttgaaatcatctttcatctcatctccctatattgtttatatcgggttattatccatcaccaaagagagaaaagattgaaagatcttggcttaaacaatttgtgtaattgttgctttggtgatagatgataaacccatgtttatgggattaacttctcctttacataagttgtcaattaggttatttcccaataatgagatgtagtagacatgcattcttttgtgatggaccttaatcatgacaaggatgaactgcatggaaataaagcgatatatatcactttttatctcctactttttgataggttcatatatatgatttccatgttattcgtatataagtgtgagactaatgtttacttgagtcttatcttatttagtctcatttacattaagaacatgaagatcatgaaggtatgtgtttttgtttatctttatcattgctacatgccttcgtgtataggataaactccattggttcttctttacttatgcatacacttacatctcttgtatatttttttgtatgcatatatttagggggagcaaatcctatacatttattgtgaatgttctagatccatattatttgcctattatttatatcggatatttgcacttgagcttgcgtacgagtatatgatacttgtggtgttaatgaatacctaacaaacatattcatatctttcatatgcaaccggttggtcatcaagtggatgatgataactgatttgttggtactaatgttctcctatgaactgtgcaaaggaataggtcccaccgtgatgaggctaatggatgacatcatgggttgatggtcaccaagccaaagacattgccatgttgataagaacgaagtaagcttatgatgagaagaaagtcttaacaaaggatgatcaagacctcggcataaacatgattcaaccgaatggtcataagtgttgatcttggctcaagcattaaccacaagttggatggcgcaaggcaaaggtataatcaagctaagaatgttttcttagtttgttcccggtcttggtgtttggtgtagatcagatttgttagataggcgttgtactatcaagacgggtctatgaagcgagcatgtttcatatgcatgtaggtgcatttggtgggattgtctagctaagtgtaatgagttttcttaagtcccaaacaaagaaagaagttggtacatcctataagtttgggtagcttaatgtggtattctccggtggagtatccttcggagtgtgagccctttctccttgctttaagttgtgtttcatggatggaaatttcatgagttggatatccctttgaataagcttttcatagagtccaagaacgtcaaattccgagacccgagtcaagagatatcatcattttactaacagctggttgtgctgaaaagtgaactgcggtatgaccgcagcccttatggcggtctgaccaatgtgtgttgtctggtctgaccgctgatcctgattttgaaggaggtctcatcttgacgatacagagccgaagacggtctgaccggagccgatggcggtctgaccggcatgcctatggcggtcagactggctagccatcgcccgtgcattaaatgcactgtaatgactagttttctagccattacaatagagagcggcatgaccggccaccccatggcggtatgaccgcccaacacctgggagttcgggtttcgcctccaacgactagttttggtggttgggggtttatatacccattccccagcagcaagggtagggttttggtactccattgcattatcttgaacccttgcaagagctctcacacccttgtgcatttagtttatctagtgaggtgttggagagtgagttaagccaatccaaatgcatttgcttctttgttagagctagtgtggcacttgatcatcatcggcaagcatcctagacttgttactcttggaggttgccacctcctagacggtttggaggagttgcccggtgacctctccaagaaggttgtgtaggaggcccggtgttgattgtgagtggctcggtgttcgccatctccagagtggaggaagaacgaccatagtgatagaggcttatgagaccactttgtggtttgagcggtgaagttggactcgcctcaacggtgacataggaagttggcaagctccgaacatcaggtgaaaaaattctttgtcacttgtcttctttattttgtgcaaatttactttgagcaagtttacatactagagtttatttgcgctattatcaccctaggcttgcaaatctcaacataggctagcttcttagtgcacttgcttgagattagttgatttagattttgaattgtgcaaaaccgttttgatttacgcttccgcatacaaaactcggttttagccaaaagttttaaaaccgcctagtcaacccctctaatcggcctcctatcctacaggggtctcagcccaaagtgaaccgtcacgcgctccatcctctataccctatctctactacctacccgctcctctctataccataaataatccccctccctcttcgccctcaaccattcttcacagccgccgccaaggctctaggttttgtcgagctccttcctttgccataggctcagctcgtcaaatatgtcttagagtcgcgaagatcctcttgaaacgcttcggatggggtaagttcttcaacttttaggtgcttcttttagatctattttattatattccttttcgagatgtattttccaatgatttcttctttagatgaactctagatgattcatttttggatagattcacgggtgacttctttttagatggatttttttagacaattccatttttagatggatgcgattctttgttagatggatttcttagacaacaccttcatagataggtgtttacatacttggttttatgttttacccttttttcatatataattctttcgtagataggtgtttacatatttggtatttatggtttacccacttttctttaggtaatgccttcgtagatatgtgtttgcatacttggtgtttatggtttaaccacttttccttaggtatctttttcgtagataagtgtttacatatttaatatttatggtttacccacttttgcttaagtaatttcttcgtagataggtgtttacatacttagtggtttacccactttttcttagatgattccttcgtagatatgtgtttacatatttgattatttatggtttaaccacttttccttaggtaatttcttagtagataggtgtttacatgtttaatacttatggtttacccttttttttttttgttgtatctacatcttttttatttataggtttacccctttttgttgtatccacatctttttatttatggtctacctgtttttgttgtatctgcatcttttttttatttatggtgtacgcactttttcctcacaattaatgttgtaggagcgactggtcaaccctgacggggtgcttggtgatgctgatcgccgagcgcctactggccaacgacgtcacggactacatccgcttccgcgccgtgtgcagcccctggaggcagcacaccgaggacccacgtgtcggcgacggcctccgccccaagtacctccccaggtcgtggatcatgctggaggagacccccccggcggcggcgccgttccgcaaccgcctcctcaacaccggcaccggcgccgtcctcgccgtcgacgtcccggagctcaaggaccacgacgtcatgggccccaccctgggcgggctcctcacgctgcgggagcgcggcggcgcccacgtgctccgcctcctccacccgttcacgcgccacctcaccgagctcccctcgctcgtcaccatgatccacgcggcgtcgcacgacccaaagatggtggagcccgagtaccaccagccgacggccatcggcctctccgacgaccacaaggcggtggccgtgttctgcggcctggtaaacaaggtcgccgtggccaggcccggcgacagccactggaagtgggtctacgtcccgcacttccacctggagtcggccgcgtcgctcgccggctgcttctacgccgtctcgcacgtctacatctaccagctcgagagcgacggcgcgcgcggggagccgaagctggtgcccgtggcgtacgtgcccgtggacgccccctcgttccgcctcacgctggtggcggacgacgagagggagaggctgatgctgatgaaggaggtgttctacgtgcacgcgggcgaggaggtgccaccggaagggcccgacatgctgacgatgcccagggtgtgcgtcgcgtacgcggtggacatggcggcgaggacgatcgcgctgtcgaggctgggcgcgcgcgcgctgttcatgggcgacgaccgcgcggtctgggcgtcgccgggggcgttctccccgggcgtcgcggcggacaccgtctacgccggccgccccaacaggctcttcaccgtgcacgagtgcggcatcgaggccgaccgcccgctgacggtcgtgctccacacgcacggcctcgtgagcgggctgacgcggcatgccgtgttcgagagcgacgacggcgaggacctgaaccccatgggcatcgtcgagaccgtctccagctacgtcgccagcgaccgcggcggcgcggcgcgcccgaccatgtatgtcgccagccatgcccgccgcggccgtggccgtggcgtgtagttcggctgataactgtggcggtgatgactgatgaggaattcgctctggaatttcctcctgaaataataaaaatagtggttggttcttcctgaaaaaatggcatgctgcgttcgtggtttctgtgaaaaaaaaaaagttccgtatgtcggtatgtgctggatagagtaatcaggtatactgatgatgatcatgatgagtaacagcagcagaaacgttacctgaaaccaggtcgccgtttgcagaaaagcaggaccagcgatcagtagtcttaccgcatagagaatgcaggtttacagggcaccggtgagttcccaactcacgcgcacgtttttcaaactattaaatggtattttttttaaaaaaaaatttatgcaaaagttgctttagaaaattatgttaatccattttttaaaaaaatagtaaatacttaattaatcataagaaaatgtgtcgctccgttttgcgtgcgaactcacctccccaacacagccatagaatgcacggtatgtgcaaataggaagcaaatgataagttctttgtgaagacattatattacacctcaattatgataaatgtcacggaggtactcatatgtggtaagtaaagcaggactaaggatcaaaaacaagatgagtccagaactgcctcaaattaacttgagtgtacatagatactcagatacaggctttcaggtctccactgtgatcccggtggccttcataagatgtttagaaacagagtaatatagcagcattcactcgaacaagtattcgttaaccgaaacctacataaacatgtttgggtctcatatatcatttcaacatggtaatttgacaatgaaagctaaactagttacagatcctcaacatcctgcttggatgatgtagggcgaccttgatactccagttttgtacctaaacttgctgtgataaccctgaatttcagtcttatcttctccattatatcttgaacttgctcgtcttctgggttcgacaacggatagcttctcaacagtgcagctagttgctcaatgtttttcctgacccgagctgagaatgcatcttgatcaattgaaaccaacgacgtccaaacatccagacatccctgataaaaacctagttcttcacctacctgaaaaccattctttaaaccaacctgccttccctcttcttttccagacaccaagccctcactataaccattcttgaaacccgtttgatagtgtgtctcatctaagagtactgatggttcaaggaaatcaaaatcatccttaggtttctgatccatggtattaataagaacctaaagatgttgcagtaaacagttccttagagagggattccaaaaggttgctcagtaagaaaatgtatgcatacctaaatgcaacaagacaaaaatattaatatcaaagaaacgagagatggaaaagtgcaaacagaacttctgctgagttatgaacaaaaatgtgttgcacgtcaaacaaagcaaaacaaaaaaatgatgattcactaaactacgtactctagacgtttgaaactttacaatttttttatgggtatatctaacattaacgtcatgttccacttcatcaagtaagagaaattaggatgtcaccattactattgactttttcttttgaaaaaggttatattgactattgaatgcagtgcgagccaaactgtatgatgtcaaatgttatgacttcaacaagcagagtcatacaacctcacacaaaaataagcactacacaactcattcgaaccatcataaatcccttgcgtagttgtgttggattaacgccaaggttggacagaagataaacaaggtggtagctattcaaacaaagtggtagctaaccttcaggattcaggaataaggatacactatattctagtaatattcaaaacttccagctcctaagtttcctaagcagcacgatcacatttttttggtagaaataccctatattaggctattactattagctttcaatataagctaggatcaacacttattatttaaaagaacaccatgatcactaaagcatagcattaattaagtcttcatcatacctctaaaccttcaattagtatgatattctaaggattgaaatgcccaaaaaggaaataaaaaaaaaggaagataaaacctacgtttctccagctttacagaacagtaagtttccccaaatctcgcttctatctttacgatgctcttggcttctactactaccaaacaaacaaaccaaaacaagatgtaggaaagccataatcacgctagatgtcacaactactcgagaattgaaagcagtcaagctgaattaggagtcatgatttcagttaccctttgctcactaaaaacaaaaaaaacaaaaaaaaagttaccctttgctcagttgctcccggaagaaggcgtcagtttccgcgatacttctggaacacgccgctgcagttggagtccttagccaccgcgctttccgccgcctactcagggcagaggcgaaggccgctgatagcaacggaactgcgctttccccggtctccgcgggcgaaagaggcggggcgccgcacggcccctccgccggtggaccaggcgaggcgccgcagctggcggggggacgacgcggtggcgcggccgctgggcgccgccgctacgaccggaggaggaaggagggtaggagactcacgtgtgtggcggcggctccagcccagtgacctctagatgaagcttttgggtctgatttagttgatgatgggcttttttgggccatggagtttctcgacgtcagccttgtagaagttgataaatgggctaaagcccatatagatttggtggttgggctgcaatcacggttcgcgcgactcgagctctcgaatggccttcgtcttcgtcttctccggttctctttcccttccccatcctcctccccattgcgctgggtaggattccaatgtgggggactagggtttagggtttggagtcaatcccagaccgcgcccatgacgtcctcgtctcgagtaagttgcgttctgtattatcttcctctctctctctctctctctctctccgcgcgtgcgattttttttgggggtgtggttttggcgatgatatgcgcgtgcgattttttctccccgggtgggtttggggatgggaggcgtgattagaatcagcgaatcgcttcagtgcattgcgctgtattctgatcagtgtttttccataggagatttaagattttgttgttgagctgatgtgtgaaaactggtgtattgcttaggtaagggttggcaatctagtccccctcaatgaaggaaatgcgagctcgtcaaatggatcggtgtcaagcattcctatctatctgggtgccaatgttgtagggaggaatcatttggtggtcgtcgacaagagagtcagccgcaagcatctgagcctacatgcctcggcggatggttccattgaagcggtagtggtgagtgtgataaggcatggggatattccaattaactgcgcagtattgttctgatggcttttttttcagaaaataacttgttgttcattggcattggatgtgcaggaaggaccaaatcctatcattgttcgatctgagggccagaggaggaaggtctgtgctcaagagagagtaaagattgcacatgatgatgtcctggaactcatccctggtgaatattttgtgaagtatttgaatgtgggcgataaccataaaagttccacatcaatgggttcaagtgattttaaaaaggggaagaggctctgtgaggatgatactgtagttatcaaaagaaatcgtcagattatggaagatgaggctttggcaagaagtttacaggtaacttaagtacttaacctttctagttgcactgcctgtattgtgcagtttgtttaacttagaagagagcaatccatggttttccgtgtatcatatttccgtttagtctgatcatggcttaatctgggcaatgctgtagttttaatataacataaatgatcctagtgctggacatagaatacttagggcacgtttggatctaaggctagcattagcctagcctggcctggcaaggcccagcgtttggaaccataaatatatcgcagcttctgggggcaagctagccctacgggcaaggaaaagctcgctcgcagtggagagccaattcggctctccttcgacgacaaacttctctttagactaactaactgcccgtcaaaaactaaacaaccaaacaactcagtaaagcaagcctagcaacgcagcaacaacctggtttgcctagctgggctatagctcaaggtgacaaacaaccaaacatacccttaaagaatgcctttaaaagaagggattttccagtgtatattctgataactttatcgtggataaactaatttaaattatgtcagacaattgtttatgaaattgatcagtggctatctttatatatttctggtaggaaaataaagtctttacgtcttaattcatagactccaggctgtgacactgaaagatcctgattcataaatataccactgaaagatcctggtacacttaaataccatccaaaggtgcaagcgtttagaaatgtacttatctgtggtgaatatttatcaaatagtatctaagtattggatgtttggatttgctttctgaaactcagcattggatatgctatccttgtatgcttctgttgtttagtgttggcatattttatattttgcattgtaaaaaatggtgccccttagcttgctgaatattagtttagctgtatgttttctttccttgtgtaaaattaccagtatactattgaattgtagtatagtacattaccatcttagtttcattactatttcctgtcctattccagaaaagctttgcagaagaaagttcaactatttccggtttgggttgtgatcaaatgttaagttcacttgatagtgctggtttttctgagagaaataacgagagaatacactctgttgattatctgaaagatgtactttcattgacttttcggctcatgcgtgtccaaggtcttccttcatggactaatacttcctcagttaccattcaagatgtcatacaggtatcatccatttaacaggagctcttgcggaagttatgtggttgatttcgtttaacatggcgtgccacaacatcttttagatatgatctgttcaggacacaaatgttgcataagaacaaatttcttagcctgctcatcattaccaacatatttgttcaaaaagaaaatcattaccaacacaaactcttgctcatataccatttgtgatttatcactatatagcctcaactcatgtagtctgctgtttgaaagatggaattgttctctagttggaccttgtaaagatttctgtctatattgtcaatggtatcgtgtatggtgggggagcaaaggctagttcttattctgctgatctgttcagttttcagggatactgtgttgcatatcatttcccaaccatttctctaaaacaaatgttctcttatgttcacactctattcatgcattgccagattcatcaaagaagtatactagttcttacatgatgaatgaattattagggtgaagtgcttcttgctgtactctcaaattatatggtggacatggaatggctgcttacaggtgggttattgtggtggaaatcatacaagtaatattgtttgtccttgtatgagggctgcttcctttttaccataagtagtgaccttttttgcaaacaaaataaatttggcgcctctgccactttacagtttcagaagtcagaacactcaatcatgaaaccaactacgatcctgtgctatttatatttgtctgctccttttaattttttttgtactgcacaattaatactaaattctacgtgcttgttggtaagaggaaaagcagtcctttctttgttgctgaaagtaatctgccacatttttttcattgaataagcatttagtttctgccatcctggtagctttcccctcaatgttttgtttgctgtaactattcattggtataattctttttgaagtgaaagtagctgctggtaacaacctaactcatctcatattcttcattactgataaattgatgtaactatattggtcactctctattggtttctagaatcatagtcatttatgttattgatttacctaaattgtttcctgtgcaataattttggaagctcatctttctgagcctctatggctaggattacaatttgtatgtttactagttaattgtaaagcataatatatttgtggaataaaaaaactggactacaaagataagcaaaacatgtacttttggccttttattttgctatttttgattatgattctcatttgtcttctattttccactacttcatgtatctttttgttgacatgcacttagttatgaaatgtatgtatttactaaggagtttggcaaccagcgcccatctgtgttccctatgctatgtggtgaaatatcactgtgctttcttttccagtcattgccattatctacatcctttagttttaatgtaaataacattgcactgtgcagcatgtccaagcttaaggaaagttcgacatgtcctagttatacatggagaagatggtgcatcagtggagcttctgaaggtgacaacattactagagtaattcatgatatttttgtatttcctttttctcatctcatattcatggttgggtgacagaaagtgaagccagccaattggatccttcacaagcctccacttccaatttcatttggaacacatcattcaaaggccatgctgcttgtatatcctcaagggattcgtgttgttgtgcacacagcaaatttgatacatgtcgactggaataacaaaactcaggggctatggatgcaagattttccctggaaagatgcaaaagatgtgaatagaagtgtttcctttgaaaacgatttggttgattatctgagtgcaattaaggtagcagctagcagggcacttgtctttgcttcttgattaacgtatcactccaattgtgtttcacttttttagaaaagaagttaaatgttgttttcttactgatatattttaaattatcatcataatgtgttttgccggaggttaccagaataaaaattaacaaataactgtgcacttctcgaacaatcacagttaacactggcaacttctgtttctactcttctgctactcaataaaaagaaatcatattaaatactactgaattggttcacaaggggatccactgttctcatgttagtaaaacactgaattggtaaaatatgcatatcatgattttgttagagagagatcttggaattgctggcaacatgttgcaaacttatagtaagacagtagctgtctcattgctaaaagcaatgagccatgttaaagaataccttaaaataagtataatgaaagtttcagcaaatcacaaaacatggtcttattttctgtggaacattgtacagagttctgtaataagtacctctaaattggagtgaatgaaaataggatgtctcgggctgtctagcttcgaaaagccccagttcattctaactattacttttgttctagtttaattccctaccgttgcagtgtactaaacacatcttctctatgtatgttgtaatgtattattctcttcatgacaatgcagtggcctgagttcagggtaaatttaccagtggttggtgatgtcaacatcaatgcagcattctttaggaagtttgattataagagctcatcggttagtataatccattaatcttagtttacacttagtgtgcagtgctcagctgtaaacatctcgttttttttttctccatgcaataggctgacatgaaaaagaaaaaaaattgaagtccgctttgcatgataaatgctggcaattacttaatcacgtgatcactgatttatgcttgtgcctccgccgtaaataggctgctttatgcaaaagttcccttttcttcaataaatgaacagatttcatcatcttttagcactgtttttattgcttgtcctacaaagtatttactgttctgaaggattttcagttcacaagaaaccattctattgctccttttgttatccattttaaaatcttatgttggaccttaccagtttggttgcatttgaaattaatctatgcattttttttctgcaccttctgtattgcgtgtttagtgataaagtccacatatgccactgaaaacttgcccaatcctcctattgtcagtaagacatcaatggcaaataaggaatgaagtgatatttaaagcgaaaaatgaggaattgcctcatcattttggcccttgatctttctctccctgttggatgcacaaaaactaaataaactgtacatggaagctcagcagcactcgcaaaaggtctattagttttacatagaagcaaacatactagcacacacaccagttctcctctctcgtgtattcataatttagtctcagctgattttacatcttataggtcaggttgattggatccgttcctggttatcatgttggccccaatattaaaaagtggggtcatatgaagcttaggagtgttcttgaagggtgcacatttgaacaacagttttgcaaggctcccatgatttatcaggtatctttgaatgtgtgagttatttatccatttatcttagcatttagcacaggcaacttttcgaagtgatgtagtgaatgccttaataaccctgttaaggttgaagcagaaatgcttaagattgagaaacaaaaatcacatggtgcctagtttaccttaggaaagaccttctagtaccttaaccctgcactttgtagcacactaatgccattaatagaagctgtaaaaaaatttgcactaatggtcaaaggaatatgtacttagttaatagctgtttcttgttttgtattgcaagaatgagcgagactataaggagtgcgggatatgttatattgtcacctgcatcatcacggattaattggacttaaaatctggcattcatctcccctttctgtttcactgaaagtttatattgtaattttttactcgcctattacttcccaggcttgttctccttaaaggacatttagcattttaattctcttgtatgcagttctcttccttggggtcacttgatgagaaatggatgagtgagtttgcattctcactatcagctggtaaatcagataatggttcacctttgggtattggtaaaccactgattgtctggcctacagtggaggatgttaggacatcaatagaggtataaacctaacatctgtaaaaattctctaatcatacttcctgtatattgcatcgtaaaacacacgagcatgaaagctccttgtgctttcttgatctgttgagaaccttcttcagatatgatgtcctatgatagatcagtgctggccccaaaataacaaaaaagaagtataaaccgattgtgttccctctcaaaatcagcatgttccatgacctgaattttttctaatccttttacccgagtactagtatcaccgcttatctgattttcttttatgtcaaatgtttcttatgtagggttatgcagctggtagttgcattccaagccctcaaaagaatgttgaaaaagatttcttgaggaagtattgggccaggtggaaagcggaccatgtgggtcgttggtatgttccctgattccttcaattatctaacaagctattgtcttgttcaaatggaacttcctaatggttaccttgcccgtatggtgctgcatatcacaagaaattgtttggtgatgtttctttaatcacgacagccatgtttggaggaacggtcatttgtgaccaaacattaaattgataggttggtgctgttcaaccttaattatgtgtccatgtgtaggatcaaggactagagagagagggggaggggtgaataggcgatttttaaaataaatgatacctaatcaaaactaacctaagttgctaggtttggttaggaagaagtctaaccaagcaactagattaagttttgcaatcctagggtgataagggctcaaaaaatctgtataaaagtaaattacacaaatgtaaatgcaataagtaaatagaacaagagacaaggtgtttttcaccgaggtccggaaactcgctggtttcctaatccctgttgaggtgagccctacttcaccgctcaaaccacaaaacctcgatcactagggtagttccttcgctctgaaggaggtgaatttcgaaccactcacacccaacaccgggtctcctccacaaccttctcggagaggccaccggacaactcctccaagccgtctagaaggtgtcaacctccaagagtaacaagtagcaaccaaactcgtagatgatcaagtggcacactagctcaatcgatgatgcaatgcacttgacttcgctcaaactattctcaaacacccacaaaggatgaagaagtgctcaagtggtgtgagagtgaatgcaagaggtttatacaattgaacaatgtgccaagagaacctccttgctgctggtgggggagtatatatacccccacacataaaaactagctattgggggctgaaacacgactcacaggagtctgtcggtcgaaccaccaagggatgttcggttagactggcctctagtgcaacggatagaaaactagccgttgcagtacatttaatgcaccttcagtctaaccgccataggctggccggttagaccgcgggtggctccggttagattgagctaccaccgatcagaccgtcttaagctctagtggctctagagcgccaagtccaggcctcctattttgctccaagtgctcccgatcagaccgggctgggcccggtcagaccgcagcggttagaccaccacaagggcgccggtcagatcggctttcaggacttggagcctgaggcaaccgcgagaatagaactctatggtctaaccgcccacaaggcctcggtcagaccggagcacataccacggtcagaccggcatgaaaccttcggtcaaaccacctgaggtcagagaataaaagcagatttggaccaagagaagcacccacatgcatgtgacctaatatggcattttgataatttcctcaccaaggttaccacccctatacagcaaagctattaagaaacctagcaaatttgatcatccaacacctcaattgataaaaacgaaaagctatatttatcacattcatctcattgcttggccatcagtttttaatccgtggtaatcatccttcatatgcacatcatgtggtcctaactcaaactcttactcaaattgaataggtagtccataattagcgcttgtcattaattaccaaaatcaataccacataccaggggcctaatgtttcttctatatgatctgtagtgctgtgcaaaatgagttttatattttctctacccccaaggttaggcaaggcaaatttatatttaattgcaaagatagcgaagaatatcattgtaatctaaaaagcagcagttcattgaagtagtcatatatactaataaaaacaagagggagtaatgattatgattgtctatattttatagtattccttgagcatatttagttgatcgatggatatttgttatagcttgcaaaggttggcatccctgccatacctagatctgtaatattttgatcctttttagagtgtttattactttatcactgacttggactgacattctgatttgggttttcttaccagtcgtgcgatgcctcacataaaaacttttactcgatacaatggtcaagacattgcgtaagcatccatataaactgttttgaactctagaattaataacagtatttccattgaatcattgtctggaatctttgtatatcctcatcagatggtttctactaacctcggcaaatttaagcaaagctgcttggggtgcgttgcagaagaataatacacaactgatgatacgctcatatgaggtggatgattttgttccattgttgaattgaggaaattttctgaacatccagacttttacaggaaaactgctctgcaacatagtgttggtcatcatggaatcgtagcttataccttgccatttgatctcttttcagttaggtgtactgttcttgcccaaaactcaccaatctgtaccacaattttcatgtacggggaagaacaattcaaacctggtactatctaatttctccttccttttgtattataataatgtgatcactttgcttttttttttcatcattttaagttccttacccagaataacctggcccctgggaaagagatcaaaaccaaactggtcacactctgctggaaaagcgacgaagaaaaagaacaatccacggaaattatcagattgccagtgccatatcaacttcctccaaagccttacggcacagaaggtgagctggattaatttaacgattgatacaacttcagtggagtaacaatagtaaaacacttagaaatgttttttttactttcagatgtcccatggtcttgggacaagaggtacacaaagaaggacgtgtatggttcagtctggccgcgccatggttagctaagcggtatgcggacaatatatgatcaatgaaaggctaaccctgctccgatgtcgacaacaagaaggccggtagctgatcgcctgtcagtgcccactactcaaccattagcaggaagtagtactatttcctgggagagattagatatttctattactaatttgtacgagcacaggatattttctttcttgttggtacgaatcgtgtgccttgtctgcttccgatcgtgatgtttatgcctccatcctcttttacagagtagtactcctacagtccgtcgtcatccagcgatagcgatctgaaattttaacgtgcaaaggacgctacctaaaccagctttttccagaaatcccccgtgcttgttcttgcggctgtccttgccttgagccgctccatgaaagcagcaaattagtggtactgcgtaaaagaataggggcaattgactcgacgatctcgcttccgtcgtcctgttgtgatcctagacgagaatcgtcgtcggtgatcgatcgggtgatgcgaagcgttcgtccaaatcacggtgattcaatcaccaacccgccgtatgaacgaccacgagcacgggggtgtgcgacgcttccctcggccgcatccgccaaagggtaaacgccgccaccaccacccaccaagcgacacggcgcgcgcgcgcaccgcatgaatcgcgtggtacgtacgtacgcccccatcccaccaacgggccaccacgcgacacgagacggcaccacggcttccgccccccgccgacccctcgcaccaagagcccacgtaccgcaccgcgcaccggtgccggtgcgtgctcgcttttgcctccctccgcgagccgggcgcgccacgcgacgcgcgcgcgcacacgtcgcacgccgtctcgacgtctcgctcgctagtcgctacccgcgtccgccccacgcaacgcaaggagtgaaagaacgcgatgccgcccgcccgcccgccgccacgtgaacgcgcggcgcccctatcaatccgcgggcggcggggtccgcgcgctcgcgggggccccgcgtggcggtggtggtgggtgggtgggtgtcaccgtcgcgaatctcgaatccgcgaaccgcgagtccgggggggaatcgggtccgtccatccatccctcccagtcgcgtctcgcgagtcgcgacggcttcgctctctcacctcctcggccaaggtgggccccgcctagtggctgctcgtatcgattcccggatacgggagatcgacgatgctccgctatgcgccgttgccgtttgggattgattgattgattaatataattaattttggtttaatcacgtacgtttcgtcgtaatcccggcatagaccgcgtctgatgctgcgggttggaatgaccattagcgtaggtcggtcgtctggtccggattctctgcaagtagcgggcacgtagtatgcttcattcctttaggaagaatcgtgtcaccatttcctcgtaatttttttctccatccgtctccgtcctaaaagaatgtagtagttagttttagttagttaagcaacatttcattaattaatacaaagagaatgaaggaaggaattactacttcttcgatgacaaaagagaaaaaaatatgaagtattttctatgcaataattatagctatttttttattacgaaatagaggcatgttcgtacctagagagatctaatgggctctacttaaaaatacaaacaaatttttaaatatgttcatacacaatgtcctattttattttgttagagtatttaagaattctattataggtgtggtctaatatgaatttaattttaaagttaattggatccatatgccattgtactttgataaattgaaaaaataccactactattcacaatatcggctaggtggcatcgatattttgtaaaatttgaaacagaccattatatacatcccaaacacagttgtaccaagttttttatattgtattttcatacttaccagaatgctccctatcccttagaggctgacaaggaggacccacacgttaaacttatcttcttccccgattattcctctagcttgacgattccgactgcaacaacaacagtggtggagggctggcactagagcttaccagtgatgacgtccccgcacctggcttcccgatggtgtggtagatcctgcaacggtgtgcttgagcttgagcgtagattgcagccccagaggcgaacagcaacatctagattgtggcagcgagcaatagtagccccagtggcggcggtcggtcctcgtctcattatcgtcggtgagtcccagcaccgacccattcaccacatcactgccacggagttcgagggagttggcagcattcctcgtgtgaaaaccccatcgctagcctctcgacaacgtggcggcaaggtcaatgcaggcgggctagattggggcggtgaggagcagtagtagaagcaaccccagtggcggtggtcgtttctcgtgtcgctgtcatcgacaagccccaacgttgacctctccaccactgacaccaccttcaatctctccaccactgtcgccactgccactctactcccgtcagtcttgctgtactagtggaagtgttagggaagataaggttgacatgtgggttccactagttagcctataaggttttgggggcattttggtttatacgaaaatacggtatgaaaaaatcaagtccaactacgtccgggccgtatatagtggtatattttctcttacaatttgagaaattaaaatttttacaaaatataccaatggcacacgaccaatatcaacggatagtagtgatattttttcaattcaacaaatttgcaatggcatggattatagtaaccataattttaatttgtgctcatcagttcaatattgcttttttactttgtgcctcacacaagctatcttctctctggccatcactaacaataggggtgaaaacggtacggaaacggacgaaaacaacttttatcattttcgttttcattttttttttctgaatcggaatcagaaaccccggatatgaaaacggaatcgaatattattgaaaccgaaaacggagcaaaaacgaaccgacgcgaatacggtatggaaatttatcggaatacaaaaacccctcaaactgataaatctaattctcaagtttcaacgatcaacaattcatcataaaacacaaattatataagttcaattgttaagtctcaacagtacatcacaaaacacaatgtatgaaataaattatctatatttaagagagtaatgctgttgataaatcccaaatgcgggaaaaaaaaattcttatgtaacttcagatttgcataacaaatattttttaaaaataacatctaaacaccatggtattcactgttcagtgctaaaaaaaagaacccagggtatttcagtcataaaattttcagaagtttcgagaaaattccaaccgacagattttattttcaaaaataggtccggaatccgaaaagtttccgcaccgttttcacgtcctaactaacaatatagggaacgtgtgctaaatataaaatgagaccttatatatgtagcgctgataactagaactatgtaagaaaaactcatccacctactttagtggcaatcgggctaaataaaaaagagtcgctacactagtttcgttttccttagtaattaagtgggaaaatgaaatcattattgcttagaatatacgttcacatctctgtcatgaagttaaattattcgaggtagccataattgtcatcaaactcttcttgaataaaaaaatctttctagctgaactcaatgggtaaagagagatatttttttttaaaaaaaaatagaatgaagatattctgaacgtatcggcaaagatttaaacatataattatataattttatagtttgtgcattcgttatatcgcacgtcattaaggacatgtcttactccatctcaatttttatttagtaattaaagacaattgacttatttttattatttatcttttttcgattagatgcaaggtacttacgcacacactttgtgctcatgtgcatgtgtgagtgcacctcctcaatacacgttcaactagcgacacatctctaatatcactcgcctatttaatacatttaggtagcaatatctgaattcaagcactccaccatcaccagaccacttttaataatatctaaaatacaaaaaataattttacagaatagcatgaaaagtatgaaacgaactatttaggtttttcacatacaaaaaaaaaaagaattttgctcgtgcgcgagcgccaatctcccatattgggcacacaggcaacaacagagtggctgcccacagaacaacccacaaaaaacgatgatctaacggaggacagcaagtccgcaacaaccttttaacagcaggctttgcggccaggagagaggaggagaggcaaagaaaaccaagcatcctcctcctcccgtctataaattcctccccccttttcccctctctatataggaggcatccaagccaagaagagggagagcaccaaggacacgcgactagcagaagccgagcgaccgcctcctcgatccatatcttccggtcgagttcttggtcgatctcttccctcctccacctcctcctcacagggtatgtgcctcccttcggttgttcttgaatttattgttctaggttgtgtagtacgggccttgatgttaggaaaggggatctgtatctgtgatgattcctgttcttggatttgggatagaggggttcttgatgttgcatgttatcggttcggtttgattagtagtatggttttcaatcgtctggagagctctatggaaatgaaatggtttagggatcggaatcttgcgattttgtgagtaccttttgtttgaggtaaaatcagagcaccggtgattttgcttggtgtaataaagtacatttgtttggtcctcgattctggtagtgatgcttctcgatttgacgaagctatcctttgtttattccctattgaacaaaaataatccaactttgaagacggtcccgttgatgagattgaatgattgattcttaagcctgtccaaaatttcgcagctggcttgtttagatacagtagtccccatcacgaaattcatgaaaacagttataatcctcaggaacaggggattccctgttcttccgatttgctttagtcccagaattttttttcccaaatatcttaaaaagtcactttctggttcagttcaatgaattgattgctacaaataatgcttttatagcgttatcctagctgtagttcagtttataggtaatacccctatagtttagtcaggagaagaacttatccgatttctgatctccatttttaattatatgaaatgaactgtagcataagcagtattcatttggattattttttttattagctttcaccccttcattattctgagctgaaagtctggcatgaactgtcctcaattttgttttcaaattcacatcgattatctatcgattatcctcttgtatctacctgtagaagtttctttttggttattccttgactgcttgattacagaaagaaatttatgaagctgtaatcgggatagttatactgcttgttcttatgattcatttcctttgtgcagttcttggtgtagcttgccactttcaccagcaaagtttcatgtctgatctcgacattcagatcccaactgccttcggtatgcatgttgttctcttccctctttgtgatggtctgagtgcctggaatatttgtgctcatcatgttttcctgaacatgtacagatccctttgctgaggccaatgctggagactctggtgcggctgcaggatcaaaggactacgttcatgtacgcatccagcagcgtaatggccgtaagagcctgaccactgtccagggattgaagaaggaattcagctacaacaagatcctcaaagatctcaagaaagagttttgctgcaatggtactgttgtccaggacccagagcttggccaggtgtgtgtaataaccgaaatttgtggtgcctgatctttacgtttttctatctttctgagctagtttttctgatcaatgcttcactctgtaggtcattcaacttcagggtgatcagaggaaaaacgtatcaaattttcttgttcaggtagggatcattcttcttgtgcatgcttactgcaattagatgtacacatgctgtgatgtatgaaaagaatacgtcttgacttgttgtaacatgctatgtcccgcaggccggcattgtgaagaaggaacacatcaagattcatggtttctgagcaactgccaaaaccattgcaaagactatagtttggggtggagtatacttggttgtgtacatgcctgcgtgttccattgtacacacaaaacctagccacctcttgactcttgagtgtatgcttgttacccgtgtgttgaagtttgtaagaggcaccatcactatagatgatggcttgtgtccctctttcatcaagattgaataatatatgctactttgagagcgctatcctgcttgcctgattgtgttaatacttacatccgtcccacactcccacaatataaggaaataaggtattttggcagtttagagcaaaattcccttatatttttgggacggatgtcctcttttctgcatttttttatgttcatatgttcctgaagagtaaggtggatcttgatcaacctgtcggtttatggtgattgatttgagtggaatagaatgggccaacgtccggcatacagttatgcttcagctagctccaggagttgtggttttagattgctcattttctcattctttttcatggacgatagctgaactgctgaagtagtgaagtcggcatgcactggctactgtatatgtatatggcaattgatactagtagtagtgtcagctgaagctgcatgccttctactgtggagtactagctgttgatccaaactccagaccgtgaactgtttgttttttcattactgctgggtacggtacactagcttcattctgtgcatgagtcattctccggcatgtctgcaggacatctcatgatacttctggcacttcaacagtgatatttccagtgtactgcaatgagtttattcttatggttatgtacagtactcgtgctagtaatagtgtattgtacgaaatgaatatgggtagtactagtagttacaggattcacaaagctgggtaagttagaaatgaacatgggtagtactagtagatcacaaaggttcaggattcagaaagttggatctgattctcgaagccttcagtgcttctacgtcgccttcatcagtcagcatgtatgtgtaccatcttttttgagtgatttcttcccccaagtttcaacaaacaaaatgatgttacgaccagaccatcaaggttgagaaatcaaatgcaatcttgtcccctgttcagtcagacgtgcacgtagtacatcacagcatttttcagtcccgaattcgctcatcctgctgctacaggtggtcaaacagtatagttcaacttcagactttcgtggtgcttcttctctgtcaatgtgtacaacctattgctcatgatgtgttcagatagataagattatagtgcaagatgttgccgtggaatccttgcaggtgcgtgcagtgacttgaacatgggctgcatgtgttcctgcccctgaaatacggtgagatcgatttggttaagataatcagtgttcctaaccacgtactgtagtagccgttaacgttgtcagccaattatcaaatacgctgggacatctctctgcatgacctggtgaccatcagagtagtcagtgcctcattgtgcttgtaattgatctactactagtattctcttcaaaataaactgcgaatcaaaccccaacatattcttttcttcagtaaaccccagacaaattttcatgccaggataaaatccttgtcacacgaaaacaaaaccaaaaatatgtagcttatgtctctgttagaacaacacgagatcactggagagtggagattatggccctccacggtcattcctgccgttgaaacggcgcacaatctttttggatgcttctttctttccccctctccatcttttctttttctcacacacatgcagatgcccacagatcgctcatcacttcatcagcagtagtaaccttttccttttgctatctccctttttcttccgattcgtgctcgccaaacgaaaggaacatctcgtcacattttccttttttcaagaacaatctcgtcacatcatgatgcattttccagcctatcctcaccttcatcacccagatctgtggcaggagagaaacattatttttttctctgacatccatgcctaacgagatgtgagatctggacgcatgtttcgcccatatgcctctgtactgtagtacatcttctgatcttcatcttggctgtcatctcgccattggatcaccactaaaattacccccacactaacacatgctttacaacgtcatttgtcaggctagtactacgatgcgtgtacactgaaagcagcaaaggaaaaataataattttatccatttcatcatccaaaaagaatatggtttccaacgtgacagccactctacgtggcccaatccaaaaatagtagtactgtagtagttacagtgaatctgagccgcacgatcgaaggacgatccgatcctggccgcacatcgtacggccatgtacgtcggcggcggcgccggcgatggcctcacgagctggtcgtccggagcaagcattcctccggcggggaggggaaccgcttgcggtcgtcgcagtagtcgtagatgacgaggttcctcgccacccaggcggagtcctcgcgctggccggcgtcgagcgcccacgccggcggctggtcccaccagctgttgccggtggacgccgcgcagctgggcgggctcgccgccgccgtgccccaggagcacgcgtcggcggtgaagtcgcggtaggaggagatgaacggcgccttggtccagtccgtcttctccagcccgccgcgcgtcgcccagtcgtcggcgttccagatgctggagaacacgtacatcggcttcatgatcgggaagaaggtgttgggcttgtccgagttccggtactcgcggatcggcaccttgtccacgaagaacctgatgatcaatcaccaccaccattgcaaagaacatcagaaatcgagattaattgacagaaaatggatttgggtgggcacggcacggggaagacgaaggtggtggcatggcattggcagccattgcttggttctaaacagaatgtggccaagtagcagcaacctggagtgctcgtacaagcggcagggtttggcaatatctgcaggttcaattaatcgccatcggagcgacccatttcaaggggtaggtaggtaggtgggcgcattcaactcgtagtcgtcgtcgtcgttgacggcggcggcggcggatgctatctccggcgagcccggatggccacggagtacgattgaaacaactagaagcttgattactattgttcggttgatcacttacacgatctgcttggggttccagaggatggagtaggagtggaagtcggcggtggggtcgaaccacagcgagtggcgcatctcccggccgccgacgccgctgcggtacacgttggtctggatgatgtagggctcacccgtccggttccccaggaactcgaagtccagctcgtcgcgctgcggcgccgcgtccacgtcggagcacatctgcagattacgccgtcgtcgaggagctcggtttcagtttcagttcggagttgacacaaagaagacgagctagctagttcatcgtacgtacgtagtaggcggtgacgacgccggcggagtcgttgccggcgagcttgaggttcatgctgaaccacccgaagagatacctctccttcgtctggaacccgacgcctgaaacacaaacccaagaaacagggcagcgtcagcattagccattgccggagtggagctcgaactactctcactcaccagtcttgttgtcgaggtagaggtaccacgtctggccgtcggcggaggtcttgacgtgatcctcggctccggtgatctcgaagttgtcgccgaacgtcggcgctgccgccgccgccgacgccccactgaagcagaaaccgcacacagcaacagcaaaaatcatcgccgccgtcaacccaccaacccacggccgccgccccagcgaccccatcctcgatcgtcctcgacacccgagccggccgagctcacgtagcagaggacagcgaggcagcagcagaggtcgatcgatagtgagagcagcacagagagacaagaggcgcaccaccgcgtagtattataggcgtgagagagatgtgaagtggctactgtactaaaaaagcctaaagaaagacacaagttggggcttgggcgcgccccggggttcacgaagcgtgtagtttttgccggctgtttccgtctcggcgcggcgcggcgtggtgcggtgaaaatcgcaccgttgctgctgctgctgccgcgcgcggccgcaccaagcccctctttttctatcgagaaacccagctgccttctccctttgtttatgcctttctccctttgtttatcgcgaccgttttttgagttggagcgatagtggattatattatggggagggagggcaactagttgttgtcactcatcagtcatcacgcatggtgttcgatcagatctggggcttggaccggtcagggtatctcatatatattctcatcagttttatccgctccgtggtggccgtcacatgaagttcgtcgcgtcgtgttgacgaggcacgttacatactcctgtcctacgagtgtactagtggatctgtggatggatcatggatggtggtggattaatggtgagatggtggtactagctagcagggcatgtgactgttgatgacttgatgcgagtgagaatgagcagtcagtcagtctgctgttgattgcgagagccgagaggagaggaaggggatcaagggaggattaaaggcggtgcaccgcccaaccaacctgccctctgtgcctctgccctctgccgcgagagaccgggtgacggaggaagtgagcacgaacaggaaacccctagtgcagattcgcagtaaaaaaaaagaccaccagatttacggcagttttggattgccaaaatttcttcactatgatatcacaatttagctatattttaatagcaaaccaaataagatgaatataaatttattctaccaagtaattggtagtgccaaaatttacatatgttttagcactaaaaaaattagtagggcactgatccaaacaagcccttatttatttcatgcattgatgactggaaggggccgtgtttgaaagttgaaaccacacgcatgtttgttcatcggacggccacgtgctctcatgcatccggaccgttgatccgtgctcgtgtactacacgtttactcgtgctgtacttgtaagtcatcttttacagtacactggcaatgctgttagatttttcacgtcccgtttttatttaccccctttcttttggacgtctgtcctttttatccctttcttgaaaggcaaaagagatgctttcttgcaaattgcgtgggtcgtgtctggctgtaggacctcggccgacactcctgacgagggcgcaacgaataaaggagcatttgttggcttctgcgtgtggtgcacagttgcagtgttgcacaagggagatatctcaagactcgaggggcagtaaaggaaaaaaaaatgtttcagcaggagaaagaaaaaggacaactcatgtagacatctatctggtctgaatttttcaccaatatctacaaataggtcccaaaaagtttattgtagaaatggacattttctcgacaccaacatacgccgtggtacaacatgacaacgctaatgaaattgacacctatttgtaaaagaattcaataaaatctatttgtaattaaaaaaaattaaaaataggtcatcgacgccaataatatgacctatttcatattagtgacttaacttccactagagggcaaggggagatgttagaccacgtgccaataacattggcgccatgaaaatggtccatttttaaaataagttttttgggtctatttattaaatcagtttttttaattggtcaaaaggtgaaaaatccagcctacctagtactagtacattgcaagtgtactgtttcttataccttctactgtgcagctgtagcacagtacactcttctttagataatggaaaaatatatataatgcaacctatacataagtagtataaatctggaaactactgtacaattaaaaaaaagggcatatgagatgtgtttacgttactatgagtaaactttttactatgataacatggataaatatcatacgtacatttttagattttgcggtattttcaggtttgcacttaatttttttctcagaaaacatatttggtacagtacgagtaaagcgcgggaggggggggggggggttcagaaacctgaatgaactgcgagtacttcggccgtttgggcaaccatgatatcgccatacttttgtccctccgatttcaggtgtactacactctaatcatgggtcaaagcctttatttgcaactttgataaattgggcctatgatagatggctagctagatgcaaccaaaaccaaacgggctttggttctcagttcaaggctcaggtggatggacgttgggccagttgagaagttgtcatccaagggcccttcacacggtatgggctgtagttggatcacatcaactcatgggccatcacccatcggtagtttggtcttaactcagcccatctagtctacttcggccacaaaacaccaattcaatgtgacgtgtgatagttttgcggtaacgccgtaacaatatactaccttgctaagaatgaaaattttttactccagaaagaattttccatgagagatatttctcgaactaaaggaccacgcagccatggttgctggcttgctgcttgtctgttcttgtacagaggtgacaaaatggtatggtagggccaggaaactgttggtgtatgtgccaaaaacgaaaacgaattggaaaggaatcaatgatggagatatgcctttgtcaccaatatcaaatttcgaatagtctggaatatcccactagctccagacatgctgaggttgctctggctaacattgttgtgaaaatgaaaattgctataaccttattctaaacctgattagtgactgattaattcctttttctgaaactgataaatgtgtgatactaagaagggatttagcatcaattattgagagagagaagaaaatggtgagaaaaccactgttgagatttgagaaggactcgaaagcagggcagctggccagtggctttgctcttgatagctttctatatcgaccgttctcattagtgactgattaactggaccttttgtttttcgacatatttccagtgaatagaaatgctgaatgcctccagatattatgggttctggctagattttctatgagctgttgcattttcttggtcatgtggtcatgctgctgttctaaaacaaaacagagtttctcactctgtccagtgtccacatataaaaacatgcagccatcatattagcatcaacctgaccaacaaatataatggcactgaatcatttttatttcctcatcctttttattcattcctcccagagagacggatccatggaagttttcttgccctcatcaggcaagcagagcacacacacacggtggcagtggaagtgctatgaacaagacgctaatcaacatccagagctaaaacaaacaaggggatcaatgcaaatcccgaaaaaaaaacacaggggaaagtccacatcttcttctcgtccccaactcctccgtgtcaccaccacgtcttgcggatttttttttaccctgttctattcgctcaggcgtccacgatctcgccgtcgtccttcgacgccaggatcagctccgggtgcgccgccgccgccgccgccttcttgatcgtgccgtcgatggcgttcggccggccgagcgccttcagcgccaggtgcgccgccttctggccggagatcatcatggctccgaacgtcgggccctgcaacaacgaatttgttcaaatccaagaacgggggagagattatggtgaagagtttgatgtttttttggtgcgtaccattctcggggcgccgtcgatctcggcgacctccatgccggtgacgatcatgccggggacgacctcgcgggtgaggcggacgatctcgtcctcggcggtgttcatgtcgagggcgcgcatgccggcacggcgtcgatcatgccgatgtcctgcagccgcttgacgcccgtggcgccgaacggcccgtcgtggccgcaggagctcaccaccaccctggactccatcacgt

SEQ ID NO: 5514 - DNA, 4424 bp, Oryza sativa
atatatcaggcacgtgcaggatatatatatagcactagtacagtgttcaaaagcgacataccaaacgcgtacatgctcacgcacgtacggaccagaccaggagtgaaaactcaacctggaccggacgaccgaccggaccacgtaccgtgggagcggctcgatcgatcggtctcggacgaattgaaatcaaataaacccaacggagacgacgacgaaccggccgttgcatatatacgattggattaattaatataatgtgttgtgttagttctctctcgtgcgtaatagtactactagtcttggtctttcggttgatcaaattaaagtccagacgccactagctactgcgtttcagctgtatatacaagcatatggtttcgtcgtcgttcgtgcaagttttgaaaatggaaacattaattctttcgttcgcgtgttgaatccttgacgtgagcaaatcttgaattccaagctttggaaaaagttgcagtttattaattaatttgagtgcaacatggatcgaattgaagatagaaacaataatttattaggaccagttttgaaattaatggaacggaagaaaatatatatgcaggaaattcacgtaccaccagcgtcgacctaactaacctacctagaggattcatgttgcaaaatttctacgaaggtacatcgatcttcctcctttacgtacattattttctcagaactaccttaaataaacaacatttagcttaactataacttctactaccttatacggctacgtcgtacgcatgtacgtatttcatcatttcttccaaatgtaggatggcattcatgcatcttaatttcgacgcagtttctatcctatttctagggctcattccctagctagctaaatatatattttacaaatacaggatagtagtacatacttcttttttttagatggtatcgttggtttttagcatagggtttcaacacttatcttattaaaataaatttatataggtcttatttattttgttggcactaattactttattattatagaaactttaagcatgatttataaaaaaagtttttatatttgcactaaacttttaaataatatgaatagtcaaatattaatctaaaaattaacgaagccatctatttagaaaacaaaggtgttgcagtttaattcatcactggaactataaatgtcaattgcatgcattgctgatgaaacggtacaactagcctacaaaatatagtttttctataactcacgttttatttccatttcagaaattaaacaaaaagctcaagatttatcgtacaattagatgaattaaaacggtttttcagatctctagcataacacctgttgctaggataagatagataggaaatattttgacattcataagttggagtacttacttgttttttttttggataatgggaatggcttctacaccaacgggggtgtatatatatacaaccattggagtacttagttgttgggctctcatatgtttagccattatcggctaaccgatttactaattatcttggtatccacatcacttgcaacgagtttcacgaaatatttgcttgaatttgacttagcaacggtggtaggctccaatgatatggctcctgttcaaagtttctcctcttagttgtatccacaatatattgttgacgtacaaagttaaaggtaactatttacacgtacgcaacattaattaatcatggaaaaaaaagaggaaatatgcattgtattggaattaagtagatgttctgagtgtctaaatacacatataatgcccataattatatttttttatctattgaaccttttaaatttttattttttaaaataaactatataccaaaacttccaaaactaatcttttggccacaacagctaggctagaataacaaaacaacatgcctaattttgtttcatcatgccgacttgactgacgtgacaagggttttgtgacttttgtcataattaaggcgtggcaaaacaccgggggcgtaccatattgttgtttcaccgcttgacaatcaaaagcaaaagcaaatagcttgattctgaaagcagattcgtagaaacgaggcatggtttctaataaaaaccaaaagttagcaatgaagctgcttttgtggggtgatgatgttgatctaaaactatcactagaagtattatataaattgcacatttcgcatgtttcaaaatctgaattcacaatcagattttaagaatccaactcctgaaaaatcacaatccagagacaagattgtgacaataaaaaacaaaaataaacggaataatgtaagtaatgggtttgcaagatgatgtgttcggttatgtgcgtaaattaattatggaacggtcgttcagtgcatgcatctcccacagccaaaaattaaattttaaaacatggtattagagttcattttaaagttttttcatcttagttcattttcagtattgacttttaaattactaagaaacacatatgtaaaaggtgtactcataaattatttttagttacttttcttttacggtttatctccatacagtaaacgatgagaagcttagctgcttgccttttcagaggccaaaacgactaattaaactgcctaaaaatttaccatctgatagctacatatgcagattattggtggtcaaaatcatgaccgattgacgccacaacatgaacgggcaacttgaaaaaaaaaagaaaagaaaaacatggtgtatatatacattcatgaaacctgcctagaatagatgatatatatatatatatatatatatatatatatataacttccttaacatctgactatggtgcaacaacccgaaagggagagaactataaaatatttacagaaggaaaaaaaaacatataactaccaagtaccgactaattgaagctagcattattgtggtcaactcttagttaagtgctactctagtagtttgtatacatagtatcgactgtttgaccattttgacttggttggtttgtattttaggtatcatatatgcatcttagaagctattgacttgacccgtggaaaagttcaaaatgccatgaattgttttcttggctgttggttgccatttgcatttgattaaaaaccaatcatactcccagatcattcataaatattgaacaaactaataaatttatccttgaatttaaccaatgtaagaaatataaaacagaacagtatatggctgatccatgaaattcacacgtacagaagcgatcgaaacaggcggatacgatttcagacaataaatgaattttattgaatttcatcatcagacaaaaaagaatgattacaaattaagaggtttggaaaaaccacctttgatcatgcacacatcgatcgtacagatcgtacatacggacctaacttacatggtcccgttcttggatatgatttgattcctctcccggtcgcggccgagaccagatcgtagttcgagtcctcaccaaatcaattccccagttcacatgacacatgaacacgacctaagctagtcctccattattattaactaacaattaattaatcagcccttaataatcaattaacttaattacttttataaacaaataacgaatcttattatatcattttatacgactgaattaacggtatcttgattcggtgtacgggaaggatggacggccaggattggctactcttccttgtagtcctggttgttgtagggggcgaagagctcggcgaggaagttggacttgcggtggacgcgggagccgaggtcggcgcacatggcgtcgctgtcgtggatgctgtaggtggagatgcagtggcggcggtagaaccgcgtcgtccgccgcatcgcctccgtctcgccgtcgacgtgcctcaccatctcctccaccgccggcagcgcgaacctcccccccagcagccccgccagccacctgcacctcagctccgacgtgtgcaggttcgacacgctctccacgtaccccacgaacgccatgttcggtatcagcggatgtatcgtccccctacacacacaaaaaaaaaacactcatccattagctaattgtgcgtgtgcgtctgcggtgtaattggttggttaacatgtgggtaccggtagaggggcatcatggaggatttgttgacgacgaggccgcggaagggctcggggaggacggagcggagcttgtccttgccctcgaagccggtggcgaggaagacgaggtcggcgtcgacgtgggtgccgtcgtcgaggacgacgccgttctcggagaagcaccagccgccggcggagcgccggaaacggatcaggtcgcggtcggccatgtcgaagaagccgtccggcaggatggccatctggcagctcgcgtagtcctccacgaacgggtgatccggcctcaacccgtacctgctcagtg

SEQ ID NO: 5515 - DNA, 1132 bp, Oryza sativa
tacccatgaattcagaaccccagagtccgcacatcctcaaatacaaagcacttccctagttagatgtaggttagacttcccgttcgagaaactctaccttctacctgccctcaatttatgcacgattaatgaatgccacctgggtggaagcgagaggtggaaatggaaggtcttagttcggaggtgggatctctacctgatagttgcattgccattcatgatgatcccctggcattcgtccattcagccattcaccattcacccattcaactggaattttggttgaatgccggaattgtgtccacaaattgtggatggatagttggttggctggctggatggctggctggatggctggctggatggatggtgaatggctggcggcggttcggttgctttgaagcatttgttgctatctaaattccatttaaggtcgtaccttatcgcccagcatcatcttattctctatttgtattccctccatctttcagatacggatgtagccttggatgtgcccgtgcccaatgaagaggaagagcgcaacatgaaacgtaagtacaaaagtaccggacacccacccagatcccaatagaatccgccaaatcctgcgggaaattgtaatcccattcaccagcttctacatttaattaacaagagaactattgtatttatctaacacctggattatctccacctttcatttgatccctatttatagattacgctgcgttgctaacgggccgcacctcctatttcctcaagggtgaggaaatgaagtccatgtacaccacctacaatccgcagaatgtggtggccaccgcccgtttcctgttccacaagaagaatctatactactccttctacacctcatcgcgaatcggtcgtccgcgtgccattcaattcgttgatgatgcgggtgtaatcctggaggagcatcaactggagaccaccttggcgggcactctcagtgtctatcagaatgccacgggcaagatctgcggtgtctggcgacgagttccacgtgattacaagcgcatcctgcgcgacgatcgtctccatgttgtcctcctctggggcaacaaacagcaggccgagttggctctggccggaaaggtggccaaatacacggccc

SEQ ID NO: 5516 - DNA, 11730 bp, Oryza sativa
  unsure (1)..(11730): unsure at all n locations
tcgcgcgcattaatgaacccgacgacacgcgcgcgcatcatctgtgacgtacgtgttcgtgtgaatagctcgctgttcgtggccaaggcgccaacaaccacacgtacgtcgacgtcggtcggcttaattcccaccagcagccgatcgtgcagtgcagagacgtacagcgcagtgtgacagtcgtagctagtagagaaggagaagaaaactgaaaacggccgagcgagcgaggcgagccatcgacgtctcgctgcatggtccctcgacgcgtaccggtgtaccacccacacacgccgcagcaaccaaatcggcctgggagttgagcagcgtacgtgtcctcccgcggatgtctacaccggccggccacgtacatcgccgtcgtcgctgcgcgaccgctcgctgggccgcgcgtccatatcatcccaccgcgacgggctccgatccacttccactccatctcccggctcgacatcctcctccgatccgacccgggcctcgcctcgcgcgcgaccccgcgattccgccgcttcgcgcgggccgttcgctaagttttcttcacacggcctgtacgtctcggggacgcgcaaaaggaaaaagtacaccgaaggtccctcaacttgtcctcgagatacaaaaccagatatcccacgtcccttaactaatcaaaaccggtcacaaaagtcactcggcggttttgaccccggttttatcctacgtggctgctgagtcagcgtgggacccacgtggaccccacatgtcagcttgggccacgtcagcctcctctatctttcccctattctctcccttccgcatctgtctcactcttcccttctcttcttaggtaagcagcgttgctggcactgccggggaggagaccgccggggcgaggcgggatcagccggaatgctgagctcgtccgcatccttgccaccgtcgccgccgggatcctcctcagcgccgcctcgatgctcgcgttctgaccgccggcaacgacgtcggtgtgggggatggacaccgaatagctccggtagtccgttccctcggcaggtgccaagtgtacttggtgtacgccgacgctgggtggaggaacaccgggatgtagccggcgagcatggagtcgaacgtcgacttgcgggtataggagtcgccacgcggctggatgcagaacacgcggaattgaggagctccatgatccgccccggcgagtttccgaagtgggtgcaggacggcgacgcgtgcactgctcgatgatctgggcgcgcacggtcttggtgctcccggggcgcggcgcgccggcgaacgcccagagccaccggcggtcgcgccgccgcatgcggtcctaccaccggagcacgtcggcgtctaacaaaagtttatctctaactctacaaaaacacgcacgtatgccttcacgcaaaacccatccaaccgcagcctgcggcgtgtatgggcctccatctgcctccatctccatcgtctcttcgcaaaccagtagctatagctagcaccacattgatttggttcttcgtgacaacaggctgtgccatctatgaagtaaagcaatgccttccctgcccaacgaggcaacgatacaccgccatgcatgcaaagcccacgtgtagtacctgttaactcagcacacaaattcccaataaagcaattaattaagtaaatcactaaccaatcagcaatttggcaaaccaaataacccaactatcctaattacagtgtcaacagaccggtgcccagccggcgggtgtacatgtacgagctccctccgcggttcaacgccgagatcgtccgcgactgccggctgtactcgaggtcgatggacgtgtgcaagctcgtcatgaacgacgggttcggccccgcggcgctccccagcggtggcgcgctgccggagcgggacgtgtacgacaccgaccagtacatgctggcgctgatctaccacgcgcggatgcggcggtatgagtgcctcaccggcgagagcatggcgaggaagaagacccgcgacgcccggagcaagctcgctccaccgccgccggacttgtcggacacgacgctcgccgccatcggagcggacgtgcgccctcgccttctcccgcatcgcagccgccgctgccgcttcctcccccacctcgccccgggggcctcctccccagcagcgccgcccggcttgcctgagaagagaagggaagagtgagagagaaatgagaaagggagagaatacgggagaaagagaggaggctaacgtggcccaagctgacatgtgggacccacgtgggtcccacgctgactcagcagccacgtaggataaaaccggggtcaaaaccgtcgagggaccttttgtgaccggttttaattagttaagggacgcgagatatctggttttatggtttgaggacgattttgtatctcgatgacaagttgagggaccttgggtgtacttttccccgcgcaaaaaccaactgggataagttcacttcagatctcttattttaacagagttcgaatttcatccctaaaccataatatcagatatgaagagtcctttgacttataaaaatcggtgcaccaaagattccaagacattatactctcatgttttagctaacgtgacgagctgacttcggtcaacccgactgatttagtatgggacacacatgtcataaaaaaaatcactacccttcttttcccctgtgtctctccggatccacccaccattgacgccgcgagttcccccacgaacatcattcgcttcccccgcatcgtccccatgaacaaccgcgcatcaaagctgctcgattcaatttgtgagcaaatcaatctaaagaaaatgcaaagatgttgatttagaaggaaggaatgcaaatgtgccttgcttggtgaggaaggtatagaaatcaatgttggggtagaggtagtcatcgatggagtactcaacgagggtgtggacgtccttgccatacctgaagagggcagggagaaagaaggcgacaacgagggtggtgactggggaagtggggagcgacatgctacggcaaggaaggagcagctagaggaggaagggagtgttggtcgtggattggtagggtggttgtggcgtcgtggagtaaggcggcgaccaaccagggggagggggtaggagcgacagttgacgggaaggcgcgcggcaaggagaaagacggtcaccgacttgaagagaggcggtgggtgcagcagattgtaagggcaggcagctgaacgagctcccatgcttgcgtctgcacctcacgtctccccggtgcccacagcttgccacccatctccccctgcccgccactcgctgagcatgcccgcccacatcacagaggggaagggggcaatgctgctagctcatgccatcggcgtgatgcccaagccacaacaatcgcccccttccaccaccttgcctccaccaccactgccctccacttcagcccttgtcgccgcctcctcaaccaagccaacccgctttgtagggctcatgtgggtcctatttaccacattaaccaaacccggggagcatactatcttgagatttttggtatactggttttattggttgaggaattcttcatatctgatattgtggttcaacgatgaaattcgaactcgacgactttaagaagagggacctaaagtgaacttgttccaaaccaacgtctcatcgcggttgcggcccttgtcgcgcgcgtgtcgcgggcttgcaccttgcggtttcgcgcttgggcttttgcctgccggaccggcccagcggccagcggattccagtggataaacattgtagcgttcaccgttatcgcttcctgcaaagtggatggataggataaccatggcgtttttctcactttggtaaaggaaaaacccatcttgcagccgatgacgacctgacaggttgcagccgcagagcatggctacttacaacgctgattgagaagcaaaaaattttgttatccatcgagatcgatcgaagctttcattcatccatatcaagtcacgatcggttggttttatgttcttcctccgatccagcggcctgccaccatcaaattcatcacgatgtgttcgctcctgataaaaccacgaatggattggcacgggtcacacgagtggagctagaaacactaaaatttatactccctccatttcacaatgtaaatcattcctattcattaacatcaatataaatgagaaaaatgttaaaatggcttacattgtgaaaggaggaagtatttactaataatactatttttaatttattttttataaaagctacagtgtgtaattttacagaaattgagagagggccctaaatgataacatgaggaggagtatcatttatcacctattgactgcaaacctcatgttagttaacttaataatttcatcaatatggtaagcctgatctcacaagctgactttttgtacccatacctgcatgcttctgttgcaggctggtaggtagctaacgctaactgtttataataatccaggagcatcttaatgaaagcaaaattatgcgtataatctatcacacaagtgggcacgaactcatcaagttggatatataccacggtcagagctgggctcttctctttctctcttctggcgccaattcagaatgaatacagctaatccatccatgccaagtcagcaataataatccccaattctgttccaaggaaaacggattatattacctcaactagatgcatgacggggtgtttgaatcagaaacaagcttgcttagcttgatcagttaacgtaattaatccggtcggaactagtctaatcacatgctggttaaacatgctaatcactcaacgggtgatgctaattaaacgaatggcacgtacgtcaccggcgatcccgtccaagagaaggccaaatcggaaactgaaatcaagttgctgctgatctgatctgaataaatttaatcagaaaagcatgcgttaagcaagcgatggaaacagcatcacgtattaacgacatccatcgataggtatatatcggtgtcgtgccagccttactgatcatctctggacacggatgatgtgcacgtaattaatctaatctgattgacgagattaattgcgtgtgattaccggttacgttacttgcgttgttttgcatgcgttgccctgctggggtgaatgcaaacacacagcatgaacagattaaaaaacaaagaatctgttagttagttctacgtgtgtacggagtggatgtttgcttcctaaccatagttattaatttcattagctttaggattagagcacatggtgaaataacgatggtccggattgttgctgtgcagtaacagggctttgctgttgggtgccataacaccggtcagaagtccatatattttaactaagggtgtgtttaattcacaccaaaattaaaagtttggttgaaattgtaacaatgtaatggaaaaattagaaatttgtgtgtgtaggaaagttttgatatgataaaaaagttagaagtttaaagaaaaagtttagaactaaactcagtctaagagaagttatagttgccttcactctaatcagggtggaagaaacacactatggtcggtcatgtttgtaacaacagctctacattatttaggcttaggtattttgaatcctaaatccaaaaaaatcatgaatttgaagctgcgagtacatcgatactacttggatgaatcattttatttttattttagatgaaaataaatacttttaagatagtacagtagcaatgggtgtatggttttaactccataatcccgtattcgtcacaaattataatcgactattatgcttgcttaaaatgtacctagaaacagttctctagcattgatacagggtttattttgtttcctatacataatactactactaagaaaaccgatcgtaagttgttgcaaggagacactagcctgcctggtccacatggatgtatcgactcaaaaacacctcattaattagtagaattcaggttagccaacctgtattgacttgagcaagaggtcgatccgagagggacgcaagcatatgcaggcgtggaatttcagcacaagtgacactgacagatgggtacctctccataaaaatacagaggctgctgacaggtggattgcatgtgtcatgttctggttgttgggctgcaaatagttcacttggcatttgagatgattttttcttggttaaattacgagacttgactcggatcaatcgaccaatcataccagtttaagtggcgctcaagttaactatgaaatgaacgtcaatgtattgttttattatcgactgatgtggggtgtaaactccttttaaactggtcaagttgtatgtgtactagttcagaactattatatctagagcatgcggataatttcagtttgattagtaatttactagtcagtatgtttggtgagtaacacatgatttgcattttgcaataatcaagcttaggcctatcttaactagcgctatactctgcattgtcctgtcacttactccattgcattttcaccttaatctatagtgctaatctgaacataagaaacattaacctgctagccaactaaaacatcagcgtcttcctcgtcagaagcatgacatctccacacctcgtggatctcatgtgtgtgtgatcaaatcaaaccactaagcttaggactttttgatgtgccaccaaatcaacactccatgaggaaataattggtccagctaatgagctaaatgccaataaaaccatgactccgtgattaattggccaacactattcacaagtacgagctcgcttttgacttctctgttgaactgttctgtgagacaatgtgtagcaggacaggcaactgctttacacattaattaccactagtagagtgatctgatgaatgttgcaataatatgagaattaagctgatgaatgtgtcagatgacctcaggtgtactactctataaaaaaaagcaactcctagctaggatttgtttttttttttattggaggggtgctctcatatgcacgtacttcctcagtactaaaaagatttcactttaatgagatagtaatatcactttaatgagatagtaatattttatatgtaagtactccctccatcctaaaatataagtatttttgaacttcgacatatttttaaaatgctattttaaccaataatattttaaaaataagatgttttaaataaaaggagttatatattatgatagtttgtttaatgataaatctagtaacatcattctttagatgattgatcttttttacgaagaactatacgtgctggcttttctgctgactgctgcagagcagccgtagttgcaagcagtcgagcatgccttatcttatctatgacagctgagtatacatccctcatccaatttttcacttttatacacatgaatttggacaagtgaaaaagtaagtttctttttggaggagacaatactactatcctatctatgaccgtaggagtatatgtcaaagctatctgggccgctaaaactatgtaggatagagccaaggcagtgtcccaactgctaaacctacctaggtttgactaatactctaaaaaaaatcctatgtcaagctgaggctcaagatgaacaatgcagaaatcataggaagtagcagaaagatcatatcagcttttcaagaacattattttttttctgaaattctttttttttgtaaaactactataataattgtggacttgttcctaccagagctacctacccaaaagggacataaaggatgatggctttgtgtttggcaaggtgatcactgttgctacttaccagtgacccaatcttgctacatggccatgcccatggccacttgttctccttcaccttgaaatccatgtggaaaagggatagtcacacacctaaccccacaaagtcacactctccagtgcctacaaagttgcaacaacaacatgcacaaaaagaggtcaaaagattggaagaagaggaagaggaggaggtgtcaaaaaggccttgacaaacgcatgtacgagattaaccatctcgtgcctcatatgtgtccgagatgatctggatgcaacacttgtctagaatccagcaggcagctgggttaaaaggtaatgtaaaaaaaaaaagctgggttaggatcatgcacggtgatgttgatgccagtgatgtgataatgttgagataagtactgtggttaactgggggttgataatatctaatggtaatagacttgctgcttgtcatgagtgagtcctcgattgtatggataagatctttgtccaaatcaaaaactaaaaaaagaaatgaaagaaaaagaaaatgcacgtacactggctcattaatttggtagactattctggacgatgttcgttttcttgaacacatctgctgcaatttgagagttgggtgatgaaagggtgagtggtcctggagaatagaccggtgatgctgttcactccacacatgtaaagggaacaaaaacttcgtttttaatttaagtagttatacctgaatcctgatagaccgtaaattgtgccaatgatagatttggtaagaacagttcctcctagtggaatattcatatgcttcatggggtacatgctattctgcaacaattgcatattgaaaaggggattatcttaatctaattattattggatggatatgcagcttttcacaaggaaaataagttgaagtacttcctttgtgtgcttcaaactttttcaagagatggcatcttgcatgaacccacagtcattcttgtcagtatttgaataaaagaatgccatatggatgctcgcactattacctgaaagtactccactctgatgctctgttagttgaagtccagcctaagcatattctggtcattctattcagtagcttgcgttatgcctttcagttctttttttttttttggttagtatttcctcattcataaatggaaataaaaaagtaagttcagattcagatctgtaagtagaggtttctgaatactacatcattgctttagtcaattataccttttatatacaatatctacttaggttagatgtgttgagctattcctaacttccatttatcgtcgacagttaattatactacttgtaggatgtgtatttttttaaggatgcattgagcgacagtggtatacttcatgggcttctaaaccgtgcgagcttcagaaaagaactttttatatatataatttttttaaaatattttaaatctacttttaacattataatagttaattcatttatttttactctcgtaatagtgattattcaatcaactattcagtcattcagttattcggcgaaaaaactgacccacatatcctagtagtaatttatattccattcaataaaagatcacattctcctctgtaaagaaaccggagggagtacatcatttttacatactattaacttattatccatttattacaaacaacacattattctctgtaatggaaaacaaaatctgcatcctgaatttctcataatgttcactgttacctcgtcgtatgcaacaaaaagatggcatttaccagtttcctcttggacagcacaaaacaaaacaaagcaaagttgctcactagtagcaaaaaaaaaaagaaagaaagaaagaaaaagaagaaagtatatataaatccagctcaaggagatgcggttgcggcaatgattgattgatttgtattagcccccttccactctcgcgttttctccccttctctgcgtgtttttgtggacgacggcgtcgtcgcaagcttcttgtggccatcgtcttccccccctctcctccttcctcgcatcctctcctccctatctctcacaaaaatccattcttgcacagggaattttgcctactcctatttacgatccttctcttcccccctctgggcggccaaagctctcgtttttacgcgtgatttcgtcgtcttgttgctgctgacgagcccgctgattttggctcgatttaatcccattttacgggtgttttgcatctattggagatccaaaggtgcgccctttctgggggtatcttggggggaattggatcgatttcgatctgtctgagtggttctctgggcgttgttggtgcgttcttgatccgagaggtgagagatttggttggattttctccctggagcatttggtgtgctcgagcaggatgctctatttgaagcagccgacgaggagctgaactacgccgagttgtttttcccctctgattttcttggtttgaatttcgcggcggtcgtgtggttcgcttagctgatctgatctgatggaggctatgacgccagacaaattccttcagaagttccggctctacgagaccagatcggtagggatcctcttacaaaattttgtattctcatcgttttgatttggtatgaattgggttgtaggttccatatatatgaagagatctatgtgtcagcaattgtagctcacgcgctttactttggtaatcacactgtaacttatatgtaattacattgtaacgtgcatgtaactacagtgtaacttgtatataagtttcacgtaattttgaatcgttaaatctattacaagatttgctttggtaaggaagaaaaaaaaatcacagcacaaacatatgtgtaaggatttgttcccacaacctccattttaccgaaataacatattacaaagagatttttgaaagttacatataagttacactatagttacagtgtgattacatgcaagttacagtgtaattacactacgattgtactgtaattacatctgtcaaatttttaggagaaaatttgtcgacaaatatatagcaaaatcgtatcacatttagccccgtggaccaagtttctgggccggcccaaaactcggataaaaaaaaatctaactacttttccggcccagctattcttttcgtgccctttcctttctcccgaaaatacgggcgcacacgtactccgcatcgcacgaagcacgaaacatctcggatgaatgtgcgggccccacctgtcagggacacacgtcccactgacctgaattcaccgttttacccctccccgttccaacggtcgattccctctgcctgccctctgctttacttgacccacgaggaccacgacgttgaaaaggacccaaaaccccattcctctctgcctcttctctctctctccctcgcttaaacccttcttctccagcctcgcaaagccgcagcaaatcgagtagggagaggaggaggaggaggaggaggaggaagggggggagatggggatggggatggngaagcgtcnnnntnnnnncngctgccgtacggactccaagacacaatatatgtatgacaggtgggatcatatattaataggctagtaaccaactattgtataaattgactattacatcggctataaacgaattagacttagtagtgggctatactattaaaattgctcttagactatatggatatgaaccctataaaatccattcaaaattctgaccgtactattagtacattttacgggttcatgtgattttactgtagtatcaaactggagtatcatcacacgaattcgaaacccaacaaggcattcaacacagtgaagaagagctttctccggttttgagctcgccgatccttcctacccaaaccttcctccgcaacaccatggactcccctcacccaaacgtgtgcgacc

SEQ ID NO: 5517 - DNA, 25534 bp, Oryza sativa
tggcttggaaggggcctaaccattgggagtgatagcacggtttaattgttgggcctcattagcgccaaagatgtcactagagaggtaggaggtggcatgggatacagcaaagtaggatgaaggagaagaccggaagggagatatcttaactgtttgatctatatatcttatacctagaaaatatgatcgttgacctagctaaaacattcgagtattttgtacacagtcccatatatacttcaacacattcaaaaaaaaaagagctatgatgttctatcatgctgtgaaaagtattacttcctctgtcccaaaatataagcatttttagaatagtgtcaagtcaaacatttttaattttgagtattaatagaaaaaaaagatcaataatgtaaattagatgttactagatttatcattaaacaaactatcataatatgcaactccttttatttaaaacatcttacttttatagatattattggtcaaagtagcaccttgaagactgtgttgaagtctaaaaatgcttatattttgggacggaggaagtattatatactcttactctacttagtataagaggccttggttacaacttacaatagctcctatctggctatcttagttcttacggtgattatcttatttggccaacaacttcattcttatagcaaaccaacagagcacataggaaagtcaatgatcctcaccatatagctagtgccaccgataaattgaatgatcaaaaattaggagacaaatttttaaatcttttgttaaaaaccttgcaaacacatccgttgttcataaagatgtacatagagtactttaacctctaaacaattctaataccaccataaacatcacggggagtacaaccggccaaaaccatatatctaaatagatctaagggcaaggctaatatttgttacgcaacatatagcattaaaataggtcctattgtcagttgatcgtagttgttaccttagcacgaaattaagttctcgataaataatatatgtaactcattcataaataaataaaaactatccaaataagccttttattaggtggagagagaatggagcagagggagaagagagattctctgatctttttattcgctagcgaccaatcgcaaacttatgattatttttttttgttatgacttagcttcaatgtcacaatagctatattgttcaccttagagactttaatgttacttttttttacaacattgcgatgtcctaaacatctaaaaaatttattccaacgaaactacgaaaactagctacagatcaatatgagatagacaggaactgacacggagcgcaagtggtgcaacaatctcgacgcaagttgtgaaactgagagaaaaactttttaactcacattataattgattagcctttctccaaaagaaaattaactcgatctatttcaaaaatagaagataatttgtcgttttatacggtgttgttctgtactaattttttttagacaagtcacgcgggggccggggggattccccacctgaattttattgatgttacaaaggcagttctacacaacatttagaggttggagggaagaggagaaaatgttcttccaaatcgcaattacaaagcgatcgttgcgcttaattcgttctagccatatcccacactcttcaacacacttaagcaaaaccaactgaagttagggggctgcatttcgaaagacaacatcatgtctatggttccagagcgtccaaaaatataacatgaagaaaacttgaaaatggagtgccggtaatcccccagagggcttaatgttcgccaggtttttgacgtcctgacccatcatattcacgctgattattgtcctgacccgagggcagtgcaggttgaagtgcctggtattctccgaggcattggcacagatatcacatgtatcaactgaaacaattccctttttgatgagattatgctttgtagggagtcgctcttttgccagaagctaggcgaagaattgcacctttagtggcgctctgttgttccagacgaagctccagtttggacagatttagtgcagcattatcctggagtcatagttttgtttggccaggatgatttcaagatggggagttcctttacttttccttttgttagggcagccttgaagaatgacctgctacaattccactttaagtagagctaaatcatactgggctactaaggacaagcgaggaacaagacaggtggctagtcctctgcaaagaacagtcctgatagtggctagctgatccactgcatgagagaaaagggcagcgaggcgaagcttgagaggttgattgcagagccatgagtcacactagaaggacgtgcggaatccatcccccacctggacgcttgaaaggtcttgaaccgtcgggatgagagattggagggagcgccagaggggtccaaggttcaagtcatccgccaacgatttgtcctcagcttcctactagagccacatagaccacgacgaatttgagctatgcggatggaacaacatcttgattagcagtgtgtcgttttgcaacctgggagcttagaggaaaacatagcaaagactgggatattgttcaggactaagttgataaggactatgtgctcggcatatgagagcaggcttgcctcccatccagctaggtacttgtacactttagcaattgttggattgaggtcctgagctcgcagcttatggggagagacagaggtagtcctagctaggtacgacaaagggaagctttccttcttgcagttgagaatttcattgatctggcacctgtgacccaagcattgcatatgattaaagtgtcgtctgcgtattgtattgtcacacaggggctgtctgggcacatcgggtgtgagattctcattgtgaaggaggagtctttggagaacatcagctacaagaatgaacaggtgtggcgatagaggatctccttggcgaagaccatgcttgcagttaatccagcgtcccgagactccgttgagaaggattactaacttagaggttgaaagaatattctgaatccatgtattccaagtggtgttgaagcccctggcggtgaggatctggaggcggctatcccagctgatggaatcgaatgccttggcaaaatccagcttgaggattagggttgggcattttctgacgaagcaggtttgcatcagttcagtcgcaaatatgaaattcttagtgatacttcttcctttgagaaaacctctctgatcaaaatggattagctcttgcagaatacgatgaagtctgtttgccaacacttttgtaatgattttcatcgagcagttttgtagagagatcggcctgaaaccatctggtgtattctcttttccaggtttcagaatcagaacaatgtatggccgatttatcctttcaagatagacatgttgtagcgagaatctttcaaggagattcatcacttctgtgctgaggagatgccacgttgcttggtaaaaacttggcccgaagccataaggtccaggggcgttgtttctgtccatctgcctgattgcaaagagtgtttcttccttggagaagccgcccatcagactgctcaaggctgaaggctgaactgtgtcgtagagcattccaagctgaaaagacactactacagaaaagcccttaagtgccggttgtgaaacttccaaaggtgccggatttcccaatcgacaccccggaggcggcactgatatggtgaatcaaaggtgccggtttaggaaccggcacctttgaggttccacgattgaaaaaaaaaaggtcggctcgactgcagttgagccgataactgattccatcaagaacacacattccatcaagaacacatatgaacataaaaacacaacatgaacatatgcctcttctgccgtcgccactgcacgtcccctcccgccggatctggcggaggggggggggggaggcgccgaccctcccacccccgccgggccgcagccgtctccacgacgtccttccctccgctagatccggcggcaggggacggatggcgtggaggcggcagaggttgccgggcgacggcggccgggacggtggaagaagcatatgttcaagttgtgttcttatgttcatatgtgttcttgatgtttgttcatgtgtgttcttgatggaatgtttgttcatgtgtgttcttgatggaatgtgtgttcatgtgtgccttttttaaaaaaacgggcacatgtaatatgttatagataccgattttttaataaaccggcacctataatatattataggtgccggattttttttaaaaaaactggcacctatattattattattgatgttggtttttctctaaaatcgatacctatcttcgtttaaaggtatagtgccgacttatacgtttttttttttaagtagtgagaccattgcagggattcagcagatcctaggatgagcgagtaatagttgaacatgacttgtgccttgctgttgtggtcagaaacttcggtgcctgccgccttgatcgatttgatggaggttcgtccgaagttgttgtaggcatgcgctttgaagaaagcagtgctatctaacccgagcttgagctttttaactttcccgcgctgtttctagtaggccagtttgtcgttgatagaagtggctagtttgtgctgtactaaggctatgttcgttgctgtgtgttggaaacatatttctggcgcgagccgaggctgggatttttcgatgaagtcgaacagatcaataacaaacttgtagtcattaattttcccctgactcttttgagcttcagttgtttcatccaagtattattcgttttggatacgtccgccattttgtaacatcagctaggcgaggcgaatcaatttattttgttgaagttgcagcacgaattggagcctgcctgcatgcatgcacttggaggatccaaagtctcgtatggcagtgggcagtggcacatgcacatgtatgatcatatatgcactggcaatacgtgtattcgtatacacggatctcgtacatgcatagccgcatgggataagtagtactcaaatatgtcatcagcgatgactaaacgaaatttataagatgcgtgtaaactgatccgtacgaggcattccagaagagtctacacactgcacttttttactctgccgtgacatgtcattatcttgggctaaaaataaaaaaaataaaatagcgtcaaatagaaggcacacactgctgtgcaagagtgcgtgcacgtggcaaccacgcgctcggggtcaactgtgcaagtattaggaccggactggcattccatatgcatgcacttcgagctggcctccatgttcgtaacagatgagtccaaaaggtaaaccataaagacaacaaagtcaggacagcgaaagaaagtgcaagttgatacatataggctgcaaaatacagcaatattgctgcttctttgtaaagcttaatttgaaaatggagccaatggagtcgatcctagctttgtcgtacactggtacgaaaatactcactctctcttccaaaatataataatataatatcacatgagacattttagcacaaataaaaagcttgttcatattcgtaatattatgatatgtcttatccgatcataggttcttatatttttggattgagatagtatgggctgtttggttcaatgcttcagacatcttagcacaaatagaaagcttgttcatattcgtaatattatgatatgtcttatccgatcataggttcttatatttttggatagagatagtatgggctgtttggttcaatgctttaacttgccacatcacactttaggatgccacacctccttagccttatgtttgattcattgccatagttatggcaagccacactttcttatcatcttaccccacatgtcatagactcaatcatttgtctaactttgctacaagtgtggcttacaatttgtaggccacaaaaaaatgtggcaaagccacacttgtctaacattgcctaaagtgagttatggcaatgttagttaagaaccaaacgacccaaatattttgcatgtggtccgtaattcattacatgggtgtttttcaatcggcctataactaatggcatgtaaaaatcacatgatttttatggacgcattccacaaccacccgtgaaaattgattttcactggcaactctcttaaggaatcacatgtaaaaatgaatatcatgcttttgattttttttaactgtaaaaaagaaccccccaaaaaaaatattttagatttttgtaggcatctatagacgcaaaattttactggctttcccttatgtgaaccgaccataaaaaatattttaagggcgactctttaaaatgtctgcctgtaaaaatcattttagggtgtttcgttaagaagtctgctgacaaaacccttttttctttattctttgataatgactaaactttacttttttagaaaattcattttatgtccgattaaggtgaacagaagttctcaaccttacaacattctgggtcgatgtttccttaaaatacttcttttgatatgattgttcacttatgtcctgtagtctctatatgttgatatattgcataatgaatgggcatactaaaagaaatattaagtagctcatatcaaagaaaataataaataaagataacaatctataaaacttttggtttacctcgattgggccaaatatgaattttctagaaattttcaaactttgaactttctgaacaattccccgtaataatagatatatcaaagcctgtaatgaatattagccacctgaacgatctcatttataatagcttttaataacaaagttgtagatctggccgagctcgataatttcaatatagaacatttctccatccagcgttgtttggaaaactaaaaagtagttacgagaatagtaacaaaaaatttgccacactaaacaacctaaaatgaaacaactttaaactgcaaagttataggtttcatcaagacctacaattttcatattaagtttgtcatcatccgacttcacatgaaaaagttataatttttttcgtattttagtggggcttctagttttaacgtcttgtacagaatgcatggtccacgaaaatagattttataggtggatttctttgggatctgcccaaaaagtatacatatttttaaaggggaatttcagaccaacccgtaaaaatagtttttttaacaggcggttatgaccctaagacaacctcaaccatttccacaagtattttttcttttggatcgtctatgtgaagataaaagcctaatgtccgaaaaaagactttttaagtagcatcactaattaaggtgtagggttaattcttaaaattatttgattttgtcttcatgatcgactaataattctattttgcatataaaagtctaactaattgatataatgcggtatttggttgtttgttcacagctagaaatccccgaatatatggaccgaatcccgtacggggatcagagaagataaccatcaaatgctatgaagccaaattgctttgaaatgtttttgttggcttcttgctaaagaaggtccaacactgtatagtttttgcattgttattatgcatgtgcatgttactatttctgttataggatgttgtaacatcccggcctagggcttaataggattaatagaatactcatatcaacaagttgcaacttcttttccggaagccagtctggcctggagcaatttgggatgggtgaccgaccgggaaattcttcccgggtgcacacgagtgatcagagccgactctcgcggtttcacgggcgcgtgtgtcgcagttgcgcaggcatggtgcgcatggctggtgtagaccgggagtggttacacagcatggcacatgcgctggcactggacacatggacgtggccaagagaggacgttcttggcctagggttgatcgacgggggcgtcgatctctcttaagggggtcacatggacgtggccaagagaggacgttcctggcctagggttgatcgacgggggcgtcgatctctcttaagggggtgagggtgtaacatcccggcctagggcttaataggattaatagaatactcatatcaacaagttgcaacttctttttcggaagccagtctccaaagaactccagggttaagcgtgcttggcctggagcaatttgggatgttggtctgtgagggcagtctatgacctatgaaagctatcagatgtaagtgggcccagacatgtgttggtctgtgagggcagtctatgacctatgaaaactatcagatgtaagtgggcccggcctgggggaggcgggacgttacagatgtaaactacatctttgtaaagctttgaaaatggagccaatggtgcactacttccatcacactagggtttcatgtggccataggatgtgttggtaaattttgaaagtttgattgtcattgaatgtgacaacaaggaataaatatatttcacatctaaaaataataataggcacttgagttatagaatagaatcagttgttaaccatcacatacttacagcaccagatcacgctacctataacgtggtttttgatgcatatggcttgctaaagcatgtccaacaatttgaggattatttttttttattattaggcacatgcacatgcatgtcattgatttttcctgtgctatctgcataagacatggtggatgaagaaaagaagagagagaatgtatagacatgataataattttgattcagctggcatctttgagttaaagtaggtagatttaggaagggtaaattctatttttgccctgaactttgttcgaactaaaaagtctatcatttacttttaactacaaaactagttattttttcaatctcaattttcaaaacaagacaaaaataacaccataaaccatatttcaaggtggctttgataagaaatattggtgtgtgtacatgtgttttttttttttgcaaacatgaaattcaaataggtaaattttatggttgtcgacctaattgatatctacacgggtaaaatatgtataataagaatataaactaagaaatccaccttcatttcatccaaagccacaaaaaatgatataaggtgttacaaacggttccattgtttagggtaaaaattaaacctcgaggagttcaggaacaaaaaatggactttacccatttagcaaaaatctgatatacaagatatttatatagtcagacagtcagcctccgtttatcctttatccttgtaatctaagacgactatttagacgatatgcaataacaagaaagcattcccttgagagattaaaatccatttcccggtcgatcgaagtgcttgcactatgggatatataataattcagtaggttttggaacggggcgctgtcaaatgtgattctcaatttgccaatttgcttaagttgtttggtgaaatttccgaacaatggaaacaagaacaattaaggattactgatgggactgctcatttataccatatttttctccttaattgcatgaatcgtacatgattgtaatacacgaccctatccatgactccatgtgcctgtggttgccttgctggaatcaggtagctaaaaacttggtgaaggaggcaaaaaaaaaaagaaactctacagtgaaagtcaaagcctcgtccaattgcatccagcttcgagcaggcacttggacaaaacttataaatagctctgccaagcatgacagagcatattcatcgagagatcgaattcggttctcgtctcgatcatcagtttggcctgtcgatctctgtccatctctgacgacgccgacggccatgcagcagctgctcgcgatgaagctgatcctgacgacgctcgtcgtcgccgtgctggcgctgtccgccggcacggccacggccacctgcgacacgctcacggtcgggcactaccggcagtcgtgccgcgccgccgagaccatcgtgcgcgacaccgtcaagctctacttctcaaaggaccagaccgtcaccgcgccgctgctccgcctccacttccacgactgcttcgtcagggtaaaaattactagcatatactctctccgtaaaaaaaaaactcaacttatttgaattttatctcacaaaaactaacttctaccatcttatttatcctccgtatgtaaaacgagaagttttatttcttcaataccctttacccacccatcactcttactatttttatcaatgattaagagtattttagtcattctctatctctactacttctattattagatttattttgtaacggagggagtatatcaattatcaagaacaagttaagctatcagcttgtaattgacagctgcaaatgtggatggagaacttacccaagtttaaaattattattggcagggatgtgacggatcggtgttgctgaacgcgacggcggcgagcgggccggcggagaaggacgcgatgccgaaccagagcctggacgggttctacgtcatcgacgccgccaaggcggcgctggagaaggagtgccccggcgtcgtctcctgcgccgacatcctggcgctggcggccagagacgctgtctccatggtttgagactcgctccactgatgaattctcctgttactgtagagacgatgagcaatgcaaaagctgatgctgatctgatcatccgattcttgctgtgctctgtcttttcaggctgccgggaacatcaatggcgcgagcctttggcaagtcccgacggggcggctcgacggccgcgtgtcgtcggcggcggaggccgtggccaacctaccgtcttctttcgcggatttcgctaagctcaaggagcagttcggttccaagggcctaaatgtgcaagacctcgcgatcctatcaggtatagtagtgctaaccatggacgattctaaagctacgtgcgatttgctgtactgttcttgctgtatgccgtgtcagagtcaggcacaatcttggtcttcaggtcgggtcaaaatgacagaatgaactgaacctcaataatgacatttctgactttttttctgtatggagttgctttcttgctttcttattaaacatttgcgtgttcagaaatcatagaaatgttgaacatcttttaaccttttttttcaaagcgtcaagtcacattccgattaagatatcattatccctggcaatttctcgaaccgtaagatgacactgacaacaagggagacagtaattaacacagtaaattatattaattcctttacatcactgtttcaggtgctcacgccataggcaattcacactgcgtctccttcgccaagcggctctacaacttcaccggcaagggcgacgccgacccgacgctcgaccgggcgtacgccgcggcggtcctccgcgccgcctgcccgccgcggttcgacaacgcgaccaccgtcgagatggtgccggggagctcgacgacgttcgacaccgactactacaggctggtggcgagccggaggggcctcttccactccgaccaggcgttgctccaggacagggaggcggcggcgacggtgcgcgtcatggcgaggtcgagcaggcaggcgttcttccggcgattcggggtgtccatggtgaggatgggcaatgtcggggtcctgacgggagccgcaggagagatcaggaagaactgtgctctgattaattgatgggcagagatttgatctttgatataagttattactaagtcatgtactaatgatgttctattgtttggtgtctaattaagttattactactactacaaggtaaatttcatgagggaataacttgctcggcattgtttgatttgttttatgttaatcatcgacttgttaatgtactcttgcactgatcttctccatgtatgaaatggcagagccgctgccacccttctccagaaaaaaagatgttggccatgttgacatttcttctttatttttttgtcaacattatgagcttgagaggatgagctatatacttggatgattctatacctttgctgtctgcctgtcagcattcaagcccatgttggatacatgttcagttttcagcccacccaagggacgattttgggcccaatattcacaaggctttgacacatgcagacacaaaagtccacagcatagaaaggggaaaactgcttccgaaaacactttacccgactgacttttactgaccactttaactccccaactaccaaaatatcactttacacttcactccacagactttgggtagtacaatattttatattacctcagtcgtaaaatatagctatttttagtacaatactttatctaaactgaaactatttcttcacttatcttcttctcttaaccaattacaaccattcttttttatctactttctcttctcaaccaatcacatacttcctctaatcatttttatatttttttaacccatattaacctaaaaaaatacttacatttgaagtatatgctagtctcctcggagacgtcttataatcttatctttttactttagggcagtgttcttgtttattttactttatccagcgtcgctagaagaacaaccattgtataggaagtaggaaccagtgcagtttaaggttcccatggtttctaacgaatcatggttttgcagcatccgcctttgcgtttacccacgggcgaagtttcgccaattgttctcatccggatatcagcaagaaccttaagcaaggaacccaagaataaaatacagaaatatactcctagagagctagctagcctcgctcatcactcatcagagtaccaatcccctttatacctgaacctttacaacatacacgttcaccgagccatccatcagccagaagagaatttgatccctatttgagtttccgtttcactttccagcacaagtccaacggccagggctcgatcaactagccaggaatcacgcagtgctctgctctggatatcgaatgttggcatctcgatcgcttttgggcagcaaggcaagaatattacttgccttccacacccttaatcacatgcacggcccccatacagacgcagctataaaacatcacgaacgccatgagaagatgtccattgtccaaagccaagagcagcagcagagggtagctagctcgaacagcacactactgaagctgatcagaaggaagcagcaaggcaagcaggtttagtttaagcagcagctcgccgccggcaataatgccgccgtaccggctgccgatgtaccgggagaggccggcggtgaggtgcatcaacttcctctgcgccgtgctgctcaccatggtgctcgtcgccggcatcatcatgttcgtgctgtggctcagcctccggccgcaccggcccaggttcttcctcgacgacttcaccatccccaacctcaaccggcagtccggcgccgtgaacctgccggtgaggttcaccgtcgacgagcgcaaccccaaccagaagatcggcatccactacggcaccatcttcgggtcggtgtactacaacgacctgctcgtcgcgtcggggccggtggtccagccattctaccagcagcccaagggcgacacgccgctggccggcgagctcacggcgtccgggccgacgcccggcgacccggcgtggcagcggttcgccggcgacgcggcggccggcagcgtcgcgctccggctgctgctcaactcgacggtgaggttccaggtgcagatgtgggacaccagggagcaccacatgaaggtggactgcgagttcggcctgcgtggcgacggcacgctccagcagggggacaagaacaagcagtgtacgctctacttctagggtggatggaccgtatcttaatttttcctcgatttttctttgtgagtggttttatatttttcatcgtttggattttcgagtgatattgattattactttttaccccttgttgacaaatgtaatttgtttgtaactgtacattaattttattaaactgtctgaattattaatgttgtagcgcgagtgtatgtgccaggttctttgtctaattatatggtactataaacgatagactacttgatattgagagaatattttgagggtacaaacggattaatgaactattataaagtaaaaaaaaagctgttttgaagtactactcttaagaaacttgtgtatataaaacttttataaaaatcataccgtttataagtttggaagagcgtgatgatgacaatgaataatatgtaaagaggaaaataagggggaacagagaaacgattgatcgaaaatagctgattgtttttcaaggtttcactgggatcggagaagggtttaatgtccagtgtaacggttgaaggtatgacaactagacaatctaccatttttgctcatagttttctgcaagcagtcaattgtacaaaatagtgatgttttaccccccaactttatggggagatgtacttctttgttctaccgatggctcagtatagttaaggaatcattattaacatggactcaggaaagattattcacaatgtatacccatgagatgatgagaatgatcagggcatcaggcagagggtaagtattaatacatcatttgggaaggtataatatttatgtgttaaccctaaccaatcataaaatcttggctaatacaggctattaaatgttgattctgtcaagctgcaaacaatttacaacaaaactgcagtggtaatttccacatactccagagacccagatacacactaggacattagtaacctggactcaccaatgagcaccagagttgattgatatctgtttagctttcctccagtctccgcaacacagagtcagcaaagatgcgctgcctgaaaattgaaaaccttattagaaattcaactgcttttagtgagagagagagagagagagagagagagagagagagagagagaaagagagaaggaagaatcacgcacttctcttcagtgtgtttgggactagggcggttgtgtttcagatacccgtcccacggaaccttcttaagaccagctctagcagctatcatgtctcttactctgtggaaagcattccattaagtatgaaaaaggcagtatgtttctcataaaaaaaactagaatccaattttatgctacctttcagcaaattcaattgctgtttctccatccctcagatactgaggctccaagtaccatacatcacacacaactgcccatgatgtcataagcctaaccaagtgcattgtaaacgattgcctgacaaaaattacgagaagatattaagtgaaatacagaagaagataaatgtgaacaaagtaaatttgtgcagttgattgtattcctcacttcttactattccagaaggcatcaacaaatattttattgtatttgatagctattgggcatacagcacagccaagctcaaaagcaccctggaaaaacataatgagaatgaagacaaatcatcattagtctgatcgtggtcaattccagcaaatgttaaaacataacaagaatgaagacaactcatcatttgatagctatttagaagatgacaactttctagcatttgctatcttttaaacatgtcaggcatatgattggcaatgagtatgttcgtaccactactagaaatactcaactactcttatctatctgccaaaatatttgtgctatctgcagtacctctttctttttgcattctctgtccatatgtacagctgtgagttaattttaagtgaactcatgcatttttaaatataaggacaattaattctaccctttttaagtttgaaacttgcagtatatttatttacgaccagccacaattcacaagacacacttactttgttagtatattttttacaatctaaaaagatgtcatatttatgctgtacgtactgtaagggctggttttctgcttgaagcttgttaaaaatgaaccaaaatttgaagcctctcttgaaagttagttacacaaggatgcatatttggtcatttattcagtcacttcaaaagaacatatcaagtttacaactttaccttcttgaacatgacagtgtactggttgttaacacaagttccttcagggaaaatcaggagaggattgctgtctggatgttgaacatgatctcgtaacctgttgacagagttctcttaataaactgaactatatatagtaagtaatgcattggaaatgaaaaattatacttttttgcaaccacttcacgatccttgagatcattgcgattaaaccagatgcaaccaacactttccaagatagtcttctgaataaatcctgtacaagggaggaaagcaaattttatcaacaatctagcaatgcaaaaggtagagatcaacaatccatcctgaagaatgagaactgaccaacccatccaggatgcttttgcataatgacagcaaatgctgtcatctgctccagaataatgaaatctatcatcgatgtatggtttgcaacaaatacctgtggtaattagaatttagaagagagttgcaaaggatatccgtcattcattaatggatgaacatgaaattaattaagtaaaacataatgaaggaatgacaatgtgtacctaaagaatggtttctgcaaatgtttgcatttaaattggaattatagaccttgtgaaacatgaggagattttgtgatagaaaggataacttttcctgaattatccaggtgagatttccggggaacaaggctaagttaataactatgatgtttggcaacagtgttgcgcaccacatgttcctataagtgcataaactacttaacatgggttctaagagaaagaaagtttgtaacctgatgaggccgtgtgcttgggcgaggcccatgatacttgatcactccagtccaagaagcaacaaaaacactgcacatcatttcaaccagctttctctgcaaaaaagattacagtgtttttgaataaacaaagaacctaagttgcaaaatattatgacatattatggctgcatatgaacatacacacatctacaaccagaaattgacatagatgggagataagataagtcacctctattttacttctcatcttttgacctttcaataagaaatgtacaggaaaaaaggcagcaaagaatgctaaccatccaactagaagagttaggcccctgaaacataacatggttacagttatcagatgagagtgactcaatattcgacaaaagaaaagaatataagctagatccagagacagaaaataacttttagtagtaatacatacacaaagataccgaaaaaaaaattctctccaacatttcacacaaaattcaaatgagtttcctgaacaaagttggtcttgaaatattctgatttctgacgttatgtggaaagtgattgtaactgaccaaaaaaactcatagcacatggttaaaaacatctacttcattgccagtttggacaaaggttttacagatcaaatgggctaggatacccttgtactacaaaatatcaagtcaacaaagaaggatacattgcaaacacttacaaaacaagtaaactaattagcaaaactgccgccctaaatatagtgttcagattataaggatccagtacctcagcgggaatagtattccgtatcttatcactactcccaagcaccacaatgggaataaataaatgttccaattccatggctctggagaatttgacttaaagcaacgtgtgaatgaatcctgtatcagtgtaaacacaagcaatgagaaagctagacaacatcgatcacaacaagaagaattgccataagaacgactgctatttatcccacaccgcatcacaactgaagttacgtatgcacagtagtaaaatgatatgaaacaaagatgcatgagatgtcaagtcattatcttggcatactctcactaacaggctatggaagtacccatatacttgtctaatacgaacaacattataaagaaaatgttatcatgttcctgttttaaaccttaactaagggagatttactgctcctttaacttgaagttttgaaaatagtgtcaaagacagacatccttttcttgttccaccgatatatacccagggcttagatgacaactttgtaaagaacatcgaacttagggttaattaacattacaacattaattatattttgattcttatacaaaattgattactgaccacaagcaaaatactcttttcctcagtaataaacgagagtgttcaaagcgcgaaacaatccagaaattgtcctcaagggaggccataaaataggaaatttaaggtaaatctaactatatgcaatattgacgaaattgtacatattttcggagattttgacgcaagaacagagtatgagagtaatcatatgaaaaccgtacaaattcaaaaatttgagcgaagcaagcctagccttgtttccacaaaaggattgctctactcctttcgctaaacctcacagatcaaagcctataaacgtcctatctgctcttgccatctcatagaacatcaccatctaataacctgagaacgcacgaaacggggggggggggggggggcgattttaagacccgggtaagccactcacatcgacgatggcgcccgccgcttcagtgagcaccggcgagatgtccagcagatcgcgcctgcacgatggcagaagagagtaaagaatcgcctaaaaaatatctcgccaaaatcccccacataatcccaagctagggttaacgagcgaagaaaacaaagacggggaacagagagggggctagggcgcgattacagatggagattcctggggaactcctgcggcagcgagtcggatgggaggtagtcctccaggttcggccggtccagctcgatgtcccccgccaccgacgaggtcgccatccccccctccgtcgatcccctccgccgccgccgaggaaatcttcgcgatgaggagcgagagcgagagagatgggcgcaatgtggcgtacgtccagcgaatcgatgcgtgggtggatcggtggaccaacagacagcgaaggggaagagagaggctcgtcaccgggtgggccccgcacaccgacaggtgggcccactgcagcgcctacatgggccggctcgggtgaattagttggccaaaactgtcggcccatgtaaggtccataaaaccgaggtttacccttgcgcgtcgccgccactcgcaagcaagcagccgccgccatggcgccgccgggcaactccgacgagctcgcgagctccaagaaggtgaagaaatctaactccaaggaggagaggaagcacaagaagggcaagcatgagcgccccgccgcctccgacgaagcgccgactccccgcagcgacgcgaaggggagcaagggcaagaagcggaagcacaaggacggggagggggagaaggagcacgggaagaggtccaaggagaggaagggggagggcgaggcggcggaggcgaggcgcggggacgacaaggtgaggcgggcgatggaggacgagaggttcgcggcggcgcggaccgacccgaggttccgggcgatgcggcggaaggaggcgaaggtggagctcgactcgaggttcaccagcatgctgacggacccgaggttctcgtcgtcgtcggcgccggtggacaagcacggcaggaggcgccgcaagaagggtggcagggagaacccgatgctgcagtactatctcaaccaggaggaagaggaggaaaaggagaaggccaagttggttgaagaagaggaagaagagggggacgcagaagagcagcaaggggaagaagagagctccagtagcgacgacgacgacgacgatgaggacgaagaagaggacgatgacgacgaggtggtactttgcttacaattttttgatggtttggtttatatttcgttcaattctctcgcttgtagcatggaagtactttatttactttatacgtctcgtccattctacatattatatggtagatgatagtgattagctcctccaagaactcaattgcatatatcttgtttggagcatgatttgtaggggactacttttgagtctgagtttagttttaagagcattaagtacttcttgtttttctatcaatatatggtcttggtcatttgtaaccacggtatgttcaatctgatgttacaagtgttatgaactgttaaacttttttttttgggccgaatgtgtaggttatagagctatgtggttgtaccaagatatgcgtctttgtagctacgcatttttaatagtcgactaaccaaaaaaaacaaagggcatgtgtttgtgttgtggtatttgacacaatcccttcgaattgcttgggactcaagtgcactttgtttgtccaaatgtccaattgaagggattggacataaacccacatgtcaaagaccctactttactcatgtactcagctgacaatgacatgccactgttagtatttttatccaccatcctgccgcttaaatctattttttgagttagccttgtaatttttgtattttgtaagcattgattaatgattgcaatatttatgtagttttcgcccttcaagaaaaaaaaacaatgttttgcaacattattcttgcattatatctaatacatggtccttttttttcacagtactctgtcggcagtgacattgcgcattatttgatgggcaggcatgatgatacacctatgattgacaaggaaacccataggcttgctgttgttaatatggactgggatcatattaaggtgtgtgatgattgaaaataattatttttttgtcaagcaaacctattagcataaacaatttacagaaatattaaaaaaggctttgttactggatgcttaagaattaccttgaaaccaataattttactgaaaaaacttgtttattatgtgattacatttttttaatgcttttgcttttatgagcgcattggtagcttctatcgaacacttttgtgccattggggtgatgtttggaaaaaaattgtctgctaggtggcagcagcatttacagagtatgttttatggctgaaagatgtttatgtttatttcttatgttctgtttaaatcaggtgaaatttctatgtgtactactctcttttcttttagttgaggacctaatagtccaccatataaattcacttattttatcaaacatagttattgaggatgctagttcttgtaaacaaatgtagttgcatctaagttcttgtaaaaaaatgttgttgacagagcagtgcacactgaggcacttggcgaacacatatccaaactctaaaaatgcttggactttggaaagtttagagggcaaatccaacttagcaaaatcctggttgttaaaatgaagatctgagttgttacattgttattttgtctccttgcaactttcaattgattagttttgttcatccttcattgtacaataatactatattttgtttgcgtccttccaataggcagttgacctgtatatggtgatgacatcttgcctcccaaaaggtgggcgagtcttatcagtgtcagtctatccatcagaatttggacttgagcgcatgaaaattgagtcaactaagggcccagctgcccttgttgatgtcaatggtagtgatggtgaatatagtggtggtgatgatgatgacgacgatgaagaagaagaagatagtagtgacactgaacatgattctgaggctgaaaacaacaagctacgtacttatgagctaaacagactgaggttagtaacaaaatggagaaggatttttttttatctgtttttctgggacttgtagacagtctttaacatgttcaaatcctatgtgtaaatatatgtttttctgcttgatgtatttatcactgtctgtgtatgaggagacattctcatctattcaattttttatacaacaatgtaataccaatcttatgcgtacgcttatcttgttgtaggtattactatgcagttgtggtgtgtgattccagtgcaactgcaaatcacctgtacatgaatcttgatggtacagaattattgaaaacatcaaatgtgttcgacttgcagtttattcctgactctatggaatttaaacatcctgctcgtgatgttgctacagaggtatcttactttactacattgtatcatcagcaattttggtatataataaggttgaaacatgaaacattgaaataaaactgatccttttccttcttcaaaagtgacttgccatgttatttttccattgttcaagttaacatcttttaagtttagtataacttgcttttcaattgtgctaaaagaattacttttagtttgtcagtgatttgtttgatattatgcaggcacctccaagttacaaggagcctaattttgaaactcgtgctttgcaacatagcaaggttaagctcacgtgggacgatgatgaaccagaacgcaaaaaggtcttgaggcgaaagttcactgatgatcaggttcattcttatataaattattttgtttgtgttacgagtttatagttttttggtaggtccaataacatgataaacaattatggagtaacatgtcatgagctgggccgctggcactaaagtcaataatattttgcaattcatctccctttttatgtgaaagttctttccctgtgaacggctatgagttatactggtttgtctcgatgtttgcctatcgtgtagggatgatattttccttattcgtttttattaggcacaaattgatttggcacaatcttttaaattgaaatgtgaccatacatttctttctcaatatattgttgctatatagaaaaatcatgtccatatgtaagtacattgaaatacaaatctagcaggtaccgcctttgtatcactaaatagttatttgaatgtcctaattgttggtcaaaactaacgaagtttgaatcttaaaatttctgtgccttatgagttgaatggatatagtacctttgttgttgtgtccttgtccttttatttttgttttggtctacagttttggtaactttgttcatgtttttgctgcagttagatgatcttgatatgtacttagcaagtgatgacagtgcatcagacgatgaaggtgcagataatcatggtgacgagtctctacaaagtggagccaaaagaaagttaacaagggaggagaggttggctcttctactacaaggtgacaaatccgaggaggaacaaactgatggcgaggacatggagataacattcaacacagagcttgaggaccttagcaagcgtatacttgacagaaaggtcaacaatgagaagactgtctgggagaagcaccaagagaaaatgaaagagaaacgtaaatctaggaagagaaggtcaaaggatgatgatgatgatggctatagcagcgaagatggcctggatgaacatgacgatttctttgatgatgaaatgtctgatgaagaaattaagccaaacaagaagcagaaggcaaaggccaaagataaaggaaaggggaaaggaaaggacaaactcccagaacaacatttggaggatgaagcaaccagagaagagttggagcttttggttgcggctgacaaggatgcaggcaacggtgcaaagggttataacttgaagcgcaaaaagggtacgaagggcaagaagggtaaagagcaatctgttgaggacgaacttcccgacatagatcttagcaaagatgagaggttctcagccatgttcaattctcattggtttgcggtggatcctactgatccccagtacaaaaggtatactatgcgcattcgcccatcagactacttcagaattcatactactagtgtagcctacatgatctgcaattctgcatcttcttggttcagttttacacatgttaaattgctaactgttgctgatggttacttacaggagtgcggcctttatgcgcaagcaagctgggataaagggagcacatgaaccatctctgggaggtagaggtagtggtagaggtacattgccacctgatgatgtgcctaccgatactcatgaccagaaacctgatggcacatccacggagaagctggaaacaatgtctgcagtcaagtcactaaaacggaagcttactgcattaaaaaacacaagcaagagtgaccgatagagaaaagctttgctttaccctgatgaccaatgaacaagcttttttttttatttgtctatgacgagagttattttggctttagaatagtttttaggtatgttatttatgtttgctacctacctatgaaaatgtgtcaaaatttgggttttgacaatgatcaagtaggacaattttgttatccttaatattttcgaatatagttctattattttcaggctataaaattaaattatgatggtggctttgtaccaacattagtggaatattagaagccaccttctgtttttttggccttctaaatataattttagaaataaaccctccaagaactaatgtcaaacctgaaatttttggtcatgtagaatgataacgctgccacatgggtaaacctgttgtatgccaggctgcaagccatgaactgtggagctatagtaattggcatgtgcatgtttattttttataagagtttttagatagtagtttatttttaaaattcaaacaaaaatgttcaagaaattaagaaaatccatcagacaagaaccgttacagcacgcgagcaggaatcctctcgcttagctccgacgaaactgaaaacgagcagagaagtttttgtgctgcgtgaagctgcagcattttctgttttttttctcttttttttactattctccaaagctggagattttacatacaaagcatgccgaattaaacacaagattcaccaaactcgtgccatcccaccacgtttggagtgatcagctcggcatgccgaattaacacacgcaggaacagaaatgcaggatgcaactaaaacaatcttaaaaacaaaaatgcacacaagattacaatgttgccatcaacactgaatacactgaatacataaaagtaggaagaacatgaaggccttatttcatcatcttttcatctttattcatagtagaagaaactgtaatagaaataccatcttttcatctttattcatagtagaagcaactgtaccatcttttcatctttattcatagtagaagcaactgtaccatcttttcatctttattcatagtagaagcaactgtaatagaaatacctcccaagttcctttcatctttattcatagtagaagcactgtaatagaaatacctcccaagcaggaggagcagcatcaacaatccttatccttgacgatcgaaggtaatttgagcgtgaaagtaataccaccattgttgtgttcactgactttgattctcaggtagtttgagcgtgaaagtaataccattgctgtgttcactgacttttcttttcagtttttccagattctgcgggttgcacgttccccccttgagttcgaggtgtgtgagactctgcagcttacggacccctgaaagcttctccatgtgagtgaaggaccaaactatctttt

SEQ ID NO: 5518 - DNA, 8543 bp, Oryza sativa
ctttcaacttttccatcatcacatcgttccaatttcaatcaaacttcaattttggtgtaaactaaacacaccctccatgttcgtttttttttaaacaagggagtacttaccaaaaaaaaacattgtagaatctatgaatatgatctaagggaaaggggatgggcaaaacagatattacccttcagtgttgctaatgatgataaagaccatgttaacctaaccagtcaaataaaaaattctgtgttccaaagtacccaaaataaaaactgggagctagtactagctggcttgaatggcgaatggcatggacagcaacatgtgaccgaacagcacagcgagacatgctaatctgatcctgcttcaccaacagcttcgctccacgctcgcacgcatcaaccgaaaaacgttagcatctcctaatcagatttacgagtaccatttttcttctgaaaggtcctaatcagatttgtgcacaagtgtcatggaatactacttggcgagcactcgaggcattctgattggcatcctttgcattctgttcgaggtgatctttcaaagaacgccgtgcaagtgcaagcaatcccgtgatagcgagaaatctgtcaaaaaaaagtgctgtcaaaagcaagcaagcggcgagctgtgtgttaggattttgctgcaaagtcaatggtgcagtgaaccttctgaattctgaacatctggctcggttcatacttcataggactttttatgatttaagttcagactttagaaagtaactctgcaaccaccggacataaagattatactactaccgtgtagtgtgtagtaccgctacattgtactcgtcattgtgtagtataatactagtacactatggtgttgtgaatggagaataggaaagtaattaatggtgtcaaatgataaatggtggtgataatagtatgatttctacagatagagtgattctgctgagtccaatatgctgcaagccagaccctgtttagatgggactaaaacttttaagtccctatcacatcggatgtttggatattaattataaatattaaacgtaggctattaataaaacccatacataatcttggactaattcgcgagacgaatctattgagcctaattaatccatgattagcctatgtgatgctacagtaaacattctttaattatggattaattaggcttaacaaatttgtctcgcgaattagctttcatttatataattagttttgtaagtagtctatatttaatactctaaattagtgtctaaatatagggactaaagttaagtccctagatccaaacagtgacttagcctgcaaaatagcagaacatggcttcaaataactatactccttgattgacagatgctgttctggttgtcgttaatgttggatcggtacgaacagattaggtttccatggcacgtacggagcaaggattaggtttggtggaccgtgaggtaggtgacaccgtgtccgtgtagtgctttgttatgctctggatcttatggtttcatcgctttcagtttcgtttgctctctcactcaacaccagttagtggttgctgacgtcttttctgttgctactattattttaggatcattctgaacttctgaattctgatccttcgtttgtgtcttttccctttagtggtgatcggttgctgtttaatggagacatggcaactaacttcattcgagcaatgtgatgtcatgcatacattaaggttcactaattcataaaagaggatggaaaaaaatagagaacttttacggtacaatttactagcattgaaaaacataagcgttgagctgttcacagcattacaggcattacagttagatgttcagtaggttactgcaagtgcagcatgatgtcgatgttcttgcgacgagtcagtctgacagatgatgcaatggcttaaacataacttaacatgagattaggagttcatgctccatgcatcatctggatcaggaaactggaatggatcatgtgaccaagtaaagagggccaaatgcctctctgcttattgcatgggtcaccttgtcaagctgcatgtgaggcagatagtcatagtcctcatcagcatctgacgatggcgagaagcaggctgcagctgttcgtctgataatccgagccaatttgaagtattctctgactactatctccctagagaggagcggtctgcggaatgcatttctgcatggggaggattcagatgccaaggaggcaattattctgttctgaaactttgtcaagaacgtcgagttcttcttcttcgattctcgatttgcagcttggaggcctgaattgcagaggtattgatcctttgttgcttcatccgtgaactaagatgcagtattgacaatgaagttaaagagggttgcttgcttcctaaatgatacaaattccagaaagaagttcagaacttacattgtcaggcagaccttgagaagacagtaacatattctcaggactacttgaagttgtcttatttgaaacttgagtgcattcttcttcctgtgttatcgttgcttctatgaactgaaacgacgagagattaaaagcttcatcactacagtttcctactttattgcatgaacagtactaaacagtactgtgcgtgctccagctactcccattgtctcagcgaagaagaacgcaatgcaaaaagagagagattcttgcaatatgatccaaccgaatgaaccgagatcaccttgcaatgttcgggatgatgatcgcaactagctctacgacatccagagctcttgctcatcctcatgaccagcttatataacgtgcagctctacaaatccagcttcatgcagaaatgagcaagataaaaccaagacactttctcatgatccatgcaagaaatccaaagtataacgccacttaattaaagaacaaagagagagacagacagccatgaatgaatgaagcaacacaaggtatttggctgcattaccctcgaagtaatggcaggcgagacgctgcaagaagagaggatgagaaatggatcaactcatcaaggccattccggagcaaataggagacgaagcattcaatggggttgattacgatggtatctgctgatgagaagagatccttctcgcatttaaggttggcaatggcagtagctggtatgaacagatcaacaagagacagtgtgtgtacgagagtgtcagcagcatatggtccatgattttgccttgcttctgaagcttttgctactcatcatccgtggcgtgtaacaacgcctgtgtgtatgattatgtcagcgcacgagtgttcagaaaaaaaaaagataactacttcttgtgtgcttgctggtttaattaggtgatctgatcgattgtaaaattctcattccaaagcttcttggctccaagctcctccagtactctgaactttgaagcttcttattcctgtgatttgcagtggctttgtgaatcatgaatgcaaaccaatcatgtggctgctcctcctgcctgcatgcgtactgtctgtaattaagtaagaaagaagcagcatcgatcgatctcagtatctcactgtctgtaatttatcaccctactagcatttataattggtgagaagaactagtaaagaattggagaggaatgtattcatgtgttggaatccagagttttacatgattaattcaactggggagggagggagggagggacagacaatacaagcacatgtgtgggagtcagcagttttcacggtttcagtggtccttgtgatggatgatgaatctgcagccaggcacgcgctgctgtaccgggagggaggagcatggcttcccatgacgagaccttgggaccatgccaagccctagctatcttgcaacattattagtatattatacttcatgggatcaaaaaaataaaatgctagtggtaactactacctaatgtttcatactttcagtttcatagggttcagtatttcaacctttttttcaagacttcagtcttcagcttatgctagcaatgaactactactattataagtgttttttttagaagctattataagtgttttgagaggatgggaaaggagagaaatacgtaaaacaagaggcttgttcactttgctataattttcaaccttaccaagttttggaaaagttaccaaaaaagtggctacatttagttgttgccaaattttagtaactacatatgaaatcttgtcaaaatttagtaaccttgccaaaattttgacaaccttaccaaaaatttgacaatgccaaaaattgataaggttaaaaattgtagcaaagtgaacaggctcgagataaaccattagcacataattaattaagtaataattattttaaactttttaaaaataaattaaaaataaatattaaaaaacacatcattttagcagttgaacgtaagcgcagaaaacgactaatcgagggacttttcctctttatcctctcctaccgaacgggcctatttcaactagatccggcctggtccaggaggcgatgtcgcactcgcaggtgtgcagctctctagtgggcttgcagattaggcccattagtgttgattgggcctcgaagtgctttgtcgtggacatcatccgccgccgtcttcttcctcgaccatgccgttgccggaaccggctagcgcggccggccggcggcggcggggaggccgcagtgggacgacgggtgaaggatcctccagctgcggaaggaggtggtcctcgaggccgaaggggagaggctacggagatggagggaagccgaagagaagggaggctgctgctgctgctgcatttgggagacgagaactcgactcgagccatggcggcagattggtgtttcacggcggaatgctaactagatccagcatctccatagcaaaggtagaatggtagattgaggtgagttttttttcccctcttctgcagttttgatgtattattactgccctcatctgatctgggtaacatatttctgagctcagtagaactgttaaaaaaaggcagaaatgcacaaactcttctcacaaaacaacatacaaatgcttatattttggagcggaggcaatacatggtatattttttaaagtgaaaaaaacaatcagacacatggtattgagtgatagcaaagctgggtgaccacagaaaatacctcctgctttaaatactttatacctgggctgtcaatcctcggagttcctcccaatgtaatgtctgaggaagaagtattgcagctaaattttaagggtttcttgtacgaaacagggacaatcagagattaagaaactctatgtggaaaaggccatgcgcattttgttatgtgattcaacaaataagatgaggaggcaaagtcatggttctgttctaattaacaaatctactatgggggccgttgctccctattgtccacgctccttttcttcatttctctcctgcaggatatcttgtcttttgattcttcattttaggtcttataaatatcacgtggttcaggcctccaatgtcaaattatcattacgtggaactctcttagatgcttgagaaaagttagctcttacctgtccatagaagctccaaggaagcgagaatagtagatactttggttggccatggccactggtgtttctgttgagaacataaaccccaaggttatactagggccatcatcgatcgctgagtgcatagtcagtaagttgtgttcttttgtggcttgctgattcatattctttatttcaggttttacgatgtgaatatgcagttcgtggagaggttgccatccatgctcaggtttcgtggtttagtccatccatgttctggaagtcaatttcaatttattctttttcagcaaatgctagaagagaaattaatagatatctcacatttttcttccagcacctacaacagcagctacagacacaacctggttctcttccatttgatgaggtcattgacaactataatttgcagatcacgtgaataatcggtagatgattcataaattttcaactattatatgcagatcgtgtattgcaacatcgggaaccctcagtccttgggtcaaaaaccaatcacattcttcagggaggtctgtaaatattagacacccaaaacttcatctttcctttttatgctctttcagtatttacgagttatgttacaggttcttgcactttgcaatcatccaaatctgctggagagagaggaaattaaatcattgttcaggtaaacatcaactgcatgccatgattcattaccaagctatgactatacatatatatttatgttctacactttctacatttctaataaaaaggtatgtaagcacattagggtatttcatttatgtatgatataaatgtttcttcatctctttgcagcactgatgctattgctcgggcaaagaaaattctttccatgattcctggaagagccaccggggcatatagtcatagccaggtaaccatctgccaattcactcaactaggagcatcttgagttcataattttccttatagtaagtttcactataactatgttgtcaaaactatcgatttctgcaaatttaactacgcaataagaatgcaagaatagctgatgatcttatcagaaaattgcaaccttatttgattggtctggatccatctgtcacacacacatgcaatactcatgtcgttgcaagtttgggcctacacatcagaaaccaataggagataaggctgcaggtttctgataaaatcctctgctattgttgcagttgtgtgaaatattcaacaaaagatgcagatttaaatcaaacactgcagtttttgtggaatttactcttctttatcctagggtatcaagggactgcgtgatgagattgctgctgggattgcctcccgtgatggtttccctgcaaatgcagatgatatattcctaactaatggagcaagtcctggtgtatgtcctaccttggttatttctgaagaaacaggaatgtaagatattccagtctgacttatgctttccctcttctaggtacacatgatgatgcagttgctgataaggaacaacagagatggcattatgtgtccaattcctcaatactcattgtactcagcatccctagcacttcatggcggagctcttgtatgtagtttatttgtctgacgttataacttcaagctagctactcgatgcagcgcaatagcctgaagacatttcatttcaggtgccatattatcttgatgaatcctcaggatggggtttggaggtttctaagcttaagaatcaacttgaagatgccaggtcaaaaggcataactgttagggcgttggtggtgatcaatcctggaaatcctactggacaggtttgctctcaccgcttctcctatcgtgtgcgatttaaaacatcttatatacaattatacaagtatctattatataattaaaggaatagaaaaaggagcctccacgttcgctctcatggcctagaaattctcacattaaacggagaaaaagaaaaaacaaagtccatatagaaatacaatttagaaatagctgaaattcggaattaaaaaataaggaatattaaaagaggagactagagtccatatagaaatacactttagaaatagttgaaattcggaattaaaaaataaggaatattagaagaggagtatagagcccatataaaaatacaattaggaaataatagaaattcagaattaaaaataaggaatattagaagtagagtatagagtccatatagaaatacaattaggaaataatagaaattctgaattaaaaataaggaatattagaagtagagtatagagtccatatagaaatacaattaagaaaaaaatagaaattcagaattaaaaaataagaaatattagaagtagagtatagagtccatataggaatttaaaactaactaaaattcggaaaaaaaaaggagcctccacgttcgctctaatgacctagaaattctcacattaatcggagaaaaagaaaaagcagagtccgtatagaaatacaatttagaaatagctgaaattcggaattaaaaaataaggatattaaaagaggagactagagtccatatagaaatacaatttagaaatagctgaaattcgaaattaagaaataaggaatattagaagaggagactagagtccatatagaaatacaatttagaaatagttgaaattcggaattaaaaaataaggaatattagaagagaagactagagtccatatagaaataaaattaggaaataactgaaattcggaattaaaaataaggaatattaaaagtagagtatagagtccatatagaaatacaattaggaaataaccgaaattcggaattaaaaataagaaatattagaagtagagtatagagtccatatagaaatacaattaagaaaaaaaatagcaatatggaattaaaaaataaggaatattagaagtagagtatagagttcatattggaatttaaaaccaagtaaaattcggaataaaaaggagccttcatgttcgctctcatg

SEQ ID NO: 5519 - DNA, 12985 bp, Oryza sativa
taataatataatgagaaaacatatatgtttttatatgagagaaaatataatgatgctagccgcgcaatctacgcgggccaccatgctagttcatgattaagacaaagtggcactgttattttgtgatgtttttcatgtcagtaagcatatgttccttgatccgaagaagtatttaggttcaactgatataaatattccaaaaatcataattgaaatgtttttacattgttgttaagattcttgatgagcaacagcaatatgagctagtaaagttctgcaaggacgaggaacttgttcttctggcggatgaggtaaggctagtcatgttcaaaggtgtcagtgtgttgagtgatataataatgttaacaaagtatgatgttaacaaacacaagagaaaactgtccagataatcgttttttggggggtgttgataggtataccaagagaacatttatgttaccaacaagaagatcaactctttcaagaagatagcaagatccatgggatacaatggagacgatttacaattagtatcattgcattctgtttctaaaggtgaaatcccatcatccgcctttctttctccaagtacattgtaactccttaccacatagatatttttttgcctgccatcaggatattacggagagtgtggcaagagaggcggttacatggaggtcactggcttcagcactccagttagagaacaactctacaaaattgcatctgttaacttgtgttcaaatatcaccggccagatccttgcgagcctcataatggatccaccaaaggtgcaataacatatctgtccttacacgaaatgtaattgccaatatacactagattcataacacagagagaccatgcatattgtgcaggctggggacgcatcttatgacctctacgaggaagagaaagacaacatcctaaaatctttatctcgtcgtgcaaaggtgtgtggagtttacttttaacagattcacttcttgctatctatgcagacacttgagctaagacatcattttgtctggaatctggatcacaggcaatggagtctgcatttaacagtattgatggaattacatgcaacaagacggaaggggcgatgtatctgttcccacggatttatctaccacagaaggcaattgaggctgccagggctgtcaacaaagcacctgatgtattctacgctctacgtcttcttgataccaccggcatcgttgtgactcctggatctggttttggacaagtgagctactttctactcttgatctttgaaccatagtgatatgtgctgtctgaatcccacagaatgataagtgaactgttttggggaacggctgaagctcacgcagcacaatctatattcctgaagagtctggtagtagtagtagtctcgttctacaagaacagatagcaccaattaaaaaaaaaacaataacagatagcaaccgttttttctaccatttcagatcatcagatgttatctgttcacctgcaattctgaattcctgaccactcaagtttggtcctttgtgaaaggttgcagggacatggcacgtgagatgcacgatcctgccgcaggaggagaagataccttcgatgatctcccgcttcagggaattccatgaggagttcatgtcacagtatcgcgactgatggactgaactcataaggcttcgccatccagaagacgagaaataaagcaaaacgccgttaatctgcgatgtgttaacggaagatgtgcagcaaccttaatctggaaaacttgagcatactcagtttgggtcgtaaagaattcacgggctgttgcatcagtgtttgcccggtacaaggtttgattggattagcacgatgaatgagtgcagggagacctgcagctaaataaatactccctccgtcctataatataaagtattttgaatttttgattgcaacgtttgaccgctcgtcttattaaaaaaatttaaaattattatttattttattagtgacttactttattatctacattacttcaagcataacttttcgttttttatatttacaaaaaaaaaattgaataagacgagtgatcaaacgttgcaagcaaaaactcaaaatcccttatattgtgggacggagtgtgggacggagtgagtgttaatgttagtagttgtgagttagtgactcgtacctaaaagtaatgctacgaaataaaaatgtgttgagagagtatcttacattcagtaaaggttttccaatcgagttggctatcttgaaacggaacgagaacagcagctattgttttgagctctgaaatctgaagcaggcgacacggagcagcagtctatagcgaatctcttcttgaagcgaaactcaaactcctcgcgatcccgttcattggggcgtggtcgcgtagattcatcattcatgggcctcgcactcccgcggctaagagcaagaacaatagtaggctttatgccagctataacaagaagaaaagagaagagagaaaaaagcgggctataaatttgtatccagctgaaacatggacttcaagacactttgtgtgtttgagaggtgagaccgagtattaattgtgtagtatatttttatagataactatttaatgaatgagctattagattagttatagataatttgaagctaacatttggctatactattaaacttgctctaatcgggccatgtgggctgcaccccaaccatccgggctctcggctctccagcagcatacgacctctcgggactcgggagccctacggatttttcttaattttaatttttatctattaaaacattttctaaaacattcttaaagtataacagatctacacctttaacgtcctctatttttacgacgtggtatatgttctaaaaaaaattaaatcctagctactaacctaaacatatatgtgtctaaattctcatattaggattggattgagttttttatgaaacagaggtgtagctgttaatgcatgttaactgttgttgagaggggagggttgcaccgtagtgcttgtaaaatagccagccttactttacgtagtcgttagcattaaccaatgactatatgtatgtcacgttatataaagaaaaaacgctaacacttttccacgaggccacgttgttgccgccttgtctgctactacctcgacattttggtaccgagaaagtaccaataccgcacttccaccacctgtagccatatggacacgatgcagtggctggcatgttggtagtggcaacgcagggatatgtgggtattggttggcacatgacaaacggcgtcgcccaaacacgtgctgcacgcacgggtacgtcgtaaacgtatgtgcggccacacaccagccgtcgtgctcacgcgtcccagttttaatttgtactttttcctccgtctctttttaggtggagtcataattttcgtgtttaactttaatcatctatcttattaaaaaaatttaatcaatatttttattgttattatatgataaagtatgaatattattttatacgtaacttatttttttattttttaaataaaatatcaaataagagagacgattatggttgcgtttaaaatagaatgcatggagtactagtgtactacatcgagcaggagcgccatagctttgcggcgtccacacaacacacgccgtgccttttcccggagtggcaattggcaaaggcaataacatgcccagaattaagtatgcaaagcggttgctgccaacgccccgggttgtgcacatgggctatttggagaattggattcgcccctacgagtagtagttgctcagctagggttgctgtttgtttgccaaagatattctctgccactccctcctgaatgtttaacgcagttgatttttttaaatatatttgaccgttcgtcttatttaaaaacttttgtgaaatatataaaactatatgtgtacataaaagtatatttaaaaattaatcaaatggtatgaaaagaattaataattgcttatattttttgaataagacgaacggtcatatatatttaaaaaagtcaacggcataaaacatgtaggatggagggagtatatacgaatggtttatgtgaaatgagggggggtgggggggggggtcttttccctgctatgttggaggaaatattctgccgcggttaggtcagtttccaccacggaatgagtggtttataccagagaattggatactgattgctgagtacattccttccttcagaataagagatggaatactcccatattgtcccatatgcgcaaggtagaggctgtttgcttggtggctagagtttgccatgccaaatcttacccacaccacactttgacagcttaggctgagttcgtcagcttgagttcccaactacacatccttcgtttttcatgcgcacgcttcccaaactgctaaacggtgtgttttatgaaaaaaaaactatatacgaaaattgcttttaaaaaatcatattaatccatttttagaaaaaaaactaatactaaattaatcacgtgctaatgaaccacatcgttttacgtgtttggagggagagtttccaactctctctgccaaacacaaccttttgctaagttctttcctcaactttgccaacatacctccctcgttttccgcgtgcatgctttttaaactgctaaacgatgtgttttttaaaaaaaaattatacaaagtcgtttaaaaaaatcatattgatctatttttaaaaaaagtaaatatttaattaatcataagaaaatgagtcgctccgttttacgtgcgcacagtctaaggaccccctccttgtcctatacatgctcttagctatcaacaaaatatgcccgtaatatgcccaacgagttacgataggaattggatgtaagaatattcggattttatttcttctgccaccctctagtggtgcaattcttttattttagttagaagaaattttactacttaaatttatatagaacaaagtcaacagagcgttaaaagtttactgcaactatgcattttaacattacgaaatcaaaagctgatgttttgccacggcgaagtcttaactctaaccgttaaatctcttatcttcacagtgaccgtagcagagatcacacattcacatgcaaaaacacgtctctttctctatacttcactttcacctcgataaaaaagataaataatccacatggcaggtgagaaattaaactattatcccgattatgtggcgcccataaagccagcagcgcaagcccatgtcatgccaacacagtagagcattgcacgcgctgtattcaattcgatcgccatgtgtagcatgtgcgaatattttttatcattagaaaaatatataatcttttcgaggttttgacaaggagagctatagctttcagctggcccaataataataataatcaaataaacaaggaaaacaccacatgtttcactgtactagttgagctctgaccactatatataatcacactgccacacaatctgctagcaattctcctccccctcttgcaatccattctgaattctctgatcttgaattcttcatcttctctctctgcaagaatctcgagatttcaagatcgaggagaacttaaaagtttttacgccatgattccgagagctccgagcctcttccatatcgaggatggagctgtgggtgtcgcggcgtcgacgaagaagccaatgccggctgactccggcgagctcgtcgggctccggctgatcatacagcagtcgccgaggcaacggccgccgctgtccgtgctcaggcggtcggcggtgaggccgtcgccggcggcgacggcggcggcgagtcaggatgaggctggtgctcctgcaggccgggggttcatggggttggggttcttgaactgctgctactgctgccacaagaagctctacgccgacatggatgtgttcgtctacaagtaagacattttacacaacaaatcaagaactccgccttaatccacacttcaaatagaaactttatttggtgattagtgatcatgatcgagctgaggaacttgtggttaattaattcttggatactgactgactgatttatctgtggttttttttgttttgggcagaggggagcacgcgttctgcagcgcggaatgccggagccagcagatggcgagggaggagaggcgagagatcgagatgctggtgaggcggcgccgcgacgcgttccaccgccggcgagcttcgccgccggccaagatcggtggacacgcgaggctgcagatcgctgcttcatgatttatatatacatatgacagacttatcgagatcgaggttcatctccgctagtttctgaacaatttttcaggagaaattagggaggacaatacaacggagacgtacggctactcattctgtcacagattttgttgtcctcgtctacttcacatgtataaattgtaattgtatttttcgatctcttcttttcgtctataaccagcggtagtagtgtagttgctgcagggtgtagatgctgcaaattaagttaagagtgtacaagaaagtagatgaaactgatggacatttgacaacgtgtttacggagtgtttgagatagattaagatgaaaataaagttagcatacgtaaaacaagaaaaccattaatatattattaattgagttaattgttataaactttaaaaatagatttatttgatcttttaaaacaacttacatacatcaagtttttcagacgtaccatttagcagtttgaaaaatatgtttacgaaaatcgagttaagataagtatcctaatcgaaaagaacgtgataactctgaagacatattcacttgcgtggacttaactgatggaatgatcgagctgagacccggaaaacattgtccagatcgaaaataaccatgaaaggttccttaatgcttttcccgaatttcaatcataaaatggcgtggacgttcagtatccgcatagtgcaaatgatctctcaccatggaagcatgagatctgggtgctcatccaacaaaggcctgtcgctttgatcaggcagcgactagctactccctctgtttcagattataatatgttttgactttgatcaaaatcaaattggttcaaatttgaccaagtttatagaaaaaatagtaatattttcaacccaagataaatttattataaagatatatttaattattaatttaataaaactaatttggtaatgtaaatattactatatttgtctataagcttagtcaaacttaaagaagtttgattttgatcaaagttaaaatatcttataacgtgaaacggagggagtacataacaatagatttgcactgtgacaaactatgaacagctagctgcagactgtcatctaaaaaacactgaaaaagttccaacaggatgtttatattagtgtatttgaggaagcttccgattcaaatgtgtactctcttgtgatagaaatcaactatcagggaatctgttagtagtaaatcaaccatctgaactagtatttatctgaaaaccatctgaactatccacggtcctgaactttgcataatgcccccgtttctgtcgctaccaatgatagcgaaaatttttgcataacacggacaactccaaaacacgcgagtacaaaatgggcctttagcccactcgcataaatgggcccccaagtcctcaacgatccttccgctgttactttgccgatgggcctcgtaggccagccatgttagggttcagtagatgggctttgacgatccaatagttagttggtcctttgcttcggcgggcaagaattaagaggcccaactctgaagatgtactggcagacctgaacttactacttcgagcatgttcagattgataccattttttaaagtaaagttgttaaatatgtgtatccatttagtttcttaccaaactttagtaaataaataagaaatcctgccaaaacttagcaatattactaaattgccaaaatttagtaagatttattttggctacaatctaaataggcccttcaactacgttggagttcactgaacttgttcgtaatagatatctcgaacaagaattaggaagtcctgagcattcagctaagtatttttttagcataataaaaaatgactgccagcctaggagaagcagccgctttggggtgggctggttgcctgcggccatggcaatggatagagatgccaattgtgccgttcaacgcacaactgaactggaactggataggaaggctgccaggctggaagggattcctagggtatgtctgggaagtttctacattgtgcagcttctcatgaaatcaaaatcttctctaaataatttagcttttgatataaattctaagaagctatagtagtaaaatgcagaaaatgaattagaaatcaaaagttgaaaaacctactacctcaaaaaattgcatttctagctctaaagctttgtcccacaaaaattgtatttctagccatgtggggcccagcaaattgattcatctagataagtttccttctctcagcttgtaatttaagtatgctaattatatgggttaattatctcaaacttatttttaatcatttgtatatatggaatgtgtgcatgcaatgggttcattaaataaggtcattgtggtcattttctaatcctactgttttatcctaaattagctagaaatgtaatttttatgagacggagggagtagctttttttataatctcagaaactgaccatctacgagctgtttgttactccaatcttaagcttctcaaatagacccatagttgaagagatgccctgtgttgctgcatggtctctgcaccgcacggcaggggagatgtgccgcttcatcaattggccgctccgcccacatgcaagatgcaacgccaacgcccagaaagtaggcgagagagacacatttcttcatttttcttgactatgaatgcgagacactgaacctgttctgcctctggatgataagaaccccacacgttccaactacgcgctgcttcaatttgtagtactgtagtactgtttagagcaggtacaatagcaggctacaaaccagctgcaaatatattttaagaagataaataaggagagagagaagcagcgggctacagatttatagccacctgtagcacggattttaagacgtattgtgtatataacatgtgggaccatatattaatagtgtagtatgtaactatagtataaataagctattaaattggctatagataaattggagctagtagttggctactattgaacttgctcttataacccgcaagttgccgtcgcctcccgccatctcgcatgattaaaagtttaaaaccgaaccaccaaaagcgcgacggcaaattgcatcgccaagttgccactggaacagggacacgcaattaatgtctctcacccttttcctctatctcaaaaggtacatttcgttttctttacctaatttctccctctcaaaataaatttatctttcattcatctcacacgtatcaatacaaaatcggaaaactaaaatacatctattttatcaaactctatatagtctcttatttatctatttttaatataattattttatgctttcacaaacttcgatgtaacgattactctaaaaataaatttattctaggacaaatgagcgaaaaatgaacatataatgagagagaaagtacctttgctcaagtttcaaatgttctcgtagcaaagagtactactggtaaatactctaccatgataataaacctttgctacaatatgagataaaatcctttgtgttacaaatagataatgaatctggtaaaactgaaaatcacgctgtgcaagcgactctgtgaaaaaactgtttctggtgcttttgctgctgtgcctgggacctcctcagcttgtgcaataccgctttcctgaaacttggcacgccgcagaccgcagccaccttggttttgcacatcaagttgaatgaccgagtgtgacacaagatcctgtataaacagagaacgccattcgttaattcgcttgcaaaaaaactttccccagtgtgacatggacacttacgtcctgtttagttcgaaacgaaaatttctagcgtgtcacgtcaaatatacggacacacatttaaagtattaaatgtagactaataacaaaacaaattacagattctatctagaaactgcgaaataaatttattaagcctaattaatccctcatcagtaaatatttattgtagcaccatattgttaaatcatgacgtaattagacttaaaagattcgtcttgatatttacacgcaatctatacttttttttatatttaatatacatgtgttcaaacattcgatgtgattgggtgaaaaaaatttgcgtgtacactaaatagggcctaattcgcttgcaaaaaaaacctttccccagtgtgacacggacactgaatatatatatatatatatatatatatatatatatatatatatatatatatatatatatatatatatatatatatatatatgtatatatatatatatatatatatatatatatatatatatatatatatttgctactcgtagtactagctttgactgtagctgcatcctgctgcctgcgacccttggttgctaccaacagatgatgctgtattaataaacgagaaagtgagcaggtcaagttggcaacttgacaataccggaattccaagaaactggggttggggagaaagttttggtattcgcaggcgatgcagccccgatctccgtggctcacccgtgtggccgtgatgccgttggtcgcacacgtttgggtgaggggagtccatggtgttgcggaggaaggtttggtaggaaggatcggcgagctcaaaaccggggaaagctcttcttcactgtgttgtttggcttgttgggtttcggattcgtgtgatgatactccagtttgatactacagtaaaatcacatgaacccgtaaaatgtactaatagtacggtcagaattttgaatggattttatagggttgatatccatatagtctaagagcaattttaatagtatagcccactactaagtctaattcatttatagccgatataatagtcaatttatacaatagttgtttactatactattaatatatgatcccacctgtcatacatatattgtgtcttggagtccgtactgcagctgactacatatctgtagcccgctactcttctctctcatcttttatctcattaaaatatgttcatagctagctaatagtctgctattgtacctgctctaagagcatccacaatgtagtccaaaagtgatccataagcaatataatatgtcattcaaccacctagtaacattgtgaaattagtacatagcaaaaaaataacaaaagctacccataaacatatgggctggaggataaaatatattatttgtctctacttcttctctccttctaatactatttgctatctatatacattatgaatgttacaatagttaaaatccatacatgtgggtcccgtctatatggactacttttgctatacattgttgttgggcccctttaaatcgtagaattgataaaacgtaggaatagaaaaaacgtaggattttgatagaaatgtaagtgtaaaacagaggattgaaaaaacgcaggaatgactgtttgattgaatcataagaaaaacgcagaaattggatgagagagatatactcaaaggaaagttaccaagaggttgaagctcttgctaaatttcctccaaaatctatataagattgttcatttcataggaatttcaaaggattggataggatccaatcctttgtttcaaagtgtttcttaggaaatttttctataggattgaaatcctccaaaattccaatgtttttcctctaaatcaaaggggccctaactacatgtagttagtaacacttacttcaatcaaatcaagtttattttaagttttgttagcacctgtaaccacatttcaatattgaaaagacttttgttgcttttaggttttctcatcttagtttattttagagcctttgtttctaaatcactaataatatatatatatatatatatatatatatatatatatatatatatatatgaaagttttattcataaattgtttgtttgcaaatatgtcgtgggtctcgtttaagggcctgtttggttggtgccacattttgccacacttgaggtagatcagtttgaccaaatgtgattagtgtttaatttatttccacaattttgacatgccacattttctactcttttggtcccactagtcatagactcttttcttagccaaagtttaccacaagtgtggccatcaaattttgagacacataatttgcatcttgccacaccttcggtacaaaattgtggtaaatcgaggagggcttccaaacaggcccttaggggtccggatcctacctgctccagtggctaacgggtgcggggtgccgagcagcagaagcagtgagcgcggtcgtgccctccacgagcccatctccttccccttccctttccttgccgggccaaccaatgcacgcgcgccgtcgccgtcgccgtcgccgcggacagctgccacaccacacacacacacacacacagcacggcccgtgtctggtactccccctacgcaagtgggcaaacgcagcagcagatgcattgcaccttctcctcccccctccccccgcgtgggccccacccacctgaccttatcccttcgcccccctcctcctcctctttcgccgcgatttctttaggattttttttcccgcgatttcggagccgcgggatggatggcccccctcccccctatttaacaccgcctcgtcgctctctccttcctcatcacaagctcacaagttcacaacccaacacccaaaagcaaaagaaaagcagcaaccaaagatgtgcggtggagcgatccttgcggagcttataccgagcgc

SEQ ID NO: 5520 - DNA, 11516 bp, Oryza sativa
acgtcggtgtcggcgtaggtgatcatgtcggtcatgtaccgccgggtcatctcgcgagacacgatggactccttgatggggctgaacctgatggcgttgaggtcgtaggggggagtggacgacgacgacgagatggagttgcagatggcgccgccggtgcgcggcgcgacggagacggtggggttgcgggcggcggcggggaggcgcgcgccagcgaaggaggtcttgaggaggctggacgcggtggtggccatggctgccatgcgagaggaggaggagctgagcttcttgctctgggatgaggagagtgtgtgtgagtggatagagcgtgggttggcgggggtataagaagaagaggagagcgcaaatatctgggagtgccgtccacgtgtcagcagtatgggcctctgggtttcggattgattggaggagatattttgggaaggtttagtgagggtttttggactgtcttcaggagaacgggacaagtgctgctaagtcacggactcacgggaacagtggtgctgtgttcagtgacagtgtccgtgataccgtgacgactaaggctgtgtttgcaatcctatgttcccaacccctctccctcgttttttgtgcgtacgcttttcaaactagtaaacggtgtgttttttgcaaaaagtttttatacgaaaattgcttaaaaatcatattgatctatttttgaaaaaaaatagtaaatatttaattaatcatgcggtaatgaatcgctccgttttccgtgcggggagtttagttcccaacttcccatatcggaacacaacctaataatggtttttggtgatcgattttttttatggctacctgtagtgaggggtactagtggtggagcccgggtggtcactcgacctgtacaggagctggctttgtcgctgactgtaataacatatcgagaattttttagtctgaaagaaatccaccataatatgttgttgatatcgtctaatatcgagaagtgcggttttaacttcttgtcacgcgttggtaaacctaagtgtctgtccctaagaaaactatctttgccaacttcttgatggatcgccttgactgttttgttgcacgacagtcgttgggaacaaagctcatcttcacaaattacatggaggcatggggtatactagtggtaaaggttccgggggatgaaaaccttctagttttttgggtttgacgatcgcgagcggggatcgcactacatgtttttgttgagcaacaatcatcgtttatttgttgaagttgtcatatttaggtctttggacgtagatctaggtctaatttcatatgatagcggctatctctgtttatgatagtaattgttttccctaaaaaagttgctttgttaatatatcctatcaatcaattgttttaatttctctttttttctaaataattcttttagaacttagttgtatttctctgtttttttcctacatccttgttcctaataaaagatgagaaacacccaggggtctttcggctagctccacaaggtggtgggctagacgacttggattcgaagcctcaacccttctaattatttgatattaggttattctctaatattcgcgttcctaataaaagataatgatacactttcagggataaataatggatgttttctgatctggtatatatttttttcctctcgaactaatctgatataaacgaaaagagacaaagtcatttttatttgttttttatcattgcagacaagcttaaatgatctacctaatttgaaatgtctcacagatcaatatgcatgatattgattataattagaatgattttactacagggacagtgaatttcataacttgaggctagtagatggtagcttctcttgcactgaaaaatctctggtaaatatctgcaactgctccagctttgtccacatatcagacaagtgtcatatcgcctttcttcgagtgatttttctacatctttttcaagacagatatttgcatgtctgcaatcttcaaaactatgcagaatgaattgaggccgttgaagttcccatcatatctcgtcagcaaagcatacaacttgctgatagggaccatacgacgaatgaagaaattccaaatgctacactgctttcagttacattttcttaatttatatgatgattgcaattactactactactatctgggtaaaacaataattgtcatgaccttccgctgcagaagtgattgaggcccaattataatctagtaagacagtgcaaagccatctccattcagatttgtgccacacatttttgtccatccaattcctgaaagtgacactggatcagacaggctcttttctgaagaaagatcacgttatatggcctgttctcttttcctggttgtgatcatgtgatccttatatcatttctttgaagatgacccctgcattgtttactggcaaatggcaacatatagtgatgatatatttcttatgaaccacatacataggcacggaggtatgattttgacttcagatattttacagcgaagtagtctgagtgggtttaaattattttacttttcttttttggaaatatcaaacctgagaagtaaaaaaaaacagagacgaagttaagttttgagtgaaaagcacagggaaaagaactttttttttcttttataaagagaactacattcaggggttgcaaggtttgttttaagggtaattttaccatccttgagaaaaatactaggtgataagttaaagtgagttcaaatttaccctttcccaacttctgctctttcgtttttatgcacacatttcctgaactagtaactatatgttttttaaaatcttctatatgaaaattgctttaaaatattatattaatccattttaagttttttttctaatacttgattatcatgcgcaccattccgtttagaatgcgtgaagaattagctcccaacccatgataacaaacattcttattgggtacttcgagttatcaaactttttagtgtcaaatttaggtatatcgaggcatttttctcaagtaccaaatttttttcttatattaagctcgaatgtgtatcatgaaaaaagcagagaaatgtttgcatcagtgtgagggagaagctcatcccgaacgggaatacatcacgatcaacagaagaaattggaatgcaaagtacaaactatagaagaagactgaattgtttctcagaagccgaaccttgttatgaccctgaaactggcaatcattccgggctgcacatccaaaggcatgaactttgaagtggttaatccattgattctgcttgcacttagtggctccatccgaggaaattcggatactacatccttttttacagaaggacttgtttgattaagggaaattaatttcacatcaatagacgtgaagtagatcccttttaaatcctcttctattcctttaggtagtgtttggttgcaaggatgggatgagatgggatggaatgaacccacttttagaggtgtttggttgagaggtgagtgggacgggatggtccctagagaggaatattcctctcagatccgggatgaaacggtccgccaaaatcggccggaccaatccatcccacttcgacggagcccacggcgtcacctcccgtagcctcccgctcggctccgccgccgcctcatccgcgtcgacctccgcctccgcgaccggccgtcatctcgtccgcgaccgcctccgcgaccgaccgccgccgctcgtcgtcagctcccacagcctcccgctcagctccgctgcggcaccgccccggccgcccgtccctcccccagcgccgctccgtcctccttcgcctgctccctccaccttgcctcgcctccacgaccggccgccgcctcgtctgcgactgacctccgtcgctcgtccgcgttcgcctccgcgactggccgtcgccttgtccgcgactggccgccattgctcgtccgcgcctcgtcgcctccgggaccagtcgccgctcgtctgcgcctcgcctccacgaccggtcgccgccttgtccgcgaccgcctccgcggccgaccgccgtcgctcgtccgcgcctcgcctcgcctctccttgcctccacgaccagtcgccgcctcgtccgcgaccgaccgccgccactcgcccgcgcctcgcctcaccttgcctccgcgactggccgccgctgctcgtccgcgcccgcctccgcatctcctccgctcgcgccgacgagctcctccgtccccattctcaccactctctccaacctagccgctgggagcggacgaacctaactgtccgtgaaacattatccatcccatcccatcttaattctttctaccaaacaaaaaactataaccatcccataccacaaaccaaacacacaactagaaccattccatcctaaaaaacagggataggtctaacccatcccacttggtcaccaaaccaaacacacccggtggggggtaaaccaaccagacctacccagcctacgaggaaattcggatataagcctaaattttactacagaagaaattcttgggttcttcaagatagctgcacaacctgtatttcagtccttgcaaggagctatttgtcatatacttgtataaaaagcagggttgagaatatagttcacttggtgtaaatagcgcctacgagaacttgggcctaacaaaaagtgcaacagtttgtgtagcggttaattttggcccatggtagcggtccagatggtagctgtcctatttctatagagaaagtctatactcactcttgtccttaatcggatcgcttccctcaaccacaaaaccatgtataacgtcggggcttgctatctcgtgcgcgcaccaacaactaagctggcacacgtgccggctggcggcccacgcccctcccctacatgcgtttctttttttcttttttttgcgattttctcctattttcaagcctcttatcctaggcgtgttttaatttctttcgtgttctttttaatttttttaatctgcaggcacacttgttttcaaatctttaagttgaaagattttaaattaagttgaaagttttggaatcttgacttgaaagttttccaatctaagctgaaagtttccaaatttcgagttaaaagttttcaaatccgagttgaaagtttcaaatttgagttgaaagtttttcaaatttcagatgaaaagttgaaagtttcaaatttgagttgaaattttttaaatttaagttgaaagttttcaaatcttaacttgaaagttttccaatctaagttgaaagttttcaaatttcgagttaaaagttttcaaatctaagttgaaagtttcaaatttcagttgaaatttttaacatttaagttgaaagttttcttgacttgaaagttttctaatccaaatcggaagttttcaaattttgagttgaaagtttccaaatctgagttgaaagtttcaaattcgacttgaaagttcaaatttcaagttgtaattttttaaaatttgactttacagtttcatattttaagttgaatttttaaatttcaggaatgttttaaagttttaatataaagttttaaatttgattttaaagtttctttcacgtgtagatttctttcagcctgttagtaaaaaaatacttatagaaaaaagaaaaaaactaccttaaattttaggtttgtttttaattttcaatagaaagttttaaattttatttgaaagtttctttcatgtgtagatttctttcggtctgttagtaaaaaaactcccagacaaaaaaaaaacttaccttgaatatcatcaatatccaatactagacagagttagttacaagagttagttacagtagatgcgcgcgtctcccggaaaaaggaaaaagtccgattgcggattgggtgacatcgtgtgtgtgctacttctcttcccgacgtgtactcacggtacaagaattatgtgtaacgtctcccccaactcaaaaaaccggtgcaaaatcgattcctcaatggttcggtaagaggttgtgcggtgggcctcacctatcagttacactttttccccttaccccacctctccctctctcctctatcctatgagataggctatagggaaagcggctgccgccaaggaacaccggcagtagagacgaaatggcgcatggaggaatacaggagggcagagaatgaaattttaaaatatgcactattttcctcgattttgtatatatacatatatgcttttgaaaattttatagaaatatacatccgcatcaccgtgccgtcggcgcagctcgaagacgcgccgcagcgccaacacacgtgaccgggacggtcccgtgaggcccggcgccgcgtcggcccgttcctctgatgcacgtctgccagagcctggcagtggcgcagaactggcatgcactacgggtgcgtttggttgctcgtattcccttagcctggctcatctcttccatccaggctgagtctggcctggttgagaggatacacatgcagctgtttggttgcccgcatctgatgaacctggatctgttgagatgatgtttggttggttgcagcaaaggattggtggaatggttgcatgcaggagatgttgtttggttggatggatgcatcttgggtgtaaacaccctctcctatgagtggtgaggttaccctcataagtttgtggtgtgaaaattttctcaagtgtctacttctgtgcggtgaggttactccatgaggtcgtgttaaaattttatttgctctttggcttactattatttgtgagctaaattgcttaaaatattgctatgcacgtctattttatttggttggtctttgagtatatacaaggaacagatcaaatattttggtctttgagtatatacaattacattgatgttatacaaaactaaaccaattggtatattagtaacaaattgttatacatatgcaatctggtaaatgacaagtgcatatagtatgttcttatgcatcacagatcagtactattaatcatcaattgcagtattttccagcttgaccctaacaaaaaagaactaagtgcaggaaatatgttattatgcattacaaatcaacactattaatcttaatcatcttggaaatatctcacaattgcatctcttcatatgcatcggaagcatcttggaaccataacaacataaaaaaagcaagtgcagaagcatcctttcatatgcagcacaaacagtggcgtgaagcattcatcagtggcaataatcatcattgaagaatcaaggcagagattcaacaagggtcatgcaataccatgcagtttacactacaaaagccattcaggtactggtgttcactaccaccttaatcaacaggtagccaacattctacaaaagacatatatgtggtgtccactaccaccttaatctgcatctaagcaatattacataatatggtgtcccagtaccacctctccataatagttagttaaatagttagatgctctcagggtgatgctcattcaggaacttcctaacccaacgagcacgacaagcctcattcttctgaatgtatacaaggctttcagccttctccttagttagataagctagaataaggtccagctgatcctcactgaaacctggaagatccatcactgtgttgcacaaatcagggtgaacctcagtatgtgcagtagcgcctattgctgaagccatgttgttcactgaatctgtcatattgctgatgagagcaacttcaccttcattcaaagcagatgctctcttcctcttcttatctgaggtagaatcctcatcagtaggcccaacaccacttgctcgagcagcaattccaggaccttcagcacccacaccacttggtccagcagcaataccatccccaatagtgccatcaagaggtcccagaccactgtcagcctcaccagcagggtttccaagcgcttcatttgaccccatagcaaatctcccagtggcttgcctatttgaaaaaattattgccatttgtgtatagttctctaaaggcacattgagaaactcagcatccttagggtgttcctatatgagaacattagatttaaagtgagatatgatgtgtactaatgcagtgtgttttgtatgtgatagttagacacaaaccttgacatgtcccatgtagtgctcctcttctaggataatcgttgaggtctgatcatcccaaagagccccactaaggtctttgagcctagtgatacgcacccacctttgacgccatttgcgaagatggttatacacttgggttccactaatttcaattccatagtgatcagacaaagatctagcaacttggttaaggtgagcttcattgaaacccttgtcagtcctaacacctgttgctataagctcaaccatgcgccttagcattaagctagacatgttggttgtccaatgcaaggctccatggtgtccaccatggccaccattcccgccaccagcctcagccatcctatatttaccacatgcaaatgaacaaataaatttaacataaatcgatagatgtaataaacagcatcattgcaaatatctcgaggtctcaaattaatagataacagtgcaacagggtacaacaatcatcatgcatgaatagataacagtgcaacaccatcctaagttcacagatagagagttacaaattaatccctaagcatgttagaccctggacgaccctctattgttccacatagcaccagccaaatcatccctaatttgcgccattcccctattgtcttcatctaagtcatcgggctcctcatcatcgctatctgagttccaatcactctctagtggcacatggtcatccatcccaaactgaagtatccagttatgaagtatgcagcatgcaaggaccaatttgacttgggtcttgtatggatggaaaggcttgttatagagtattctgaagcggtttttgagtgcgccaaatgcccgctcgatcgtgacccttaaagaggagtgtcttagattaaacaactctctcgaatcacgagggtagtttcttctatcatactccttcaaatggtatcgacacccacgatatggcggaaggaaccccggtctagcagcatatccagcatcaacgagatagtattttcctaagagataaaagctatgagtgtaataatcatatgagataaataagaatccttattaatcgttagttttaacacttctattacctgaggggacactaagaccatcatccctctccaaggcatctgcaagtatgagggcatcatgtgcagatccttcccacccagcaagtacgtatgtaaatccaagatcaaagtccactgcagccattacattctgggtggtctctttcttcctacccctaaaggcagcagatattgttgatggaactcgagcaagcacatgagttccatctattgcaccaatgcaatcctaatgaccagtgagaaatattaggacatgattgttgaaagaacatattttgtagtcaaaatgctgcaaacaaatttttaccttaaaataagggttgaatcttcgattggatgtaatttttgaatgaggctcagatgagggtggttttatcatctcatttcgcagctcaccaatagagaataatacctcagcgaagtatctactgatagtttcaattgacctcctaaaagtgggttgcaaagctctaaatctgtggttgtggcctacaacaagaagaaacatggcaacttgttcttccactgagctatgtatactgtcccgcaacaacgctctttctcgtaacaagttacacagctgaaaaaatggggctctcttcattctgagctgatttaagcaatttgtatcatctgtatgatagatgaaactaagattggattgtctagctatgtccctttcggacaatgggccataggagatcctaggggtacgtcgcatggctcttcttgtaataaacagaatgtaagcattcattacagcaactaatccagctgctttagcaatcagggaccgccgaatgcgttgcatttcttccatctatgcaaataacatatataatgcatagtcaattcagaaataaaaggatggtcttgtcgctgctaagtactgcaaatcaaattcgtatgcatgtatgccacggccgccacatccaagggatgctacctccagtggcataccatcatcgaccatgaatatttacttacacaaaacacaatcggcaaaataatgtgcacagccaaaatagtaacaaaacagcacccaaactttgctctgacattgaacattcatctgtagcaaactgaaaaaatagtagatctggcaaaaaatgaacaactaaaaaggataccaacagtagatggtttcaacatttaaatctaccataatcaactaggaaaatgtataagtttttactagatctagcagatttatgaaggccccatgttctcatccactcaaatcacagcaaatcaaccaaatagaggagaaaaaactagggaaggagggacagggaagaggatgcccaaccttgcaatgggcgacgaacaaccatccatgaacttaccctggtgctcaacggagagtgacggtggaacaggggggcacgacggagagagccggcaaacgagagggaggatgaccgacgccggggaaggaactgatggagaagagccggagtcggaggagagggccgccgctcgcgaccggagtgacgacgagagcagcgccgcgccgcgcctcgcctcgccgccgccagagctagggtaaaccctagttttttcgcgagagggagaagtgaggcggggagggagcgattctgggaagcaacggtgaccccatcctccgtgagttgcacgcgcgggtgcaggcgcgggtgcagcggtgtgcatcagtcgagccaggctgagcagcgaagtgggaatcggccgtttctgtcgggcctggctgaggggctttttttgcatccgcgtggacaggctgggaggcctaagcaggcaaccaaacatcaggaatttgcatggactggtgcgggccaaccttggtgagggcaaccaaacagaccctacgtgaatggtcagcgtagcacagtgatgcatatatagcatagtacagactgcattagcagcattaggaacaagagttttatttgattccgcttgaccattccgcggaaccgcgacctagtctgacgtttccacatcatgccgccgtcactcccggctgctaccacactaccacctgtgctcgggctggtggggacggcagtggtggtgatgagccggacgctcagtttttgttgtgactagggaagtaattaagtttttaaagcaatatcatccatgtatgtaaaggggtttcaagagcatcaaagctggaggacagaacattgtgccaaatatcaggtaactttatctagagcaaatgtatcaatactgcacttccttgtcgaagtgctcaggaatcgggaccggtctcccggcagcgacgcggacctccctggtagaccttaaggtgtcttcagaaagtt

SEQ ID NO: 5521 - DNA, 48530 bp, Oryza sativa
  unsure (1)..(48530): unsure at all n locations
cgtacgacgagcaggaggactacgtcgtcatcaagcacgcggcgctcttcacctccaccgtcatgagccgcctcctggcgcgccccaacgtgaagctgttcaacgccgtcgccgtcgaggacctcatcgtcaaggagggccgcgtcggcggcgtggtcaccaactgggcgctggtgtcgatgaaccacgacacgcagtcgtgcatggaccccaacgtgatggagtccagggtggtggtgagctcctgcggccacgacgggccgttcggcgccacgggcgtcaagcggctgcaggacatcggcatgatcgacgccgtgcccggcatgcgcgccctcgacatgaacaccgccgaggacgagatcgtccgcctcacccgcgaggtcgtccccggcatgatcgtcaccggcatggaggtcgccgagatcgacggcgccccgagaatggtacgcaccaaaaaaacatcaaactcttcaccataatctctcccccgttcttggatttgaacaaattcgttgttgcagggcccgacgttcggagccatgatgatctccggccagaaggcggcgcacctggcgctgaaggcgctcggccggccgaacgccatcgacggcacgatcaagaaggcggcggcggcggcggcgcacccggagctgatcctggcgtcgaaggacgacggcgagatcgtggacgcctgagcgaatagaacagggtaaaaaaaaatccgcaagacgtggtggtgacacggaggagttggggacgagaagaagatgtggactttcccctgtgtttttttttcgggatttgcattgatccccttgtttgttttagctctggatgttgattagcgtcttgttcatagcacttccactgccaccgtgtgtgtgtgctctgcttgcctgatgagggcaagaaaacttccatggatccgtctctctgggaggaatgaataaaaaggatgaggaaataaaaatgattcagtgccattatatttgttggtcaggttgatgctaatatgatggctgcatgtttttatatgtggacactggacagagtgagaaactctgttttgttttagaacagcagcatgaccacatgaccaagaaaatgcaacagctcatagaaaatctagccagaacccataatatctggaggcattcagcatttctattcactggaaatatgtcgaaaaacaaaaggtccagttaatcagtcactaatgagaacggtcgatatagaaagctatcaagagcaaagccactggccagctgccctgctttcgagtccttctcaaatctcaacagtggttttctcaccattttcttctctctctcaataattgatgctaaatcccttcttagtatcacacatttatcagtttcagaaaaaggaattaatcagtcactaatcaggtttagaataaggttatagcaattttcattttcacaacaatgttagccagagcaacctcagcatgtctggagctagtgggatattccagactattcgaaatttgatattggtgacaaaggcatatctccatcattgattcctttccaattcgttttcgtttttggcacatacaccaacagtttcctggccctaccataccattttgtcacctctgtacaagaacagacaagcagcaagccagcaaccatggctgcgtggtcctttagttcgagaaatatctctcatggaaaattctttctggagtaaaaaattttcattcttagcaaggtagtatattgttacggcgttaccgcaaaactatcacacgtcacattgaattggtgttttgtggccgaagtagactagatgggctgagttaagaccaaactaccgatgggtgatggcccatgagttgatgtgatccaactacagcccataccgtgtgaagggcccttggatgacaacttctcaactggcccaacgtccatccacctgagccttgaactgagaaccaaagcccgtttggttttggttgcatctagctagccatctatcataggcccaatttatcaaagttgccaaataaaggctttgacccatgattagagtgtagtacacctgaaatcggagggacaaaagtatggcgatatcatggttgcccaaacggccgaagtactcgcagttcattcaggtttctgaacccccccccccccctcccgcgctttactcgtactgtaccaaatatgttttctgagaaaaaaattaagtgcaaacctgaaaataccgcaaaatctaaaaatgtacgtatgatatttatccatgttatcatagtaaaaagtttactcatagtaacgtaaacacatctcatatgcccttttttttaattgtacagtagtttccagatttatactacttatgtataggttgcattatatatatttttccattatctaaagaagagtgtactgtgctacagctgcacagtagaaggtataagaaacagtacacttgcaatgtactagtactaggtaggctggatttttcaccttttgaccaattaaaaaaactgatttaataaatagacccaaaaaacttattttaaaaatggaccattttcatggcgccaatgttattggcacgtggtctaacatctccccttgccctctagtggaagttaagtcactaatatgaaataggtcatattattggcgtcgatgacctatttttaattttttttaattacaaatagattttattgaattcttttacaaataggtgtcaatttcattagcgttgtcatgttgtaccacggcgtatgttggtgtcgagaaaatgtccatttctacaataaactttttgggacctatttgtagatattggtgaaaaattcagaccagatagatgtctacatgagttgtcctttttctttctcctgctgaaacatttttttttcctttactgcccctcgagtcttgagatatctcccttgtgcaacactgcaactgtgcaccacacgcagaagccaacaaatgctcctttattcgttgcgccctcgtcaggagtgtcggccgaggtcctacagccagacacgacccacgcaatttgcaagaaagcatctcttttgcctttcaagaaagggataaaaaggacagacgtccaaaagaaagggggtaaataaaaacgggacgtgaaaaatctaacagcattgccagtgtactgtaaaagatgacttacaagtacagcacgagtaaacgtgtagtacacgagcacggatcaacggtccggatgcatgagagcacgtggccgtccgatgaacaaacatgcgtgtggtttcaactttcaaacacggccccttccagtcatcaatgcatgaaataaataagggcttgtttggatcagtgccctactaatttttttagtgctaaaacatatgtaaattttggcactaccaattacttggtagaataaatttatattcatcttatttggtttgctattaaaatatagctaaattgtgatatcatagtgaagaaattttggcaatccaaaactgccgtaaatctggtggtctttttttttactgcgaatctgcactaggggtttcctgttcgtgctcacttcctccgtcacccggtctctcgcggcagagggcagaggcacagagggcaggttggttgggcggtgcaccgcctttaatcctcccttgatccccttcctctcctctcggctctcgcaatcaacagcagactgactgactgctcattctcactcgcatcaagtcatcaacagtcacatgccctgctagctagtaccaccatctcaccattaatccaccaccatccatgatccatccacagatccactagtacactcgtaggacaggagtatgtaacgtgcctcgtcaacacgacgcgacgaacttcatgtgacggccaccacggagcggataaaactgatgagaatatatatgagataccctgaccggtccaagccccagatctgatcgaacaccatgcgtgatgactgatgagtgacaacaactagttgccctccctccccataatataatccactatcgctccaactcaaaaaacggtcgcgataaacaaagggagaaaggcataaacaaagggagaaggcagctgggtttctcgatagaaaaagaggggcttggtgcggccgcgcgcggcagcagcagcagcaacggtgcgattttcaccgcaccacgccgcgccgcgccgagacggaaacagccggcaaaaactacacgcttcgtgaaccccggggcgcgcccaagccccaacttgtgtctttctttaggcttttttagtacagtagccacttcacatctctctcacgcctataatactacgcggtggtgcgcctcttgtctctctgtgctgctctcactatcgatcgacctctgctgctgcctcgctgtcctctgctacgtgagctcggccggctcgggtgtcgaggacgatcgaggatggggtcgctggggcggcggccgtgggttggtgggttgacggcggcgatgatttttgctgttgctgtgtgcggtttctgcttcagtggggcgtcggcggcggcggcagcgccgacgttcggcgacaacttcgagatcaccggagccgaggatcacgtcaagacctccgccgacggccagacgtggtacctctacctcgacaacaagactggtgagtgagagtagttcgagctccactccggcaatggctaatgctgacgctgccctgtttcttgggtttgtgtttcaggcgtcgggttccagacgaaggagaggtatctcttcgggtggttcagcatgaacctcaagctcgccggcaacgactccgccggcgtcgtcaccgcctactacgtacgtacgatgaactagctagctcgtcttctttgtgtcaactccgaactgaaactgaaaccgagctcctcgacgacggcgtaatctgcagatgtgctccgacgtggacgcggcgccgcagcgcgacgagctggacttcgagttcctggggaaccggacgggtgagccctacatcatccagaccaacgtgtaccgcagcggcgtcggcggccgggagatgcgccactcgctgtggttcgaccccaccgccgacttccactcctactccatcctctggaaccccaagcagatcgtgtaagtgatcaaccgaacaatagtaatcaagcttctagttgtttcaatcgtactccgtggccatccgggctcgccggagatagcatccgccgccgccgccgtcaacgacgacgacgactacgagttgaatgcgcccacctacctacctaccccttgaaatgggtcgctccgatggcgattaattgaacctgcagatattgccaaaccctgccgcttgtacgagcactccaggttgctgctacttggccacattctgtttagaaccaagcaatggctgccaatgccatgccaccaccttcgtcttccccgtgccgtgcccacccaaatccattttctgtcaattaatctcgatttctgatgttctttgcaatggtggtggtgattgatcatcaggttcttcgtggacaaggtgccgatccgcgagtaccggaactcggacaagcccaacaccttcttcccgatcatgaagccgatgtacgtgttctccagcatctggaacgccgacgactgggcgacgcgcggcgggctggagaagacggactggaccaaggcgccgttcatctcctcctaccgcgacttcaccgccgacgcgtgctcctggggcacggcggcggcgagcccgcccagctgcgcggcgtccaccggcaacagctggtgggaccagccgccggcgtgggcgctcgacgccggccagcgcgaggactccgcctgggtggcgaggaacctcgtcatctacgactactgcgacgaccgcaagcggttcccctccccgccggaggaatgcttgctccggacgaccagctcgtgaggccatcgccggcgccgccgccgacgtacatggccgtacgatgtgcggccaggatcggatcgtccttcgatcgtgcggctcagattcactgtaactactacagtactactatttttggattgggccacgtagagtggctgtcacgttggaaaccatattctttttggatgatgaaatggataaaattattatttttcctttgctgctttcagtgtacacgcatcgtagtactagcctgacaaatgacgttgtaaagcatgtgttagtgtgggggtaattttagtggtgatccaatggcgagatgacagccaagatgaagatcagaagatgtactacagtacagaggcatatgggcgaaacatgcgtccagatctcacatctcgttaggcatggatgtcagagaaaaaaataatgtttctctcctgccacagatctgggtgatgaaggtgaggataggctggaaaatgcatcatgatgtgacgagattgttcttgaaaaaaggaaaatgtgacgagatgttcctttcgtttggcgagcacgaatcggaagaaaaagggagatagcaaaaggaaaaggttactactgctgatgaagtgatgagcgatctgtgggcatctgcatgtgtgtgagaaaaagaaaagatggagagggggaaagaaagaagcatccaaaaagattgtgcgccgtttcaacggcaggaatgaccgtggagggccataatctccactctccagtgatctcgtgttgttctaacagagacataagctacatatttttggttttgttttcgtgtgacaaggattttatcctggcatgaaaatttgtctggggtttactgaagaaaagaatatgttggggtttgattcgcagtttattttgaagagaatactagtagtagatcaattacaagcacaatgaggcactgactactctgatggtcaccaggtcatgcagagagatgtcccagcgtatttgataattggctgacaacgttaacggctactacagtacgtggttaggaacactgattatcttaaccaaatcgatctcaccgtatttcaggggcaggaacacatgcagcccatgttcaagtcactgcacgcacctgcaaggattccacggcaacatcttgcactataatcttatctatctgaacacatcatgagcaataggttgtacacattgacagagaagaagcaccacgaaagtctgaagttgaactatactgtttgaccacctgtagcagcaggatgagcgaattcgggactgaaaaatgctgtgatgtactacgtgcacgtctgactgaacaggggacaagattgcatttgatttctcaaccttgatggtctggtcgtaacatcattttgtttgttgaaacttgggggaagaaatcactcaaaaaagatggtacacatacatgctgactgatgaaggcgacgtagaagcactgaaggcttcgagaatcagatccaactttctgaatcctgaacctttgtgatctactagtactacccatgttcatttctaacttacccagctttgtgaatcctgtaactactagtactacccatattcatttcgtacaatacactattactagcacgagtactgtacataaccataagaataaactcattgcagtacactggaaatatcactgttgaagtgccagaagtatcatgagatgtcctgcagacatgccggagaatgactcatgcacagaatgaagctagtgtaccgtacccagcagtaatgaaaaaacaaacagttcacggtctggagtttggatcaacagctagtactccacagtagaaggcatgcagcttcagctgacactactactagtatcaattgccatatacatatacagtagccagtgcatgccgacttcactacttcagcagttcagctatcgtccatgaaaaagaatgagaaaatgagcaatctaaaaccacaactcctggagctagctgaagcataactgtatgccggacgttggcccattctattccactcaaatcaatcaccataaaccgacaggttgatcaagatccaccttactcttcaggaacatatgaacataaaaaaatgcagaaaagaggacatccgtcccaaaaatataagggaattttgctctaaactgccaaaataccttatttccttatattgtgggagtgtgggacggatgtaagtattaacacaatcaggcaagcaggatagcgctctcaaagtagcatatattattcaatcttgatgaaagagggacacaagccatcatctatagtgatggtgcctcttacaaacttcaacacacgggtaacaagcatacactcaagagtcaagaggtggctaggttttgtgtgtacaatggaacacgcaggcatgtacacaaccaagtatactccaccccaaactatagtctttgcaatggttttggcagttgctcagaaaccatgaatcttgatgtgttccttcttcacaatgccggcctgcgggacatagcatgttacaacaagtcaagacgtattcttttcatacatcacagcatgtgtacatctaattgcagtaagcatgcacaagaagaatgatccctacctgaacaagaaaatttgatacgtttttcctctgatcaccctgaagttgaatgacctacagagtgaagcattgatcagaaaaactagctcagaaagatagaaaaacgtaaagatcaggcaccacaaatttcggttattacacacacctggccaagctctgggtcctggacaacagtaccattgcagcaaaactctttcttgagatctttgaggatcttgttgtagctgaattccttcttcaatccctggacagtggtcaggctcttacggccattacgctgctggatgcgtacatgaacgtagtcctttgatcctgcagccgcaccagagtctccagcattggcctcagcaaagggatctgtacatgttcaggaaaacatgatgagcacaaatattccaggcactcagaccatcacaaagagggaagagaacaacatgcataccgaaggcagttgggatctgaatgtcgagatcagacatgaaactttgctggtgaaagtggcaagctacaccaagaactgcacaaaggaaatgaatcataagaacaagcagtataactatcccgattacagcttcataaatttctttctgtaatcaagcagtcaaggaataaccaaaaagaaacttctacaggtagatacaagaggataatcgatagataatcgatgtgaatttgaaaacaaaattgaggacagttcatgccagactttcagctcagaataatgaaggggtgaaagctaataaaaaaaataatccaaatgaatactgcttatgctacagttcatttcatataattaaaaatggagatcagaaatcggataagttcttctcctgactaaactataggggtattacctataaactgaactacagctaggataacgctataaaagcattatttgtagcaatcaattcattgaactgaaccagaaagtgactttttaagatatttgggaaaaaaaattctgggactaaagcaaatcggaagaacagggaatcccctgttcctgaggattataactgttttcatgaatttcgtgatggggactactgtatctaaacaagccagctgcgaaattttggacaggcttaagaatcaatcattcaatctcatcaacgggaccgtcttcaaagttggattatttttgttcaatagggaataaacaaaggatagcttcgtcaaatcgagaagcatcactaccagaatcgaggaccaaacaaatgtactttattacaccaagcaaaatcaccggtgctctgattttacctcaaacaaaaggtactcacaaaatcgcaagattccgatccctaaaccatttcatttccatagagctctccagacgattgaaaaccatactactaatcaaaccgaaccgataacatgcaacatcaagaacccctctatcccaaatccaagaacaggaatcatcacagatacagatcccctttcctaacatcaaggcccgtactacacaacctagaacaataaattcaagaacaaccgaagggaggcacataccctgtgaggaggaggtggaggagggaagagatcgaccaagaactcgaccggaagatatggatcgaggaggcggtcgctcggcttctgctagtcgcgtgtccttggtgctctccctcttcttggcttggatgcctcctatatagagaggggaaaaggggggaggaatttatagacgggaggaggaggatgcttggttttctttgcctctcctcctctctcctggccgcaaagcctgctgttaaaaggttgttgcggacttgctgtcctccgttagatcatcgttttttgtgggttgttctgtgggcagccactctgttgttgcctgtgtgcccaatatgggagattggcgctcgcgcacgagcaaaattctttttttttttgtatgtgaaaaacctaaatagttcgtttcatacttttcatgctattctgtaaaattattttttgtattttagatattattaaaagtggtctggtgatggtggagtgcttgaattcagatattgctacctaaatgtattaaataggcgagtgatattagagatgtgtcgctagttgaacgtgtattgaggaggtgcactcacacatgcacatgagcacaaagtgtgtgcgtaagtaccttgcatctaatcgaaaaaagataaataataaaaataagtcaattgtctttaattactaaataaaaattgagatggagtaagacatgtccttaatgacgtgcgatataacgaatgcacaaactataaaattatataattatatgtttaaatctttgccgatacgttcagaatatcttcattctatttttttttaaaaaaaaatatctctctttacccattgagttcagctagaaagatttttttattcaagaagagtttgatgacaattatggctacctcgaataatttaacttcatgacagagatgtgaacgtatattctaagcaataatgatttcattttcccacttaattactaaggaaaacgaaactagtgtagcgactcttttttatttagcccgattgccactaaagtaggtggatgagtttttcttacatagttctagttatcagcgctacatatataaggtctcattttatatttagcacacgttccctatattgttagttaggacgtgaaaacggtgcggaaacttttcggattccggacctatttttgaaaataaaatctgtcggttggaattttctcgaaacttctgaaaattttatgactgaaataccctgggttcttttttttagcactgaacagtgaataccatggtgtttagatgttatttttaaaaaatatttgttatgcaaatctgaagttacataagaatttttttttcccgcatttgggatttatcaacagcattactctcttaaatatagataatttatttcatacattgtgttttgtgatgtactgttgagacttaacaattgaacttatataatttgtgttttatgatgaattgttgatcgttgaaacttgagaattagatttatcagtttgaggggtttttgtattccgataaatttccataccgtattcgcgtcggttcgtttttgctccgttttcggtttcaataatattcgattccgttttcatatccggggtttctgattccgattcagaaaaaaaaaatgaaaacgaaaatgataaaagttgttttcgtccgtttccgtaccgttttcacccctattgttagtgatggccagagagaagatagcttgtgtgaggcacaaagtaaaaaagcaatattgaactgatgagcacaaattaaaattatggttactataatccatgccattgcaaatttgttgaattgaaaaaatatcactactatccgttgatattggtcgtgtgccattggtatattttgtaaaaattttaatttctcaaattgtaagagaaaatataccactatatacggcccggacgtagttggacttgattttttcataccgtattttcgtataaaccaaaatgcccccaaaaccttataggctaactagtggaacccacatgtcaaccttatcttccctaacacttccactagtacagcaagactgacgggagtagagtggcagtggcgacagtggtggagagattgaaggtggtgtcagtggtggagaggtcaacgttggggcttgtcgatgacagcgacacgagaaacgaccaccgccactggggttgcttctactactgctcctcaccgccccaatctagcccgcctgcattgaccttgccgccacgttgtcgagaggctagcgatggggttttcacacgaggaatgctgccaactccctcgaactccgtggcagtgatgtggtgaatgggtcggtgctgggactcaccgacgataatgagacgaggaccgaccgccgccactggggctactattgctcgctgccacaatctagatgttgctgttcgcctctggggctgcaatctacgctcaagctcaagcacaccgttgcaggatctaccacaccatcgggaagccaggtgcggggacgtcatcactggtaagctctagtgccagccctccaccactgttgttgttgcagtcggaatcgtcaagctagaggaataatcggggaagaagataagtttaacgtgtgggtcctccttgtcagcctctaagggatagggagcattctggtaagtatgaaaatacaatataaaaaacttggtacaactgtgtttgggatgtatataatggtctgtttcaaattttacaaaatatcgatgccacctagccgatattgtgaatagtagtggtattttttcaatttatcaaagtacaatggcatatggatccaattaactttaaaattaaattcatattagaccacacctataatagaattcttaaatactctaacaaaataaaataggacattgtgtatgaacatatttaaaaatttgtttgtatttttaagtagagcccattagatctctctaggtacgaacatgcctctatttcgtaataaaaaaatagctataattattgcatagaaaatacttcatatttttttctcttttgtcatcgaagaagtagtaattccttccttcattctctttgtattaattaatgaaatgttgcttaactaactaaaactaactactacattcttttaggacggagacggatggagaaaaaaattacgaggaaatggtgacacgattcttcctaaaggaatgaagcatactacgtgcccgctacttgcagagaatccggaccagacgaccgacctacgctaatggtcattccaacccgcagcatcagacgcggtctatgccgggattacgacgaaacgtacgtgattaaaccaaaattaattatattaatcaatcaatcaatcccaaacggcaacggcgcatagcggagcatcgtcgatctcccgtatccgggaatcgatacgagcagccactaggcggggcccaccttggccgaggaggtgagagagcgaagccgtcgcgactcgcgagacgcgactgggagggatggatggacggacccgattcccccccggactcgcggttcgcggattcgagattcgcgacggtgacacccacccacccaccaccaccgccacgcggggcccccgcgagcgcgcggaccccgccgcccgcggattgataggggcgccgcgcgttcacgtggcggcgggcgggcgggcggcatcgcgttctttcactccttgcgttgcgtggggcggacgcgggtagcgactagcgagcgagacgtcgagacggcgtgcgacgtgtgcgcgcgcgcgtcgcgtggcgcgcccggctcgcggagggaggcaaaagcgagcacgcaccggcaccggtgcgcggtgcggtacgtgggctcttggtgcgaggggtcggcggggggcggaagccgtggtgccgtctcgtgtcgcgtggtggcccgttggtgggatgggggcgtacgtacgtaccacgcgattcatgcggtgcgcgcgcgcgccgtgtcgcttggtgggtggtggtggcggcgtttaccctttggcggatgcggccgagggaagcgtcgcacacccccgtgctcgtggtcgttcatacggcgggttggtgattgaatcaccgtgatttggacgaacgcttcgcatcacccgatcgatcaccgacgacgattctcgtctaggatcacaacaggacgacggaagcgagatcgtcgagtcaattgcccctattcttttacgcagtaccactaatttgctgctttcatggagcggctcaaggcaaggacagccgcaagaacaagcacgggggatttctggaaaaagctggtttaggtagcgtcctttgcacgttaaaatttcagatcgctatcgctggatgacgacggactgtaggagtactactctgtaaaagaggatggaggcataaacatcacgatcggaagcagacaaggcacacgattcgtaccaacaagaaagaaaatatcctgtgctcgtacaaattagtaatagaaatatctaatctctcccaggaaatagtactacttcctgctaatggttgagtagtgggcactgacaggcgatcagctaccggccttcttgttgtcgacatcggagcagggttagcctttcattgatcatatattgtccgcataccgcttagctaaccatggcgcggccagactgaaccatacacgtccttctttgtgtacctcttgtcccaagaccatgggacatctgaaagtaaaaaaaacatttctaagtgttttactattgttactccactgaagttgtatcaatcgttaaattaatccagctcaccttctgtgccgtaaggctttggaggaagttgatatggcactggcaatctgataatttccgtggattgttctttttcttcgtcgcttttccagcagagtgtgaccagtttggttttgatctctttcccaggggccaggttattctgggtaaggaacttaaaatgatgaaaaaaaaaagcaaagtgatcacattattataatacaaaaggaaggagaaattagatagtaccaggtttgaattgttcttccccgtacatgaaaattgtggtacagattggtgagttttgggcaagaacagtacacctaactgaaaagagatcaaatggcaaggtataagctacgattccatgatgaccaacactatgttgcagagcagttttcctgtaaaagtctggatgttcagaaaatttcctcaattcaacaatggaacaaaatcatccacctcatatgagcgtatcatcagttgtgtattattcttctgcaacgcaccccaagcagctttgcttaaatttgccgaggttagtagaaaccatctgatgaggatatacaaagattccagacaatgattcaatggaaatactgttattaattctagagttcaaaacagtttatatggatgcttacgcaatgtcttgaccattgtatcgagtaaaagtttttatgtgaggcatcgcacgactggtaagaaaacccaaatcagaatgtcagtccaagtcagtgataaagtaataaacactctaaaaaggatcaaaatattacagatctaggtatggcagggatgccaacctttgcaagctataacaaatatccatcgatcaactaaatatgctcaaggaatactataaaatatagacaatcataatcattactccctcttgtttttattagtatatatgactacttcaatgaactgctgctttttagattacaatgatattcttcgctatctttgcaattaaatataaatttgccttgcctaaccttgggggtagagaaaatataaaactcattttgcacagcactacagatcatatagaagaaacattaggcccctggtatgtggtattgattttggtaattaatgacaagcgctaattatggactacctattcaatttgagtaagagtttgagttaggaccacatgatgtgcatatgaaggatgattaccacggattaaaaactgatggccaagcaatgagatgaatgtgataaatatagcttttcgtttttatcaattgaggtgttggatgatcaaatttgctaggtttcttaatagctttgctgtataggggtggtaaccttggtgaggaaattatcaaaatgccatattaggtcacatgcatgtgggtgcttctcttggtccaaatctgcttttattctctgacctcaggtggtttgaccgaaggtttcatgccggtctgaccgtggtatgtgctccggtctgaccgaggccttgtgggcggttagaccatagagttctattctcgcggttgcctcaggctccaagtcctgaaagccgatctgaccggcgcccttgtggtggtctaaccgctgcggtctgaccgggcccagcccggtctgatcgggagcacttggagcaaaataggaggcctggacttggcgctctagagccactagagcttaagacggtctgatcggtggtagctcaatctaaccggagccacccgcggtctaaccggccagcctatggcggttagactgaaggtgcattaaatgtactgcaacggctagttttctatccgttgcactagaggccagtctaaccgaacatcccttggtggttcgaccgacagactcctgtgagtcgtgtttcagcccccaatagctagtttttatgtgtgggggtatatatactcccccaccagcagcaaggaggttctcttggcacattgttcaattgtataaacctcttgcattcactctcacaccacttgagcacttcttcatcctttgtgggtgtttgagaatagtttgagcgaagtcaagtgcattgcatcatcgattgagctagtgtgccacttgatcatctacgagtttggttgctacttgttactcttggaggttgacaccttctagacggcttggaggagttgtccggtggcctctccgagaaggttgtggaggagacccggtgttgggtgtgagtggttcgaaattcacctccttcagagcgaaggaactaccctagtgatcgaggttttgtggtttgagcggtgaagtagggctcacctcaacagggattaggaaaccagcgagtttccggacctcggtgaaaaacaccttgtctcttgttctatttacttattgcatttacatttgtgtaatttacttttatacagattttttgagcccttatcaccctaggattgcaaaacttaatctagttgcttggttagacttcttcctaaccaaacctagcaacttaggttagttttgattaggtatcatttattttaaaaatcgcctattcacccctccccctctctctctagtccttgatcctacacatggacacataattaaggttgaacagcaccaacctatcaatttaatgtttggtcacaaatgaccgttcctccaaacatggctgtcgtgattaaagaaacatcaccaaacaatttcttgtgatatgcagcaccatacgggcaaggtaaccattaggaagttccatttgaacaagacaatagcttgttagataattgaaggaatcagggaacataccaacgacccacatggtccgctttccacctggcccaatacttcctcaagaaatctttttcaacattcttttgagggcttggaatgcaactaccagctgcataaccctacataagaaacatttgacataaaagaaaatcagataagcggtgatactagtactcgggtaaaaggattagaaaaaattcaggtcatggaacatgctgattttgagagggaacacaatcggtttatacttcttttttgttattttggggccagcactgatctatcataggacatcatatctgaagaaggttctcaacagatcaagaaagcacaaggagctttcatgctcgtgtgttttacgatgcaatatacaggaagtatgattagagaatttttacagatgttaggtttatacctctattgatgtcctaacatcctccactgtaggccagacaatcagtggtttaccaatacccaaaggtgaaccattatctgatttaccagctgatagtgagaatgcaaactcactcatccatttctcatcaagtgaccccaaggaagagaactgcatacaagagaattaaaatgctaaatgtcctttaaggagaacaagcctgggaagtaataggcgagtaaaaaattacaatataaactttcagtgaaacagaaaggggagatgaatgccagattttaagtccaattaatccgtgatgatgcaggtgacaatataacatatcccgcactccttatagtctcgctcattcttgcaatacaaaacaagaaacagctattaactaagtacatattcctttgaccattagtgcaaatttttttacagcttctattaatggcattagtgtgctacaaagtgcagggttaaggtactagaaggtctttcctaaggtaaactaggcaccatgtgatttttgtttctcaatcttaagcatttctgcttcaaccttaacagggttattaaggcattcactacatcacttcgaaaagttgcctgtgctaaatgctaagataaatggataaataactcacacattcaaagatacctgataaatcatgggagccttgcaaaactgttgttcaaatgtgcacccttcaagaacactcctaagcttcatatgaccccactttttaatattggggccaacatgataaccaggaacggatccaatcaacctgacctataagatgtaaaatcagctgagactaaattatgaatacacgagagaggagaactggtgtgtgtgctagtatgtttgcttctatgtaaaactaatagaccttttgcgagtgctgctgagcttccatgtacagtttatttagtttttgtgcatccaacagggagagaaagatcaagggccaaaatgatgaggcaattcctcatttttcgctttaaatatcacttcattccttatttgccattgatgtcttactgacaataggaggattgggcaagttttcagtggcatatgtggactttatcactaaacacgcaatacagaaggtgcagaaaaaaaatgcatagattaatttcaaatgcaaccaaactggtaaggtccaacataagattttaaaatggataacaaaaggagcaatagaatggtttcttgtgaactgaaaatccttcagaacagtaaatactttgtaggacaagcaataaaaacagtgctaaaagatgatgaaatctgttcatttattgaagaaaagggaacttttgcataaagcagcctatttacggcggaggcacaagcataaatcagtgatcacgtgattaagtaattgccagcatttatcatgcaaagcggacttcaattttttttctttttcatgtcagcctattgcatggagaaaaaaaaaacgagatgtttacagctgagcactgcacactaagtgtaaactaagattaatggattatactaaccgatgagctcttataatcaaacttcctaaagaatgctgcattgatgttgacatcaccaaccactggtaaatttaccctgaactcaggccactgcattgtcatgaagagaataatacattacaacatacatagagaagatgtgtttagtacactgcaacggtagggaattaaactagaacaaaagtaatagttagaatgaactggggcttttcgaagctagacagcccgagacatcctattttcattcactccaatttagaggtacttattacagaactctgtacaatgttccacagaaaataagaccatgttttgtgatttgctgaaactttcattatacttattttaaggtattctttaacatggctcattgcttttagcaatgagacagctactgtcttactataagtttgcaacatgttgccagcaattccaagatctctctctaacaaaatcatgatatgcatattttaccaattcagtgttttactaacatgagaacagtggatccccttgtgaaccaattcagtagtatttaatatgatttctttttattgagtagcagaagagtagaaacagaagttgccagtgttaactgtgattgttcgagaagtgcacagttatttgttaatttttattctggtaacctccggcaaaacacattatgatgataatttaaaatatatcagtaagaaaacaacatttaacttcttttctaaaaaagtgaaacacaattggagtgatacgttaatcaagaagcaaagacaagtgccctgctagctgctaccttaattgcactcagataatcaaccaaatcgttttcaaaggaaacacttctattcacatcttttgcatctttccagggaaaatcttgcatccatagcccctgagttttgttattccagtcgacatgtatcaaatttgctgtgtgcacaacaacacgaatcccttgaggatatacaagcagcatggcctttgaatgatgtgttccaaatgaaattggaagtggaggcttgtgaaggatccaattggctggcttcactntctgtcacccaccatgaatntgagatgagaaaaagggaatacannaatatcatgaattactctagtaatgttgtcaccttcagaagctccactgatgcaccatcttctccatgtataactaggacatgtcgaactttccttaagcttggacatgctgcacagtgcaatgttatttacattaaaactaaaggatgtagataatggcaatgactggaaaagaaagcacagtgatatttcaccacatagcatagggaacacagatgggcgctggttgccaaactccttagtaaatacatacatttcataactaagtgcatgtcaacaaaaagatacatgaagtagtggaaaatagaagacaaatgagaatcataatcaaaaatagcaaaataaaaggccaaaagtacatgttttgcttatctttgtagtccagtttttttattccacaaatatattatgctttacaattaactagtaaacatacaaattgtaatcctagccatagaggctcagaaagatgagcttccaaaattattgcacaggaaacaatttaggtaaatcaataacataaatgactatgattctagaaaccaatagagagtgaccaatatagttacatcaatttatcagtaatgaagaatatgagatgagttaggttgttaccagcagctactttcacttcaaaaagaattataccaatgaatagttacagcaaacaaaacattgaggggaaagctaccaggatggcagaaactaaatgcttattcaatgaaaaaaatgtggcagattactttcagcaacaaagaaaggactgcttttcctcttaccaacaagcacgtagaatttagtattaattgtgcagtacaaaaaaaattaaaaggagcagacaaatataaatagcacaggatcgtagttggtttcatgattgagtgttctgacttctgaaactgtaaagtggcagaggcgccaaatttattttgtttgcaaaaaaggtcactacttatggtaaaaaggaagcagccctcatacaaggacaaacaatattacttgtatgatttccaccacaataacccacctgtaagcagccattccatgtccaccatataatttgagagtacagcaagaagcacttcaccctaataattcattcatcatgtaagaactagtatacttctttgatgaatctggcaatgcatgaatagagtgtgaacataagagaacatttgttttagagaaatggttgggaaatgatatgcaacacagtatccctgaaaactgaacagatcagcagaataagaactagcctttgctcccccaccatacacgataccattgacaatatagacagaaatctttacaaggtccaactagagaacaattccatctttcaaacagcagactacatgagttgaggctatatagtgataaatcacaaatggtatatgagcaagagtttgtgttggtaatgattttctttttgaacaaatatgttggtaatgatgagcaggctaagaaatttgttcttatgcaacatttgtgtcctgaacagatcatatctaaaagatgttgtggcacgccatgttaaacgaaatcaaccacataacttccgcaagagctcctgttaaatggatgatacctgtatgacatcttgaatggtaactgaggaagtattagtccatgaaggaagaccttggacacgcatgagccgaaaagtcaatgaaagtacatctttcagataatcaacagagtgtattctctcgttatttctctcagaaaaaccagcactatcaagtgaacttaacatttgatcacaacccaaaccggaaatagttgaactttcttctgcaaagcttttctggaataggacaggaaatagtaatgaaactaagatggtaatgtactatactacaattcaatagtatactggtaattttacacaaggaaagaaaacatacagctaaactaatattcagcaagctaaggggcaccattttttacaatgcaaaatataaaatatgccaacactaaacaacagaagcatacaaggatagcatatccaatgctgagtttcagaaagcaaatccaaacatccaatacttagatactatttgataaatattcaccacagataagtacatttctaaacgcttgcacctttggatggtatttaagtgtaccaggatctttcagtggtatatttatgaatcaggatctttcagtgtcacagcctggagtctatgaattaagacgtaaagactttattttcctaccagaaatatataaagatagccactgatcaatttcataaacaattgtctgacataatttaaattagtttatccacgataaagttatcagaatatacactggaaaatcccttcttttaaaggcattctttaagggtatgtttggttgtttgtcaccttgagctatagcccagctaggcaaaccaggttgttgctgcgttgctaggcttgctttactgagttgtttggttgtttagtttttgacgggcagttagttagtctaaagagaagtttgtcgtcgaaggagagccgaattggctctccactgcgagcgagcttttccttgcccgtagggctagcttgcccccagaagctgcgatatatttatggttccaaacgctgggccttgccaggccaggctaggctaatgctagccttagatccaaacgtgccctaagtattctatgtccagcactaggatcatttatgttatattaaaactacagcattgcccagattaagccatgatcagactaaacggaaatatgatacacggaaaaccatggattgctctcttctaagttaaacaaactgcacaatacaggcagtgcaactagaaaggttaagtacttaagttacctgtaaacttcttgccaaagcctcatcttccataatctgacgatttcttttgataactacagtatcatcctcacagagcctcttcccctttttaaaatcacttgaacccattgatgtggaacttttatggttatcgcccacattcaaatacttcacaaaatattcaccagggatgagttccaggacatcatcatgtgcaatctttactctctcttgagcacagaccttcctcctctggccctcagatcgaacaatgataggatttggtccttcctgcacatccaatgccaatgaacaacaagttattttctgaaaaaaaagccatcagaacaatactgcgcagttaattggaatatccccatgccttatcacactcaccactaccgcttcaatggaaccatccgccgaggcatgtaggctcagatgcttgcggctgactctcttgtcgacgaccaccaaatgattcctccctacaacattggcacccagatagataggaatgcttgacaccgatccatttgacgagctcgcatttccttcattgagggggactagattgccaacccttacctaagcaatacaccagttttcacacatcagctcaacaacaaaatcttaaatctcctatggaaaaacactgatcagaatacagcgcaatgcactgaagcgattcgctgattctaatcacgcctcccatccccaaacccacccggggagaaaaaatcgcacgcgcatatcatcgccaaaaccacacccccaaaaaaaatcgcacgcgcggagagagagagagagagagagagaggaagataatacagaacgcaacttactcgagacgaggacgtcatgggcgcggtctgggattgactccaaaccctaaaccctagtcccccacattggaatcctacccagcgcaatggggaggaggatggggaagggaaagagaaccggagaagacgaagacgaaggccattcgagagctcgagtcgcgcgaaccgtgattgcagcccaaccaccaaatctatatgggctttagcccatttatcaacttctacaaggctgacgtcgagaaactccatggcccaaaaaagcccatcatcaactaaatcagacccaaaagcttcatctagaggtcactgggctggagccgccgccacacacgtgagtctcctaccctccttcctcctccggtcgtagcggcggcgcccagcggccgcgccaccgcgtcgtccccccgccagctgcggcgcctcgcctggtccaccggcggaggggccgtgcggcgccccgcctctttcgcccgcggagaccggggaaagcgcagttccgttgctatcagcggccttcgcctctgccctgagtaggcggcggaaagcgcggtggctaaggactccaactgcagcggcgtgttccagaagtatcgcggaaactgacgccttcttccgggagcaactgagcaaagggtaactttttttttgttttttttgtttttagtgagcaaagggtaactgaaatcatgactcctaattcagcttgactgctttcaattctcgagtagttgtgacatctagcgtgattatggctttcctacatcttgttttggtttgtttgtttggtagtagtagaagccaagagcatcgtaaagatagaagcgagatttggggaaacttactgttctgtaaagctggagaaacgtaggttttatcttcctttttttttatttcctttttgggcatttcaatccttagaatatcatactaattgaaggtttagaggtatgatgaagacttaattaatgctatgctttagtgatcatggtgttcttttaaataataagtgttgatcctagcttatattgaaagctaatagtaatagcctaatatagggtatttctaccaaaaaaatgtgatcgtgctgcttaggaaacttaggagctggaagttttgaatattactagaatatagtgtatccttattcctgaatcctgaaggttagctaccactttgtttgaatagctaccaccttgtttatcttctgtccaaccttggcgttaatccaacacaactacgcaagggatttatgatggttcgaatgagttgtgtagtgcttatttttgtgtgaggttgtatgactctgcttgttgaagtcataacatttgacatcatacagtttggctcgcactgcattcaatagtcaatataacctttttcaaaagaaaaagtcaatagtaatggtgacatcctaatttctcttacttgatgaagtggaacatgacgttaatgttagatatacccataaaaaaattgtaaagtttcaaacgtctagagtacgtagtttagtgaatcatcatttttttgttttgctttgtttgacgtgcaacacatttttgttcataactcagcagaagttctgtttgcacttttccatctctcgtttctttgatattaatatttttgtcttgttgcatttaggtatgcatacattttcttactgagcaaccttttggaatccctctctaaggaactgtttactgcaacatctttaggttcttattaataccatggatcagaaacctaaggatgattttgatttccttgaaccatcagtactcttagatgagacacactatcaaacgggtttcaagaatggttatagtgagggcttggtgtctggaaaagaagagggaaggcaggttggtttaaagaatggttttcaggtaggtgaagaactaggtttttatcagggatgtctggatgtttggacgtcgttggtttcaattgatcaagatgcattctcagctcgggtcaggaaaaacattgagcaactagctgcactgttgagaagctatccgttgtcgaacccagaagacgagcaagttcaagatataatggagaagataagactgaaattcagggttatcacagcaagtttaggtacaaaactggagtatcaaggtcgccctacatcatccaagcaggatgttgaggatctgtaactagtttagctttcattgtcaaattaccatgttgaaatgatatatgagacccaaacatgtttatgtaggtttcggttaacgaatacttgttcgagtgaatgctgctatattactctgtttctaaacatcttatgaaggccaccgggatcacagtggagacctgaaagcctgtatctgagtatctatgtacactcaagttaatttgaggcagttctggactcatcttgtttttgatccttagtcctgctttacttaccacatatgagtacctccgtgacatttatcataattgaggtgtaatataatgtcttcacaaagaacttatcatttgcttcctatttgcacataccgtgcattccatggctgtgttggggaggtgagttcgcacgcaaaacggagcgacacattttcttatgattaattaagtatttactatttttttaaaaaatggattaacataattttctaaagcaacttttgcataattttttttttaaaaaataccatttaatagtttgaaaaacgtgcgcgtgagttgggaactcaccggtgccctgtaaacctgcattctctatgcggtaagactactgatcgctggtcctgcttttctgcaaacggcgacctggtttcaggtaacgtttctgctgctgttactcatcatgatcatcatcagtatacctgattactctatccagcacataccgacatacggaactttttttttttcacagaaaccacgaacgcagcatgccagcagctaggggtgaaagcggtacaaaaactttccggattcctgacctattttcgtaaacggaatctgtcggtcgaaatttttcggaaacggaaacgaattcggaaatattttctcagaaacggaatcgaaaatgataaagccagtttccgtcggaactcggaatcggtcggactttccggaaattttgtgactgaaataccctgtattctttttttaggcactgaatagtgcataccatggtgtttggttgctatttttttaaaaaaaattgatctagagttacataaaacatttttttcatgcattggtatttatcaatagcattactctcttaaacagataatttattccatagactgtgttttgtgatgtactgttgagacttaacaattggacttatatgattgtgttttatgatgaattgttgaaccttgacttgagaattggattggtcagtttgaggggtttttgtattccgataattttttgttaccgtattcgcgccggtttattttcgctccgttttcggtttcgatggtattcgattctgttttcgtatccggagtttccgattccccccaaaaaatgaaaacggaaacgacaaaggtggtttccataccgttttcacccctaccagcaacccaagctaggcataggtgcatagcaaaccagcacaacaaccaacaacacatcatgctaacaaggctcatcaattatcatccccttcatccactgtccacctaagcatagcggcaccaacctaatcatggctcggcaacgccacccccaacctggtcctcgatgaagctagaacaaaatgtagaggggatgccactctcttgctttattttaggctgatacagttgtctaagtatagacaaaatcgcatatatggtgaaaatttgactcctggttgaaatttctaaatcgggtcaggctcgagttgacaaatttcatgagccaaacaagactcattaggatagctaacgagtcagcccgtgtggagtcaagtttggtccatatccaacctaattctaagtgaatgttctaaacattaatttaacaccaaactataattctatgagctgctaaatgattttaaaataaaaatcaaataaacatgcgctacaatatttctcgtctcgcgtgcatagttattagaaccggaccggaccggcggttcgaccgaaaaaatccggaaccagggctcccgccggtctggtccccttaaaagatcgggcatacaatcggaccggagaaaaccggttaactcgagtggtttttatataaaccggagattaaccgggctagttgaattgggaaggatttgttaatgggctgagatgaggagttaatgggccgagatgaggacccaactagatgcctccaatgcatgcgcacgcaaaattcccaagaaaattggtggagatgcgcgttagccaagccaccatcctgccgcttgtgctactatataaacactcattctatattacttatcggaccgcggtcattctccgatccggtcttaataactatactcgtgtgctgtaggctatagcaggattcgttttctactccatacgatttgcacacgtactccatacgatttgcttgtcgtggacgcagcagacctaccacggaactctcgtcgtccaccccaccccaccccaccgcccgtgtccatgtgggccacggttatctgctagagagccccgtccggacacgccatcctcctaagcccatctcggccgtcgatctccctccaaccctagatcggacgaccagaaaccgcctccccttctcgccgtccgcttccacacccgcccctatatactcccagccgcagcccaacgcggcccagaaaaaccgcatcccgcaactccaccgctcccaatctcgatcgaaacgcgagggtttcgcatctccgccgacgcctagaggaagaagggatccgccgccggtagccaagccatgccgaagaacaagggtaagggagggaagaaccgcaagaggggtaagaacgaggccgacgacgacaagcgcgagctggtgttcaaggaggacgggcaggagtacgcccaggtgacgcggatgctcggcaacggccgctgcgaggccatctgcgtcgacggcaccaagcgcctctgccacatccgcggcaagatgcacaagaaggtgtggatcgccgccggggacatcatcctcgtcggcctccgcgactaccaggacgacaaggccgacgtcatcctcaagtacatgaacgacgaggcccgcctcctcaaggcctacggcgagctccccgacaccctcaggctcaacgagggcgtcgacgtcgacgggcccgaggacggcggcgaccacgacgactacatccagttcgaggacgaggacatcgacaagatctaagctcttttcttctttctccgcagctacaatttactgctatgttctaattaatagctatgtgtggtactatgtgggctggctgttatggattgtttggttgccggtttcatcttgtgatatgagatatttgtcatggtttgaggtggttaaataattgttggattccgtaactttaatctggtatacatgatggttatgcgtaattgggatgacctgctgttctctgattggttcttcctagattagcatcctgttctctggtagtctgattggttgatttcttcttagattgacatcctgttctttggtagtctgattggttgagttcttcctagattggcatcctgttctctggtagtctgatcgattgatttcttcttagattgtccataattgaaggtcttgaaggctttgctccaataatttgaaattatatttcttatacctgatagatatcttatttttctataacaaacatgattcaattgcaaactactcaaacgttgtttctcttaccatacgactttgtaattgcaaactgctcaaatgttgtttctctttccatatgagtttgtgggtttcaggttagttcaatgtttgctgattatcttaggattaatctgctacaagatgtagcaattgaatttatagtgacgggccttacttccctgagataacaaagaattgcgtgtcaatcagcattgaattgatagtgtttattgattgtctccatcacaacgttcttgtgttcacagttttttgacacgcgaaggcttgtgatttctctgagaattgttgaaatgttacatgtgtttcatttgtttgtgtactaatgtgttttgtggtgaaagatgattttactcgtatctttgtgctaaatacagcaacccattgatctgtttaccctaaattccttcaatgctgttgcaacttgcaactaatgtcgctaagttccttcattgttgatgtcacaatttgtcttggttttgttagcttgtgctttgtcggcctagctgggttgtcgagtataaatttggctcgattttggtctaagatgataatcttctacatggtattactgtccttttgttctgcacttctgctgctgggctaagaataggattggctattcaatcaaaagaattgttatactggaaataatttgggggtgcaaggtacttctggcatcgacctctggacatctgacaagatgtaaactacctgaattacatattctttccaaatataatatgctatctttttatagcaggctgcctactgatctgctgccagttttagatgtgatgcgatatatatgctgtaaatagttcattgaatttctgatttgtgctttatatatgtccaaacccacaaatatccaatatactatctctgtgtgcttgatatataccactctccgttttaggttataaggtgttttagttataatatgttttgattttggttaaagttaaactgctttaactttgactaagtttaactttgactaagtttgtagaaaatagtagtaacattttcaacctaaatttattatgaaaatatattcaattattgatttgatgaaactaatttagtattgtaaatattattatatttttctataaatttagttaaatttgaagcagtgtgatgttgactaaagttaaaacgttttataatctgaaacggagagagtaaaaaataaacttaacttgaaaactaacttcacgagaagagtgaaaaataagactgaataggtcgagcgatgagaacagggagcacatcactgaaattgaagtttatgtcaggttcatggctaaataaaaaaagaagaagaagcagaagaccatctccatgcaggcacaaaataaaatatttcataaacaactaaaacaaggattagtttcagtccttaacacgcatggcctaccatcccaaacctttgcagggtcaaccctatctgcaaagtgtagaggttctttagattgtaactaaaataaacattaacaaattttagtgctaaaattttgataatttagcaatattattaagtatttttagattttttatgcatttaccaaagttcgattaaatactaaatggatgcatattttcagcaattttactgaacaatgatatagtttgaaatgagatcaatttaaacaactccgtagtacccttctacctttcatattacatgacccgcggaacttctaaaacttaattcaacctcaaataagacttgattcaacctcaaataaggtacactccttatattgacttgctgatattttaaaaagattagaaattaaggacaaattttatagatacttattattatttatttggaactgaataatttgccttcaatctgtataatcatttgtaacgtcaacgtcccgcttagacagctttcataggtcatccttcaatcaacgtcccgcttatatttgatagttttcataggtcataggctgcccttacaggccaccacatgtcttttctgcacactttgtcctcagaaagaattttccagtcggtcacccatctcgaaattgctccaagccaagcacgcttaaccctgaagttctttgaagatcggcttgcagaaaaaaagttgtaacttgttgatataagtattctagtaatcctataagccctgggccgggatgtcacaatcctcgtccccttaaaacaccgacgtcctcgttggtcaaccccaggccaggaacgtcccctcttggccacgtctgtgtgtagtgccagcgcatgtgccatgctgtgtgatcactcccggtccacaccagccatgcgccccatgcctgcacaactgcgacacacgcgcccgtgaaaccgcgagagtcggacgtcccgcttctcccaggccggacccgcttacatctgatagcttttataggtcataggttgcccttacacaggccaacacatcccgcttacatctgatagctttcataggtcataggctgcccttacaggccaacacatgtcttttctgcacactttgtcctcactcgtgcacacccttacatctgatagctttcataggtcataggctgcccttacaggccaacccatgttttttctgcacactttgtcctcactcgtgcgcacctaggaaaaatttcccagtctgtcacccatctcaaaattgcttaaggccaagcacgcttaaccctgaagttctttggagatcgacttccggaaaaaaaaagttgtaactttattgacatgagtgatgtcacatcattgccggatagattagggttgtagctattgagaacggtcgtgtccagctaatcatggagcaatgtgttggaaatggacacaacaagtgtcaatccaatgtcacgcacgcgggagagcgacctaaacaggcccaacgcgtcgactaaaatcacgagagatgaccagaaatcagaggacaaaaacacaatatttttttaaaacagaatcaatatttttcaaatagaattagattgagatacagacaacctaccaccagtgaaaatatcttacataattataatagtagaaatattctgaggttgaggatggccttttttttctttccaatttcattggtctactgatcaaccaaaatgtttttcttttcttcattggtaagatcttacaattttgaggttgatttttttttgtttcgtcttcatcggtctgctgatcaaccaaaatgttactgggatatatcacatcctcttaaattccttatattctagaacagagggaatactttgtaaagcaaatttttgactctccgttgctgtgttttggttcaatagttgccgtatgccatagtttattttatcataccctatcctgctatcgatgatgcacagtgaagttcaacttctatgctcaaagtccaaaggaagaccagaaaaatgaaatgtcgaaaatagcttgtcctctcttcaatagcttgtctggtggtcgatacggataggttgtatccatattggcacccataaatatgtgatagcacctttcagggagtcagggaggaactcgaaacttctggtacgtaaaaaagttccttctagtatcgtaaaaaagttgaagtaaacaatcataaaataattatgtactcttccaatatccctacaggccgtttagccgtttagttggagggagctttcaggagagattgagagattagagagataaagctattcactgttttgtttagctgagagacatgaaaaatttggtggaatgagaataagaaattgagaaaggaactccatcctttttaatatgtaggtaggagtggtaattgggagagaatttctcctttactttgtctaagcaaatttcaaccattcaattttattaataacctaatctccaattaaactccctatcaatttccaccacctctatcattaaaaattaaattctcatcttaatctcaccatcaatctcctctctcctcgtgtaaacttccaatccccttcctttgtgttgcccaacaagccatatctaaccagcttgcagcataaatgagaaacaaagtcggtttccagaaacaaggcctaaggaaccacagaacgaataacgaatagtgccctattcagcccttttttttttacacttggcctctcagccgcataatatgaggtatcagcggtagggtgattgtttctcaaaaaaaggaaaaagaaaaaggaaaaaaaagcggtgggggtgattgcgagaaaccgcataatatgttttaggactttggacagtacatgttggcaacttggtggtatacatgaacattttgcccacgaataatgctaagtcaggcacacctcatgctagcagaggttaaaatacctcacaaaaactcaagatgcattacaccctactgaacatgacagcgtaggcctccactgtctccaattagcctgaaggaatgtcatcttggactgctcaaagagagtatgaaggtgtcatatggtttccattctaataacgttgaaaaggaacaaaaccgatagaaagaaactcactgctaagaataaatccctgaagcaggctctgagctttgtcagcctgctcaggagtaccagatattcgaacaactttttctatggcgtcaggcctttcgtcagcaagtgtgacagtggcaccagacatctgcgaccaacaaacagttttagagggttaataataggtagagttgtttgccctttgttctacaagaaaaattagaatatacagaacctcgcttatttgagcaagcttgcttccagctctcatagtaaggcttgcaacagcactctttggtatgacaacttctaatgtgcttcttgtcactagaggaacagcaaatctggtggaaaaagaaattaaggtgatcatgtgaaaaccaaacagaacaagatggcaaagacaaaaacataccgttttgcagcactttgcctcatatcatcattaatgttgctcccttgctcaaacgacatatttgcaccacctccactatcctgaaattcaaaatgacaaattttaagtccaaagactccaaaacaatggctaactttagataacctagaagaagaacattattatgcattaaagttcaaatacttaacatcctacattacaaacttttcacatctatgcaaatcccttgtcactgccaagtttcaccatgctcattatgaaagaaagggaaaccatgcaaatcccttgtcactgccaagtttcaccatgcccattatgaaagaaagggaaaccatgcccattatgaatgaaaggaaaattgaggccaaaattggatgggccaaaaggacaagagaggtcagtggtaaaaaatagagaaaattccatacatagtacaaatatatatatatatatatatatatatatatatatatatatatatatatatatatatatatctgtgtgtgtgtgtgcgcgtgcgcttttctgcaaggactaacaaagacattgaagtactaaagaataccttccatgaagctggaacatgctgtgcttgttggtaggatggcattggaatatcacttccctggtatggtcctctaggtgaaccttttgctggagaaatggagccatgaacagtaatattgccaagttggttaggaccaggaatctcgcggtagaagtaactccgtaattttgcagttatttgcacaagagcatcccgtgcagctctaatctctcctacaatctgcaagaacaataatttgttcaaccacacaatatggcaaacatagtaaaaaaatcattcatgtgtcaaaccaagaatataacagtaaaaagaagataacatgcctactaggagcactttggcttgaacacaaattcgagttagaagataggtcaacccaggcttggctcaataagcaaaagaaacaagcgtattgtaaattgtaaatatatggattatggtcatctataggggtgggtgtttggtttcattggttcattcggttcggctttttcggtttccgagaatcacggttttgagatatgccaacagaagtgcatgtcaacaaaaattaaaaccggcccgaagtaaccggattaattcagttcggtgtgtcggcttcaccgaacaaaccgtaaacacatctaacgcacggaagcagtagaccaggtggcagcggcggcatggcgtaatccaccatctacgtggagataaaccagtcaattactggtgtataaattaggcctagttgctatgggcctcgttggatggaggaacgtgggccttgaggtgctaggtggtaccggtggcatggcgtgatccaccacctacgtagaggtaaaccagtcaattactggtgtataaattaggcctagttgctatgggcctcgttggatggaggaacgtgggccttgaggtgctaggtggcaccagtggcatggcgtgatccaccatctatgtagaggtaaaccagtcaattactggtgtataaattaggcctagttgctatgggcctcgttggatggaggaacgtgggccttgaggtgctgccacactgggctgggatcatgggaggtagtttggttgatcggcttcttcggttggcaaggatggaaaaccgcaaaaaagaccaaaagctgaacaagaaccaaacaaaaaccaaaggacaatccgatgactgaaaaaaccgatgatttggttcggttcggctcggttttgttcggtctcggcccacccctagtcatctaggtatttaacacatggatctccactatctagtcaatcctcaagataacaaaaatgaagttcttctgggaaagaagacagacctgtataagctcatcagactctagagcacaagatggaagagcttgccttggtaatatctgtacatttgcactggtctgtctctgtatatcagataatgatccatcccttccctcgaagcaagcaatttcacttgaagggacaagtaaccttgttgtaataatgttgtctttatcaggaccaaggtctacaatatgagtttggaggtgcagcaatgcttcctgagctggaaaaagctcatggtctgggccctataacaatcgtaaggaccattttaagaataaaatattgaaacatgtcagtgaagggaggggtactgaacccaaattccagctataacaatgatggttgatacaaatagcagaaaataccaacagaaagaacaacataatatttcaaataaaatccatcataattgaggccaaactaatgttacacgcaagcagacactgctgtaagcatttttggaacaaagagctcctcagatctgaatagcttactgtataggactataggtgtggataatccaacaagctaaaatcatcttgtttcattcacatcagtaagacaacctacttaactactacaatgactagttaaaaaatagttgactttcatcaagcaatacttcaaacattgcctggactgtgtaaatctagctagcaatctagtaacactactttagattagtgaagcaatgagtagatcagtagaatttctcacagaaaaaggacccgtctgataaatataacttcatatgcaactgagattggaaaaaaactacaaaacagtgtgcgtcactcatagcatcgtctgttgaagctgcaaatgtaactttgaaaaaacccacagaactgtaacccaacccttcctataacgtacaagtttttacataacttaaacagccatgtcagtaatagtatggagagtggtgaactaaaagacataagtgagtgtgtattacctctcttgatgtgatgattatgatcctttcgtcagagccatcaagagaatcagtaagcctaatatcaacaccaacatcttcctgtaacatctctaacaatccatcacgtgttccgactaaactgttaaccttgtcacttgggcaaagaattcgaaatatgatgtcatcgaacagaatttctgtgtgatcattgatcttgccaccatttgaatcaaactcataccctggcagctccatgctagtattatttctaatttgatcaggtcgaccataaggttcttcatatgcaggcatctgctgtgcaccaccatagtattcatcctcttgaggaaatcgatgctctggtgaattcatccgtccacggaaggggccacggtcacggtgtaagctttcctttaggcgatcggagattatcgctacagcctttttaacacaattcccctctccaacaacctgtaacatcatatcatgataataatacacagtagggtgagaagtgccacaagtaaaaagaagtctaataaagagtgtcatttatctttctatgcatccaaatcacaattacaacatgtgctaagagacagatttatcatgttgaacctagatcatttcagatcataattgaatgaatttacaaatcaatgtcagaacagttttcactaagcaaacagaaggctaaagttttcacttttaaggttaaagttgacaagagagatagtttaagccactgttgctagaagacaaatctggaacagtgtctttcatataatatttgaaatatagtctcaaataataagttgttccataagtgagctgagtaaatctatatgtccaactatattattattttatttcatttaatacaagagctcagcattaagcaaacatcatatgaataaatccccataaactgtgcaaagagtaatttcacaaactggtattaaagcctaacgaaaacaggttatttttaaattaaatgtgtgtgtaaacaaagttgaaattaaatactgactaggaacaagggtagagcagatttcttactgttgaaagcattaaatcagtttccactgtgttgcttgtaaccaactacacggtgatgactacagttcaagaattaatatattgtgatattaaatcagttataatgccaaactcaatgtctcaaaagaagctaaagatatgaatactagagaggttaatgctaagcaacattataaagttaacagcgagaaacatccagaactagtgcacaggtactagcagttattgaacaggaaacatcatgggaacagagtcatcagtcaacataattgtgagagatagtaggaaaagtcctagagtactggaacttggagcatttcctaaaattttcagatatatttggaaaaaaaaatcagttctacggaactgagggattaccatttttgctatatatatagctgaatttgttttcaccctaatagtatcacgtattttctaccacgtgttcagtaaagcaatgttgctatttgacattagttctccgccatcacaagtcacaagctgttcccgatcctgtaccctcataggctatcggcactgtccaaatcgaaacaagttgctgctcaatttcacccctcccatccaagctatgaattctctcttactgcagaaaccatggcaacagacccaatagtatgcacagagtcattcccaaatattgtcaatggggcgaagaagggatggggtatgccccggtttacgtgtatggcagcagcaccacggttgggtcgacaccatcaccccatgacaccaacaccccacacactcaagcagtgtcagatccctttcctaagcattccattacttcactagccccataaggccacaactgatcattccttctgaatttgttcccgcatgctgattttcttgagctaggaggcagcgctctccagcgacatgctcatccaaaaagatgcggtcacccaaaagctggccattgtgtcagcgccaccatccattcatccacaaatctctgccgtaagtgagcagcatatgggattaaacgatgagtggtgtgcctcagctgcagctgccgctgaccactgttaagcggtgtatggagccaacagagttcaatggtgatgaggacaagtgaatgaagagctgagcatgatttgaggggtgattcagggatttctagagaagtatttgtcccaaaaagtcttttaaaaaagccaaagcgcttgatggacatactaacatagactgcataaaaacttacggtatttttaggtggtattaaagtgcaccaagaaaggtaggtattaatgcaggtatcttgcagtgctgtggaaacattttttttttcaatatattcatgaagatttttgtcttgtcctgcttttagatttgttgtttgatttgtgtctgttctttaaaccttttttttgtcgttttcatctgggagtgttcaggtttgatcatcgtacactacacattttagtgaatcaaatttggccaataaaccaaaccgaactaaactaaacatcactctaactagaaattttattaggaaatattcttctctacagcagttcatcaatcaaatgttcgattctagcatattctaagtatcaagaacacatctaagtcttgtccaacacgtagcataatctgtttagcattttgctttccttttatccgtacattaatatataactatgcaactaaattatacacataactccaagttaatgtaccattgtctaaagtaaaaattgaaatttttttaccagattatagtaagcagcctcttacctgtacaacctcctccgacaacgatacacaccgcggcgtgtgctggtcgcgtggcaggatcctgatgtgcgttttggtctcggccctcatctgctcaatgatcttgccacccttaccaaggaggcacccaacatggaggcgcggcacgatgaggcgcgtggtcaccttgcctcggtccctggcatccttggccctgggcccatactcgccatcctcatcgccgtcgtctggttccgtctccaggatccgccggtgcaccatgaggagcgcctcctgcgccggcgagaacgagggcggccgcccatccgcctcgcggcgcgcgccgtcggacgtctcgatgacgcggaccgcgtcgccagggtagggcaggtggatggtgacgaccgcgttggtgtcgtcccgcaccttggcgatgaagctgggcgggaagccgtagaccttggactgcgggcacaggatgcggaaggaggtggtcatgccgggccccccgccccccgccgccgcggaggaaggcggcgggggtgggggcgggggcggggcggcgtcgggtggcagctggaagccgccacggcggtcgccgccgccgccaccgggggggccgcggcggtggtagctgttgttagggttggggccgccgcggcggtcgaagcgtggcttggagcggggcggcggcgagtcctggtcgtagtggtagccgcgcttggaggagcgcgggcgatccattgccggattcgagggctccccaccctcgtcctcgaattcgttcgattttggtttgattgctcggttcggattagggtttagagcgacaagggggagggcgccatggatcggagagtgaggaggtgagcgtgtgtgctcactgctctaggtaggccaccaacaccttctcagactcaaaaagtgtgcggtacgtgtcaaaggagggatttgtagcagcccaattttgttctctcagattcatctcatttgtgttgatttttgtatgtgcagtagattattattataatagggtttataataataagtcataatttataaactattttacgtgtgtcttacgctataggtttaaccaaacattattacatttatggtaattaattgttagccacgtcttttataaaattggtagtgataaggttagtcgtcatcaattaagttatctttacttactagggtggtgtttggttagatcaaggtaacgctaatgttaatgggagtggttccgtccgtaatcgataccattgtaacagataagtactttgtttggtttgttgcggtaacacatccggagtcactcacgctgtttggatgcgcggctgcacgctagccgctaggtaatagattcagtgagctgctagttgaagctgagacggacacaagaagcaaatacaaagcaaatgcatgcaacgagcagagttttgacagatagttcataatatgcaaaacaccgtcacctcatgtttggatacaaattttgacagtgagaactcgagacaaaaagacatattctgcagaatttaatcagtgatatacttttaagagtaaagtccatcaccggtccctaaacttgtaccgctgtgtcatcctggtccctaaactcgcaaatcgaccgttcaggtcctcaaacttgtttaactatatcatcccggcctctaaacttgcagatcacttgtttaggtcctccaacttgtttacttgtgtcaccccggtccctaaacaagacagtctaaaaactttatatcaaaaaataatttataactttttcatgtgaattctaatgaagacaaactttatatcaaaattgtagccttcgacgcgacttacaactttgtagttgaaaagtttttgaattaaaactgtttaggtcccaaaatattgttgcatgtttatatattttgaaattttaattttaaaattacattttgggacaaaaaatgacttaaaataaaaaaaactcaactacaaagttgtagatcgcgtcgagggctacaagtttgatataaagtttgtctttattagagttcacatgaaaaatttatgaattatttttaaatataaagtctctagactgtcttatttgacccagatgatattcaaatctaagtttagggaccggggtgacacaactgaataagctggaggatctaaacgagtgatgtgcaagtttagggaccggggtgacacagttgaacaagtttgaggacctgaacggtcgatttgcgagtttagggaccgggatgacacaacggtacaagtttagggaccggtgatggactttactctactttcaaaatttaatcaacaaaggagtggatgaaaagttgatccatgctggaagtgataacttcagaagttcaatgaaccaaacaacaagaggatacattgtgatctgtctaaataaagtactgaggaaatatatggatgaaactaccagattaaacaataagctaggggcaatacttctatctgaaaacaggacagtactttgatcacagaatatgtagactgtcatggttcaagcaaataaagctgaagcactgaaactaaacatccttaggacataggtagtctctaatccccaaggcatacgcttatatggaattctaataattaaagaacagataatgaacatcttgtatatcctgcttgacagccagcacatcagtacatcaatttttctttgcctcatctgataacaaaaaatttcagaaattagtgaaagaaacattaggtgaaagaatatatatagtgctcagcatcataccaaattaagaatattcttgctcatacaagccatatatgatattcagaaataggtagcattttttaactttaggagtacaaaaactccctgttaggtgtatgcaagtaagcaagaccaagcacatactccagttagaagtgaatatgatattactatagcattgagatggacagctgggcccattgatgcattatactagtgcaaggcaaataatatgaatgcatatatgaaatgctaagtggtaaagagcaatatgcttacaattaatgatctcaaaataaatatgttgcctgttgcagttgcaacgctacaagagtgatcaagtgaattaccagcaagtatttttagcacgtactccctcctgagagactctgaaagagcgacaagcatactcatttgagccggcacttttacaaaagcagctgcaacattgacaacttcaataccagtcaatccaagcttttgacactcaagaatagcttcgttgtgaaatttttgtagttggtcctcctcagccattgcttctccgcgttttggtacttaagggaaggcgagccatagcactctacaaatacataaaacaaaagcattaaccctatgtccagaatatatcctgctagcatgcataatacatcaagctaccattcaaacaaaagacagtacaaatttatttttgttgctaaacataagtaattcaccagaacacaatatcaagcatccattcaaggagcatatttacatgtatgtgctgttttactagaacatatttaactactggaatatattctgtcaaacaggcaatacgcaaaacttttttccccaatctgatattgtgcaaaataatatatcacctggcagtaataaaaatcaaaattctcaaaatctagatagtaaaatgagttggtccaacttccctacactcaaaaaaaaaagaaccatgtactgatgttcaactttcatgcaatcgaggcaaatagattctacataacccatgtgaggcaaacagatatgaggcaggaacacatgtgatttacttgtataaactactacatgattttttagaagactattacaagatcatcactcaccagcatcacaagtatatcaccataaaataaggtggtttcagtagggggagggttctcactggcgaggtgatcgttcgacagcggcaacgacgaaagacgaatgtagttgatggcagcagaatctccgactagcctcctgctgcacgtccttgcccttcccgtcaagatccattttccatggagttcttcccgtcaagatccaatcgccaagaaggtggaactccggggaggtggcaacgcacgttggacggggcaggagggactctggaggcggaactcctggatgtggggagcaccgacgcgccggcttggccaagcggtggtggaggagcgcacgagacgggggagcagtggagcgtgcagtgggagggggcggcgctggcgacgggcgcggggcgagggggcgacgtcggcaacagacgcggggtgttggggcggcgccggcgacgcgtgcgctgcgagggagtagtggcggtggcgctcgatttggcggtgctaggtcacgctctcctctccatatcggtatcacattccgcccgtctaggagcgtaatcagatttgtattgggccggaattcgtttacgggctatccgattacggtccatctgaaacaaacgagtgtaacgagatctattcacggtgggaactgatacgggccaaaaacgacccaaccaaacagctcctaggtacttgtgtaaataccgaagattttgtcgctccttcaattttcatttatgtgttttttttgttttgatttaattttatgcaagtcttttacatggtcctctatttgattagaaatatttgacatttatgatcatcaatgttatatttaaaagtttataaaatctattaggttcaaaatactatgatagtactttcgaggaaaaatctaaagtacttttttttaaaaaactaagcattatagaaattatttacagtcggagttttcaaaaatttaatcaaattttatcataaacgtcaaattttatgatcaaagagaaaatcaagcaagtagcaggcattcaatagagcaaagcttacaaacaaaaggatattttttgtacatccttttgatttcaaactacagatggtagtggtgctgcacggaataggcttattattcactaaatatattgcctatttttccaacctcgcatagggtaattcatagcaaatcgtaatagtaagttgcactaggttatcttaattttatataagttccataaagggagtaaataggctattggtgatgggcattccattagcacatatttcttgggaaataaaagtacttgcgggtgaaaaaatcagttaaaaaaatgcatgtcagtcgtgataaaaagatcttttgtgtgattgatggaaagcacaaattgctaaggagtaggatactatgcgcaatgatgctacactattaaagtcggtagccaagggtctcttattccactataagtggcattgttccattagaattctagctaaaaaatctatatagtttaacgctagtcaataataaaggggagttggggatttgtcccatcaccttatttctcattatttatttatttttatatttatctttttcttaacaaatttactgttgtgtgtcttatgacagaaaccggagatgtaatccatttccattatctaaaaaaacaccaaatatatgtatatgtgaactagcaaaaaaaacatgtttaatataacacagagagaggaatcgcaacctatttttattaattttataacttaagttagtaggcatgttgaatttggttggttggttgcatatcgacatgatgatattgatgactagtgcatcaataatatagtaggtgatgaataaaggtggtaaaaaaaacatctaccgacttattcttataggtacgtgcaacacgcaagtagatatcgctggatatttgatgatgatataatattttgtatgtgctattctataaggacgagaaagactggtttggctcgagtagagttggatattaattcatttagccaattcatatattaacattaacagatttcaaggctctaaatgggttaaacaatgtctaacaattaaaagcttaggttaattagctacaactagcaagttgaacaattattgtttggttgtggctatgtataacttttccaatttagctcttaggatcaatttgtttgtgctatttggaatctactactttgtttactgtgatttgtgaacatgcctcctgatatgctaaacaacgcttttcttaaaaaaatatatatcaaaatttatttgaaaatcaaattaatgtattttaaaattgataataattaatacttaattaatcatgtattaattactggccgtgttttctatgtcacagttttgtttagccggacatcttagatcgaaccagaccttagtcttagctttgccacctagttccctaggttagttggttaagcggtcgctcctgactacgtctcggggtaaactacttctcaaccttacctccattcaaaagtcctaaaatatagtagtactcccttccctccgtttcatattataagactttctagcattacccatattcatatagatgttgtctagattcattaacatctatatgaatatgggtaatgctagaaagtcttataatatgaaatggagtctagattcattaatatctatattaatgtgggcaatgctagaaagtcttataatatgaaacggaggaagtaacttttaactctaaatctggatttgcacttgttcagattcataactaaaaatgttatattcttggatggaggtagtgctagagaagccaaaccaacaatttcggtttagattgaatgctttaaaccatgactcagaccaattacaaacgatttaggccctttttagtttaggggtgaaatttttggcgtattacatcggatatacggacacacatttgaattattaaacatagtctaataacaaaacaaatcatagattctacatgtaaactgcgagatgaaattattaaacctaattaatccgtcattagcaaatgtttactgtagcaccacattatcaaatcatgacgtagttaggcttaaaaaatttgtctcgcaatttacacgcaatttgtgtaattagttttttttgtctatatttaatactccatacatgcgtccaaatattcgatatgacatggtgaaatatttttgcgtgggaactaaacatgaccttacttccttgttccaaaacaacaaaagctataatgggttggagatacgaagtatcacgctataacaattttgaataaggatatgtcacatctagattgagttattttagtatagatggagtaattgctaatatcatgagatattattgaccgtgatgaatgttgaggataagaacaattcttccgatcaataatatttgatgttgagtaatattaaaatagtgataagtagaccaaatattcttaaggctcatttgaattgcaaaaatgaaaaaacggaggaataggaaaaacatatgattctaacatgaatgaaagtgtaaaacagagaattgtaaaataacgggaaaaacacaggaataaccgtttgattggaccatagaaaaaatacaggaaccagatgagagagatagattcgaaggaaattttccaagaggtttaagctctcgctaagttttctatgaaatctctgtaggattgtctatcccataggaattttaaagaattgaatataattcaatcatttgatttaaagacatttataaattttttttctataagattaaaattctctataatttttatgtttttctccaaatcaaaagaaggatattgctttgcctttcatagaatggaaaagtggaatcctgactagtggagtcgacagttgcgctgctgctgctgccgccgccgcctgctggccgatccgaagagcattaaaaaatacagcgggcggagatgctggtttctccctcctccgtgcgtgccctcgccttcctccatcgccgcttccctccccctccc

SEQ ID NO: 5522 - DNA, 27258 bp, Oryza sativa
aagacccctaagggcatggccaacgcagggtaccctaagtgctacctaggatgggccaacactcccaaaaagctaatttcccacagtgcaagggtctattcggctactttgtaccgctgctgcactgccacaaccggagaaacaatatacagtgcttgttggctgaaccacagtgaaaataatggcagccgaacagagcccaagttgcttcaggtggtagtctcatttttttttatttcagcccctggtgtttttcattttagccctcacaattttacaatttatatagaagttcaaattttacactaaacaccccaaaatccagaaattaatataaaatctctcctcctccctcttctccccaccgacaccccaatcccctccccacgcctctccagactccagctcgaactctcctcccgctgcctcttctctcctctcccctccccggtagcgtcggatcgacgcggcggcggttctctccagtccaccccttctccatcttcttccccggcgcggggcgatggcttgggtgaggcatctccccaacgcagttcctcgcccacaagctgacgaaactatgcggtcccgcccgagctggcgtgaatattcgccttgggacggatgagaccacactctagcgtggagcgttggctatggcctaataaataacttgcactgtatcgtttgaggagcttggtctaggtggcatccgaagcgcggcaaatgcggtggccgcactgaaatcgcccttagagcaaggataatagtagagccaacttcctactaatacatcttaaagcctacatgtataatcagtgttctaaaaatcggccctaggcgccgcctaggcgcccattaggcgctaggcgccgggtagccgccgcgattaggcattcaatggtgcattaggcggttaaattacttaggtagtgttttattgctattttagtgttatatagtctaatttctatgcaatatgcctactaatttcttgaatttaactatttgacccgacctaagcgcccgctaggcgccgcctaggcgaggctaggcgccaattaggcgctaggcgccccctatccgcccaactagcgcctagcgccttcttgaaccatgtgtataatagagattagctataaggttggctacaattttcttctcctctctctatctctcacttatatcgattatcctacgcctcggtcgcctggggaggggaggggaaaaatcggtcgctccctcccccccacgacatgcgcgcacgtgcaccctagccccacgatgtgtcccagtctacctgctacgtgtccctaccacatactccgttgcaacaaatcacacacatattttggaaaccctctattaagggatttcgtttcattttttgttccaccaaaaatgtttcacctagtgtactcacaatgtttcactatgtatagatgaaatgttgcagtgaactgaagcattcttttgcaacaaatcagccacatattttagaaaccctctattaagggatttcgtttcatttctgttccaccaaaaatgattcacctagtgtactcacaatgtttcactatgtatagatctaatattgcagtgagctgaaacattctttcgctatttgctaaaacattgtttttatataaggtgaaacaatgcccgatttaaacgattgaaatattttcgatctacttagtgaaacaattccgatatacttggtggaacatcgtgcaacatttaaaaataattcaataataagctaaatttttttcgtcagaatatatccatgtgtggtcttgttttaaagatttaattgcaacgaatttaatggtgtaattaaatcatgatttagataaataatttaagagaaaaaaatagtttaaagtggttttgcacgaatgcgtcatgctgacgttagcgcctgatttttcctcttccccagcgaacgctcgattctaagttggctcccacttatctatactaatataaaaaagtacgagttcatcaaacacccatcttttctgacccttagatcgattcatctaacagcttatatcaagatctgcccctcaattagcgattcccatgtcgtaaaccagcggttagcgaaaataaaaagaaaagaatccactaacgccgaaaaagaaaaaaaaaaaaagaaaagctatcctcctgcgcggagccgcctgccgccgccttttacgcgcccaccgctcgcctactgcgcgcccgccggcgccactccgctcgcgcgcggctgcactcaccgccgcctcctcccgcctgagccgatgcgcccaccgccgccgcctcctgcccaaaccgcctgcttccctgctcgcgccgcgacggagaggaaggagagtttgtgctgctggttctccattcaaggtggcttgggtgtgcgttctgatcgatttggcgttctgatcgatttggtgtgacgtgtttgtttcagcagggaaggactgcaaggagcaccccaacgtcaagcaggtatcttggtgacgtgtttgtgttcctctgctgcgttgcctgctacaatgtgtgttctgatttggttgatttggtggtgacaagttcaagtccatgcctgatgctgtgagttcctcacttcctgtgcccatgttccaaaccgttacatatgcatttctcacttgatgtcctattgtttgaaacttgctgccttttagaacctccttagttgtctcaatgcttttacttttattactgccatgttaatgatcttgtggctgagtccttctgttttcatggagtgcattgcattaaaaaagatcccgtagatttttcttcatttgttaattatattgccaaaacgtgccttgcacgcgcacgataacatagtcagcttagtagaaagactgcatttttttcaatatttgcaatctggtttattttgagacatggtttgggcttgattattatctcattcttttgctgtactgaaattggttttggatttaattgtggactatgtctgtgtcactacaacatcaggtattggttataattcagctagaggaaagtagagtactttgaagtgtttgaatggttttcacatgtatactctgctagctaccctttagtaagtatattcatgtaaaggggagtaatagatcattgcactaatgttcaaactctattgagattgtcccaggtgtcactttgttcactgaaaaaaaaagagaacatttataggttttttttgctgcttgggagaggatgctgccgaattgaattaagacagccttcagaatctggtatatctaatggtctgtaaaattttacacaagcaacaggagggaccatcaaggtgagtgattatcttatccattcactggcagcgtacattgtcttatatgatgagaatagagttgaaatgtatttgagttcttatttcagtgcttcgtggtcgtcatttgctatgtaaacaattactaaactaataaaacacttaaatgttgcctgtcaattagatttttttaatatgtattaagattagtacgcagcccacacttttgctttctgtggtaggccaagtccatatccttattaggattaggaggaaaactgatgctccatgtgcccaaaatgtgtgtgaactgtacaagttagataataatagatggttggttagctagatccaaaacttgagctttactatggcttggtgccctgttatacaagacgtatatggataatgttttcagtattctgctttgtttgctatcagtatttttagtgcagaaatgcctcaagccactgtataatttgtatatatagtgcaacttggcagttaacaatttcctctttcatgtgattaattttcctgttacaaatttgcttccatatattcgtatccagaatttacttagcctaaagatatcagaaggagaacatatttatggagtgccgatataaatcggtaacccaacattcatgagcaagtaattatcgtgttataaattttatgccacattccagagttttataaccttaaattttatcttattacacacaccggaatcagttttatgagtcacaattcatgccaattgattaggtagattttaagaattaaggatttaaaaaataatgctttaagatgatagaaagagaacatatgctaggtaacccagcattgatataaactgacaacatgctgctgctgagaatatgtgtaacaatgccaaaatctcacatcatattatgtgtaacagggaatgtttcacatgtgatggattttgtatagaaaaaggagattcattgtttgctgaaggtgtattgaaagttgcttgccgataaataaagaccccatggatagatgcaatgatgcattaagctcttgaaggaggattaacggaaaactatgtcgagtttttagtagccttgtttgggctaacgacactcggtttattgttctagatctctgacctaagaatcctgttttagttttttttagatctcttgctttgggtgttgtttgctctaggtgttctgttgtccgcagtttcaggtgctttgtagtgtagtttagtttgggggtgttctcaaggtgttgtacagtgaattggtttcggtgcttgccctttgttgcgttggtgttgtttatgttctctatatcgatgaaagatgttaaagcttttgcctttgtttcgaaaaagattgaaaccacatacaaataaatggttgtgtgaaatgtaacattcatggatgcaaaatttaccactaagttatcaaatccagaatcatggcatgtactaaaatgattaatattatttataaaatcataaaaatgcttcacctgtaagatggcatgttaaaattaacaattgtagataatacagagtatgttttgtacaatttatattggtatatacgtgcattacatgtgcaagattactagtacatttaatatatttatttaatgtatttgtattagcttgcaatagcctcaggcctcagcccttagtaaccgactcgaacccaaaccgactatcgttccttccggctgacttaacaggaaaaggtgcaagagaacttctattggccgttcgacacgcgaaaaccaacccaatggtggcggccaaggtgtcgacccctgccggcggcgcggtgcgcgacgggctccggcggctcacgcagctctcgctcgtctccaaggtctgctcggagctggaggcgcacctcggcgtcggcgaccgcgtcctcgcggagttcatcgtcgacctgggccgcgcatccccttccgtcgcagacttcgacgccaagctcaaggcccacggcgctgacctgccggactacctcgcgcgcaccctccacaccgtcatccacgccatccctacccacgccgacgacgcccccgcccccgccccccaaaaccctgcctcccgtggcaccggtgcaagggtttgcgggaaggacaaggcggaggagcgggtgagagatggggatccggggctgtaccaggtgtgccgcgggaaggtcaccggcctggcggacgccgggtgcttcgtccgcctcgacgacgcgcgcggccgcgaggggctcgtccatgtctccgagatgcccggccgccgaatcgccgtgaagcgtgggcaggaggtgttcgtcaagatcgtgtccgtgcaggggcgcaatctggggctgtcgatgcgggacgtcgaccaggacacggggaaggacctcctaccgttgcagcgtgctaggggggaggatgatgtgccgaggccgatggcgaatccgtggaccgatcgagccgccgccactaggagaaggacgggggtgtcaggaattgtgatccccgaggacaaccagactggcacggcatcgtcgcggcggccgattaggcggatgagctcgccggagaggtgggaaatgaagcagctgattgcttcaggggttctgaatgcgaaggattacccggcgttcgatgatgaggatagcgaggggatgaattaccaggaggaaggtgtggaggaggagcttgagattgagcttaatgaagatgagccagcattcttgcggggacagggtcggtccacaattgatgtgtccccagtgaggatttccacgaaccctgatgggtcgctgagtcgagcggcggttctgcagagtgcgcttatcaaggagtggcgtgatatcaggaacgaggatcaaagagcattggttgactccatcccaaaggatctgaatcggccatgggaggatcctgtgcctgaggtcggtgggcggtatctcgcacaagagctacgcggtgttggattatctgctgaaagcatgccagagtggaagaaagaggcttatgggaagactgtaacatttggtcagacttcaaggctttcaatcctggaacagaggcagagtcttccaatattcaggctgaagaatgagcttatcgaagctgttcgtgacaatcaagttctggttgttattggtgagaccggttcagggaaaacaacccaggttacacagtaccttgctgaggcaggctatattacgagggggaaaattgcatgtactcagcctcgcagggtcgctgcagagtcagttgccaagcgagtatcggaagagtttggttgccgattgggagaggaagttggttactcaatacgttttgatgatcacactggaccagatactgtcattaagtacatgacggatggcatgctccttcgtgaaattttgttggacactgacctctctagttactccgtggtcatgcttgatgaggcacatgagaggactatatatacagacattctctttgccttactcaagaagctaattaggcgtagaactgatctcaagttaatagtcacttccgccactcttgatgcagagaagttctctggatatttcttcgattgtaatatttttacaattcccggaagaacatatcctgtggagatactctattcaaaacagccagagagtgattacatgcatgctgcgctgctcacagtatcacagatccatctgactgaacctgaaggtgatatcctcttgttcttaactggccaggaagagattgatcatgcctgtcagtgtctctatgagaggatgaagtctctaggtaggaatgtaccagaattgctgatatatgcagtgtacagtgctcagccagctgaaatgcagtcaaagatctttgaacctactcctcctgggaagaggaaagtggtcgtggccactaacatagcggaagcatctattacaatagatgggatatattatgtaattgacccaggatttgcaaaactcaatgtgtataacccaaaacaagggctggattcactgatcatcacaccgatatctcaagcatcagctaaacagagggcagggcgtgctggacgtacaggcccaggaaagtgttatcgtctatacactgaaagtgcctatcgcaacgaaatgccccccacaactactccagaaattcagaggatcaacttgggggagacggtcctcaatatgaaggcaatgggaataaacgatctactgtcatttgacttcatggaccccccagctcctcaatcactcataactgcaatggaacaactgtacaaccttggtgccttagatgaggagggtctccttacaagagtagggagaaggatggcggagtttccacaagaaccaccactttcaaagatgctccttgctagtgtggacctcggatgcagtgatgaaatactgaccatcattgcgatgattcaaactgggaacatattctaccggccaagggaaaaacaagctcaagccgatcggaaaaggggcaactttttccaaccagaaggggatcacctcaccctgctcaccgtgtatcaggcgtggaaggcaaagcagttttcaggtccatggtgctatgagaattttgtccagctaacatccctgaggagagcacaggatgtcagaaaacagctccttgagattatggacaagtataagcttaacgttgtctctgcagggaatgatctcaccaaggtgaggaaagccatcactgctggcttcttcttccacgctgccaggaaggatccccagggaggatacaggaccattgctgatcatcagcaggtgtatatccaccctgccagcgctctcttccagcagcaaccagagtgggttatctatcatgaagtcgtcatgaccacaaaagagtacatgagggaggtgacagccattgacccaagatggcttgttgaactggcaccgaggttctacagatctgcagacccaacgaagatcagtaagcggaagcgccaagaaaggattgagcctctgtatgacagatacaacgagccaaactcatggcgcctcagcaagcgccgagggtaatttgtctgtatatagtttttacttccactatagctgctctttatgcaatgtaagctgagtacttgtatgtaagtgtaaatatactctgctgataagttccaatacatattgggatattaagcttgaccatcttgtttctcttttcatttaggaagcagatgctgaatgaggttgacaattttgactgtttctatattagttgatcctgaaacattactatctttcgcttatgtttcgtgaaacttgctctttatttcatctcgaaaatttacacattgaactgttctgttcggggttgtcgagcccagcaatcgttgaagccttttttcttcagcgtatatagtgatttcctatcaagcagggtttgtaattttgaaagtaggatttctaccgcaggtgggcgatagaactgaaattttggaaatttcagattttttttttcgtacgaaattttttgaaattttgactgattttgaatgtatctgaataaaatttgatcaaattcacaaaaaattacaaaaaaaccgaaagtttcggacaagatatgagcatttcggtgggggcgaaatttccgaaatttcgaaccgaaatttcaaaccctgctatcaagcgccgaaatttggctccgtagccagaaagggaataaatttttcacacaacgaaatgataggcggtattgattatggaggtcataaaaacagaacgatgaacttttatcgctgcagagcattataggaacttttatcgctgcagagcattataggataatttgtattcgatgttcttttcagcactacaaatccgcacaacctttgctgtttcagtctgttggtatcacagctgaaaacttaggcattctccagattaatttcctgccaaaagaaatgttttacaacctttgaatatgctgtttcagttttttgctaacatcacagctgaaaagatttctccatattaatttcccgccaaaaggaatgttttccatatttcagcagttgctagtgacctcaaaagagtgaaggaatacgctttaactatctaatcagctttcctattctgcaaaaaaatgaacccaggcttccaggcatgcaactatatgcagttcctattatgcctctgttttcgggttatagatcgtcccaggcgaagccgtcgtgccgtgagagcatcaagcaagacatccaatgaacactccacagcttcagcctgctttcccagctcaaaggcaccgagctcggaccgcatatccaattcccagaggaggccagaagctgctgctgcggtgcacgtacgatcccacgctggctgcggtctaatatgagagcaatgtcaacagaagtgagttgcaggcagccaaagaagaaaattgtttaaagcaataatgtaggaagaacttgtgtcacctcaccttagcttatgcatgactgaggcgctaagcgtagacagtgagatacaaggtatgtcttcctctccccatattgcagtccatctctcctgtataaaacgttaacattagggtttacttagctgaacaaactggatgtagttgtgttccgttttatctacttgttgcataagcattagagctttgaggaataaagagttcccaaatgctgagatgacaacaaattatcgctgtctaaagatattaggacaattggctgagacttaaatggaagtgaccgaaatcagagtcaagcatcagagtcaaaagaaacctgcctgataaaggtgctcatgttgtacaatcaagtagtccaccaatggacctgtttggggtggctactggctagtgcttcctcaatcctcagaagcttccttttggttgtctgcccttaggaacctttagaagccaagctagaaacccatccatttttggtctgagctagcttctttttgttcatttatagtgctcgcttgccttaaactttcttttgtagtaattcacttgatgtattaagtttggtgatgagttgatcgcacgagaatattgttttctttttgacaaaattaaaaagtgaaacatcaatggtgcagaatcactatcaaaacaacaatgaaatatcatttgatttcatctacaaattgcaaacacatctgcaaaagaaccattcatgttgagtggtttgatctgtgctcacagacccaataattcttcctttatttgataaagggatcatggccatttttttttctaccagcacaatttaccaaatcaatcaaaaaatctctgcaagtcatcgcataagaaaatatctacttctaataccacccatttgcatcagtttctggtttggagaaaatacagtttggaacccagccaaaaaggcccttgccattgaagacaattaaaatttctcctttggaaaaaagcaaattagatcattaatctcaatctttcttttgtggccaagatgatacaagcccaaacctgttctatactgtgaatgggatctggaatttgtcttgagatttcgagtaatggtgcagggtgctggactttgtgatcttatcaagaatacttttcaaatctaagtgggaaaaagtacgaattacccccctgaactatcgtgacagtacgaattatccccccgaaccacaaaaccggacattttacaccctaaactttctaaaccggataaattacccccctaatacaaactggagtggttttacatctatgtggcgtccacgtggcaatccgatcagaaaaaaataataaaaataattaatgggcccacgtgtcatctcttcacactgtctctatctctctcagatgctcaatacgaggcgagtggagtgcgtgtcctactcatccacgtaaccacatgctccaattccatctcaaggatcaagcaatcccggacgccgccgatggcctcgcgctcgcggtggtagtcgctggcggcgagcgcgctgatccagtgctttgcggggagctcctactgcttcgccgtctactcctcggcactcaaggcctcccaattctacggccagtccgccctcaacaaggtcgccttcttcaaggacgtcggcgccaacgccggcgccacctcgtctgggcagccggcggcggtggcggaccaggcagccataggtggaggcggcaggcagccggcagcggaggcggacagcggccacactccacctcgacgccgtcgacgccgttctgcgtcaccacggcgaggaagctcgtgtcctggtgcgcagggagccccagcctcccgccgacctccaccccactgccaggcgccacgtactccgacagccgaagcatgaacgccatcgccgctgcctgcgcctccccggcctccgccgacgttgcaccgccacctccagcgcctccaccgtcgcaccatccgccgcaccgcagcctccaccgctgtcagcttctccgtgtacgcgagcaccgcctcctccgggaacacggtggccggccacatccaggcggcgaaggcgcggacggcgtcgggggagagcgggtcagcgatggccaggctctcgtagggcaggccggggatgttgccgacgtagcccatgacgagctccacggagacgtgcgccgcggcgccgacgcggccctttctacgactcccgcaaccatctccccactgtcaggagccgcggcggcgagccgatgcgcgagtggtcgtgaggaggcagtcgcatgaacgggaccatgccggcgcctagtcggccttcgcctccgtcgtcggccgccattgcctacctgcggagccgcctgcctgagcgtgcacacgggagagagaggggtatgacaggtgggaccaaggaaggcatttttatttttatttgctgactggattgccacgtagacgccacgtgtgcaaactcaagtgaaaaccgctcaaaactgtgttgaggggggtaattcgtccggtattaaaagttgggggtgagtaatgtctggtttttgggttcaggggggtaattcgattgaccgcgatagttcagggggtaattcgtactttttccaatgataaaacagagttagcgaaaactcaagcaatgatatttcttaggaattactaattatcctaaaactttcaagaatattaatatgtattaggtatgtgatatactttgttatcattttattcaaatatgggtatactgtctacagattatctggatatattattccaatataggtatgttgtctaggcatttttaggataaaaattaagagtaattggttttttctaattgccaatgaggttttttattttcaaatatttcttatctttatattataatgtactcttactgataatacatgtaattggacttggctactagtatgcatcacattacaacacgtcgaggaaataacaaccttcacatttgcttgaataaaaagttagtcctctctaatcgtattgtaatcaatcatcaaaatcattaggggcctagatgcacttccaatctctccatttttgctgattgatgacaatacgattagatcacaagagagaatgaatataatagatgattttggtgcaaaggtttagtgaaagctccccctcaaagtgtgcattaaagcaagtgaagagctccccgtaaatctttgcatccacattgaatctcacaagacaacaaatatatcacattttactcatcacatacatcacttcatatgcataataaccattacatctcatcacaagcacaatataaaggaaatgagacattgcatcacattaatcataaagcataataatatccattacattccaaacatccataattaaacaataaggtcttacaataacattaaactaactcaagaaccacacatagtcttatacaaagaaaaaccaactatgatcgaccataataaaaggatagatattctccctttttggcatcgaagcaccaaaaagagaggacgaagagagaaactcagacaaacggcgcctgggaggatcctcaagaggaggatagcgaaagccatggccaaaattgaagaaatcgtaatccggaggcatcccagcaaaaggatcctcgatctcttcctacccatgctcatcgggctcggcctcaaagcccgaaggggagggagagacatccacgtgaaaatgctcattgagctgcgcctacatgttcttgacgcgccgagccgtcttcttgacctcgttccacgctctgcggttctttttggcctccgcagagcaaaggccaaagagactcagcaaaatgcggaataagggagactgctcacaacgagccacaagagagggacgctcacgaggtagtaggaggctgagaggatgtggaggggatgtcctgaggcacagaacaacgcttgggtaagcgcagggagagagatgtatgtggctcctcacatacaaactgaatctgagagacgtgctcaatcatccgcatcaggtgaggagcatatggaagccccctcctgtactgaagagatgccatgaccgcatcttgaggcggactctgactcccaaggatggtgatgcaaacaacatcaaccattactcccgctccgtactcctcaggttcaatcctccctgtcgtcccttttcatgtatttcaatttgtttgggaggaaatccgcatggcatctcttcagtacaggagggggcttccatatgctcctcacctgatgcggatgattgagcacgtctctcagattcagtttgtatgtgaggagccacatacatctctctccatgcgcgcagggccggtcctgagttttcagggccccagtgcgaaactaaatgttggggcccttaacatactactacaaaacaaacaattaagcgctaatgcccgcgacgccatgcgtcgagatgacctacatatgtttatgttttgatatcgagagattagacagcagtaattaaattaataattgggctacggagatggtgtattggtgtgctgattactaaccttccgaggggaaggcaggcgatggaggcttaggagatgccgagcagcagcgacgcagtagattgcgtcgtcgctgagcagctggcagcagcaaccagggagattgcgtcggtgccgagcagctggtgatggccatggagtgaattacgttggcaccggccgccggcgacacgcgatgcagttttgatttttggcttttcgccaattcgccatcgcccggtcgccgatcgctgagcgcgtgcgcgtgaagagtagaggaggggatgtgggcggcggctatcacgcgcgtttctgttttcttttcaccgcggggcgcttcgctttccggcttccgcgcatgcatgcgctcaagaaacaaacaccaggcgagcccggacgggagcgcgggtcggggacgtcgatcggggcccctgcaatctgggggcccagatcggcggcaccgctcgccccccgccagggccggccctgcatgcgcagctgcccactgctccgcccgctcacgagctgcctccctcgtcagctcatcatcggtgttgtcggaggcggagacagagctattggtgctactgtcgcgcaaagccttgagctctgccgccgccgcacgcgctgcatctgccgctgccgctgcttccacttctacccttgccgccgccaattccgccgccaccagccttgatgctctcgctaccatcgcagaagtctctgccgccgctcgctcgtgttcccctaccgcggcgagctcggcctcctgccggagccgcgcgctcgaggcgaccgagcgctgagactgtcctacggacatggcacgctactgggaggctgctacgtggggaagaggctgcctctgatgagctgctgcttgtcagcacaggggaaaagggatgagcaggaacagtcggtgttcctgctgccggctgaggacagaggggagctcaagaaggggatgagcaagagatgtctaggctacaggatagaatggctctgataccacttgttagtagcaaaatctttactctcattgagaggatggcgctaggagagttggggcaattttctgtttattttctcatgaatgccataccatctcgggggagggtgggatacatatttatagctggtagctggctggctgcagctagtctagagcatcctagagctagtctagatgctgtcctagaaagtgaaaaaggaagatgctgtcctagagcatctaaaacagaaagtgaaaacgaagattatgcctagagcatcctaaaagctgaaaaagtaaaaagatgcaaagactaatcagccacaagacttattccatcaaaccataaggttgaccttagagatggtcagagtcaagatgtgctataaggatcaacagcgtactccctccgtttcaaattatttgtcgtttcaaggtttgtcctaagtcaaacatgtctatctttgaccattaatttttagaaaattgtgtagtttaacatgtgaattatatattatagaagtatttctcatggtgaatctaaaaatataaatcttataatgttaaactatactccctccattccataatataaggcagaaccacttttcttagatgttccataatataaggcatgcatgcaagcatgcaattaactatgacatatctctattaaattactacttttttaaaatattccactctctatgttatctaatcctatcggatgcatgcattatatttattaggatgatctaaactataagatgataataattattttttggtctttgggttaatggtggttgtgccttatattttggaatggagggagtatgagtttatagaaattgatggtcaaagattaaaatgtttgacttagtacaaatatagaacaagtaatttgaaacagagggagtaccatatttgttttcaattctgcttcgctttcatcagccttattatgagtttgccaaagggcagcctcatattcaatatactctcctcccttgaagattgtcttatgttgatgcaagagtaaggatagatgtcttattcttcagtgttgacatagaatggctgtagaccctcttctctcttgtagttagccttatttattccaattcctaatctataccataaatcaaagcccttttagcgcaaggttctctcctccgaatacaattctcactaataggagtaactatatgccaatgtgccaataattgtagaagactttattattatcctaaataggcggcaataggcccatcaagaaaaagtctgactaataaatagtaatatagctagttgccacacatagacttgaggtaagggcttactcatcctagtcttctctttagtacactacttagttataagttataggatcagaatgagattttctttgaacgccgttatggggagtgagaaagcaagctagacacgaaaactcaggatagacaaaggaaaactcgggatagatgcgctgcttttctagctttggttggaaatagaaaagtaagttatagggcccatgcggcattccctcaaatagcagtttttttttgtctgaagaaaagttgctattaataacagtcttccctctttcataaggctctaaggctgagttcgggagcgagggttgggaaccttcactcccaacacgcaaaacggagcgacgatcagtgcatgatttattaagtattagctaaaataaacttgaaaaatggattaatatgattttttaaagcaactttcctgtagaattttttttttcaaaatacgcaccgtttagtagtttgggaagcgtgtgcgcggaaaacgagagagttgagttgggaaaggttggggaagaacacagcctaacttgtgtatggaatcagggagctacagttgtttcccgccccttctgttcggatcagatactattctctacggaaattgaaagaattctttgataagataaaaaaaattaattcaccatggtaatatctcataaccctgttatgttcaagtgtactataataagaatttcaataaaaaagattgaagcccacataattgtgtgtcagtgtcactctatgtacttggcagtattatgactccctactacagtgaaaaaacagtatattccaaaagtgatcttgatctggagaatgaagatggtgaacaattatattctatctacaaaagatctctttccaggtttcctttctgttttgtttcccttcaatcttcatgcttcaattatttgttattaagttaccaagttttccactctttctttaattatgattcctgatgactatggatggaataatttcatgggaagaattaattccaaaagaggaagtgaagtcggggcaaatgaggaaaacgtcctacagcttcgtcattgggcttctcttagagggcagacactttgtagaacaggtagtttgatcataccatctgccttatcttatcaaataaggatgatttggctgactccctgttatatttgttttctttttccgtgaatcatgatgtagcatcaagcgttccttgacatggttttttaatctagtaagcctcttcagattccaggtggagcattatttttagttccttcaaaaatagtcctgaatctggaagactttacctagctaatagtggactgagttttcaattatgaagcaagcatggatgagggggaatagtgcaattcaagaagctatgggatctcagtcaattgtgcagctagatcttttgatgaccttagccaagactgaactagcaagaggtttcagaagcaccctgggggatttcataatcatgacgcttcagctctgttcagtgttcttcactttctaccttgggaccaagtcacattattttcgacacacaattctccatggtggtgcaaaatatagagcaactggcagatgtttttttgttcgccatgtaaggttgactgagaaatacagaatgtacttcagaagccactttgtgaaaggacttgagctgatgttgctgctagtagtctatcagttttaaggtgatgttgctacggattcatctgcctatatacttctgacatcatcaatatagctcttggttatcacttggctcttcaatccatcaggatttgattggcagaaaatggtagatgactggaatgactggaccaagtggattagcagtcgaagtggcattggggttcctgctaacaaagcttaggaatcctgatgggaggagaagcagaaacatttacagtctacaggtctactgggctgtttctgggagatcatactatctctcagattcttcatgctccaatactgtatgtctgtatcatgtatcactgaacaaatgcacctagacacatatgttgctactttccagacacacaaaaatcagaattacttacttaactaggtaatgagcccacccaactacctatatggaaatcggaattatctataatttaattacgcaatgagctcactggagctttcagttgttttagtaaactatctagtctgaatcatggtatcaagataacatgaacaaataatgtttagatgtaaacagaaatccagactaaagagggagtgcattacgttgaatgtgaaactcactgaactaaccttgagccttctgtataatgcagcagaattactccatgtaccatcaagcaaaacaaagttaaaaggttcatctttcacatcctacattgcaaaagatatttcattatttcatccatacttatttacatgatgttttagagtgtgcagcgaacctatttggatgtgccatgtgcagatgacattgtgtagatgtctcataaaggtaatctttgagaacttataactagaaaaaggaatggtcaaatgggtgtgggtaattgatatcttattgatgtcttaaaatgagaagtaagaaagcatggaggaagtaccatgttacttctacaagaaaatacttgttctaactgcattagcatgggaaaccagttaccccaaacaccatcagtacttatcatgttggataaaaggaggtgattggaaaaacagatcctccaaagaaggcagcattgtttatgctatagaaactttactaaagataggtgtgttggataagtctttgtggtccttggtcgtgattcttctttttgcttttgggtagtttcacctttttcaggacagcatctaccctttagcatatttttcagttgctaggacagctgcggttagtaggacagcagcagttagtatctcctttatgcctcctttatgctttattcagtttggatgccctctaggacagcatcccattcaaatttcgaattttagactaggagggtgcagcaataggctagcagccagctatggctatatatatgtatccaacctccctcgggtaggtatggcttttgtgttttgtgaatgaagaaaaccagaaaattgccccatctcgagtgccatcctcttctcaatgagagtaaccattgaaattctaacatctggtatcagagccacactttcctataggctaaacatctcttgttccaccccttcccaagctcggttgagctctcagccagcagcagcagcagcaccggttgctcctccttcccctttcccttccccctctccacgcagcagccccccggaggtgcgccatgtccgacgctcggtctcggcgttcggtcgcctcgagcactcagcgtcagcaggacgccgagctcgccgcagcagaagagcgcaggcgagcaacggctcagaccgctgcagcagcagcgagggcggccagactggcggcagcggagttggcagcagccagggcggaggcggaggcggaggcggcggaagatgcggcacgtgcggcggaggtagaggttgagaccttgcgcagcagcatcaacggctccatcgccggcgacatcaccgccgacagggagcttgaggagctggcaagaggaagggcacgggagcgggcagagcggtgggcagcagcccacctccacggcggtggcggcggcccaagggaccgcgcgcccgccgacgggaacccagacgggcgcgggcgtgccggcggcagcccggagcccacacgtggccctcacagacagcgcggctctcccctgaccggcgccatggtcaccacggcgtccagacggtggtcagggactttggtcccggcggtgggtggcctaccctcaccaaaaccaactacatcgagtgggccgcggtgatgagggtgaggctccaggtgcggcacatgtgggaggcagtccggtacggcgacgtcgactacgacgaggatcggcaggcactggatgccctcatcgctgcagtcccgcccgagatgcagttctcgctttcccagaagcggactgccaaggaggcctgggacgccatcactacggcacgcatcgacagcgaccgcgcccgcaagtccacactgcaggcactccgcaaggagtgggagaacctggccttcaagccaggtgaggatgttgatgactttgctctccgtctcaacactctcttgcagaaaatggtgcagtacggcgacgacacctacgacgaggagagagctgtcgagaagctcttccgctgcgtccctgagaagtacaggcagatcgctcgctcgatcgaatctctgctggacctctccacaatgtcgatcgaggaggcgttaggtcgcctcaaggtcgtcgatggtgatgagccacagcctctctcggggcccatcaccatcggcgggaagctccatctcactcgggagcagtgggaggcctctcagggtgacgggaggaagagggagtcatcttccccgacaggcggccgtaagccgcgcaaggcgcggggaggtgtccagctacggtgggcgcgaagacgtgccgagggtggcgcccgcagaggcgcccagggcgttgccaccggcaaccacaagcaggcacgagacgacgcctgccgcaactgtggcaagcttggccattgggccaaagactatcgacagccacgacgcggccaggcccacgtcgcacaggtggaagaggaagagccggctctgctcctggctcacgcaagcatcgagctacctccagcggcaccggccgcagcggctttcctccaccttgatgagccgaaggtactcgtctccctctgcaacggctccagcaacgacaaggctgatgagtggtacctcgacaccggcgccacccatcacatgaccagccgacgggagttcttcaccgagttcgactccggcgtccgaggctccgtcaagttcggggacgcctccggcgtggagatcaagggtgttggctccgtcaccttcaccgccaagtccggtgagcacaggctgctcaccggaatctactacatccccgcattgaggaattctatcatcagcgtgggacagctggatgagaacggctcacgcgtgttggtcgaggacggactcatgaggatttgggatcgccgtcgtcgccttcttgccaaggtaaccagaggcactaatcgactctacatcctcagcgcgcaggtcgcacaaccagtttgcctcgccgctcgtcgggacgacgaggcgtggcagtggcacgagcgcttcgggcacctccacttcgaggccctgaagcagctcagtgccaaggagatggtgcgaggcatgccgtgccttgaccacgtggagcagctctgcgacgtttgcgtggtgacgaagcagcggcggctcccctttccccagcagacgagcttccgagccaaggagtggctcgagctcgtgcacggggacttgtgtggcccagtgacaccggccacaccaggaggacgacgttacttcctgctgctcgtcgacgacctctcccgctacatgtgggtgatggtcctcggcagcaagggagaggctgcggacgccatcaggcatgcgcaggctgctgcagaggcggagtgcggccgcaagctgcgcgtgctgcgcaccgacaacggcggcgaattcacagcggctgaattcgcgtcgtactgcgctgatgagggcattcagcgccactacaccacgccgtacagcccgcagcagaacggcgttgtcgagcggcgcaaccagacggttgtggggatggctcgggccctcctcaagcagagggggatgccggccatcttctggggggaggcggtggtgacggcagcctacatcctcaaccgctcgcctaccaaggccctcgatggcaggacaccgtacgaggcttggcatgggcgcaagccggcggtctcccatctgcgggtcttcggctgcctcgcgttcgccaaggagcttggccacatcggcaagctcgacgacaggagcaccccaggggtgttcatcggctacgcggagggctcgaaggcctaccgtatcctcgaccccggagacacagcgtgtgcgcactgcacgcgacgttgtgttcgacgaagggcgagggtgggtatgggacaaggcggtggacgatggttcgactccgacgtacgacgacttcaccgtcgagtacatccacttcgagggagctgggggagtaggcagctcttcttcaccgagcgtgtctaccccagccctcgaatctccaccgactccgacaccaacacaccctcgggccacgacttcgactacgacgagctcttcgtcgacaccaccccagccagtgactccacatgctccagcaccaacagccactcctccaagcacgtctactccgacgccagctcgtgttgagcgcagcccagtggagttcgctactccgctctcccacgacagggagcgcatcgacgcgtaccacgacggcgagcagctacggtaccgtacgatggaggatcttctcggcgaccaaccggtgccaggactggtgcctcgcgacctagaggcgcagttgcaccttgcgtgcgacgacggtgagcctcggtcttttgcagaggccgagaaacacgcggcatggcgtgccgcgatgcagtcggagatggacgcggttcaggagaaccgcacctgggagcttgctgacctccctcgtggtcaccgagcgatcacccttaagtgggtgttcaagctgaagagggatgaagccggagccatcgtcaagcacaaggctcgcttggtggcacgcggtttcgtgcagcaggaggggatcgactacgatgatgccttcgctcccgtggcacggatggagtccgtgcgactccttcttgcgctggctgctcaggaaggctggggcgtccatcacatggacgtcaagtcggcgtttctgaacggcgacttgaaggaggaggtctacgtgcaccagccgccgggatttgtgatccccggcaaggagggcaaggtgctacgcctgcacaaggccctctacggcttgcggcaggcaccgagggcgtggaatgccaagttggattccacgctcaaggggatggcttcgagcaaagcccgcacgaggcggccatctactggcggggcaatggaggaaatgccttgctggtgggtgtctacgtcgacgacttggtgatcaccggcaccaaggatgcggaggtcgcggcgttcaagtgaggagatgaaggccaccttccagatgagtgatctggggcctctctccttctacctggggatcgaagtgcaccaggacgactccgggatcacgcttcgacagaccgcctacgccaagcgcgtcgttgagctgcctgggctcaccgattgcaacccagctctcactccgatggaggagagactgaagctgagccgcgacagcacggcggaggaggtggatgctacacagtaccggcgtcttgtggggagccttcgctacctcacccacacacggccggacttggccttctccgtcggctacgtcaatcggttcatgcagcgaccgacgacggagcaccagcaggctgtgaagaggatcatccgctacgttgcggggactctcgaccacggtctctactacccgaggtgtcctggcaaggcacacttcgtcgggtacagcgacagcgaccacgccggcgacatcgacaccagcaagagcacgagcgggattctcttcttcctcggcaagtgcctcgttagctggcagtcagtcaagcagcaggtggtggccctgtccagttgcgaggccgagtacatggcggcctccgccgcttcgacccaggcgctctagcttgctcgactgcttagtgttctcctcggcagagacactggaacggtggagctcagggtggatagcaagtccgctctggccctggcaaagaaccccgtttttcacgaacggagcaagcacatccgggtgaggtaccacttcatccaaagctacttggaggaagggagcatcaaggcgagctacatcaacaccaaggaccagcttgcggacttgctcaccaagcctcttgggaggatcaagttcctcgagctctactccaggatcgggatggcccaacttccccacaagacgacgcacaagacttagggggagaatgttggaaaagtctttgtggtccttggttgtgattcttctttttgcttttgggtagtttcacctttttcaggacagcatctaccctttagcatatttttcagttgctaggacagctgcggttagtaggacagcagcagttagcatctcctttatgcctcttttatgctttattcagtttggatgccctctaggacagcatcccattcaaatttcgaattttagactaggagggtgcagcaataggctagcagccagctatggctatatatatgtatccaacctccctcgggtaggtatggcttttgtgttttgtgaatgaagaaaaccagaaaattgccccatctcgagtgccatcctcttctcaatgagagtaaccattgaaattctaacagggtgtgcaacagtgcaacttattaatacacagcttaaagaacagaataaatacctcctccggatgatcacaactcaagttcaaaccatcaaatttaagatctttgacagacatgggggttgtactcttattcggatatagaaatgaaacctttccctttcctggcaaaaaccatatcagaatggaaatatacagtatttaaacatgaagtgcacagatacatatatccttgctaaatatagcagggagagtagagatattagacgacaaattaatgaaataatcttccatgggccacaagaaaattaattcaaatcttatttctattactagttcatacatttttacttctggtttggatttgtttctgtgaaacactaccctagttgttcaatgcgccaacaggttcaaaacagcagccacgaagacaacttccaatatgcaacagtatattcatttatgcaatgattaaaatagaaggatagaatgcaaacagaaaaggaacatcgataatgcaaatattttcagtactagcaatgcattgatgaaataacaaagaaaagatcccctggtcattagattgtcagtaaatgtggacatttttaagctccttctaaattaaaaatgccactcaatatgtgaagagggttgggacaggaatacacttatctagacactagcacagagaattccaaacgagcaaatataatcttttactaagcatttgcatttctaaagaaaggtatgttgcagtgtaatcactagcataatttgtgtagttcgcactaattccctgccccttccaagaagaatacttaacagcagttgagagtctaaaggccagttatgtttccagatcataaacaagagcttaaactttaaacacatcgggagagattgtgtgcgccaaagaagcttaagagaaaaaaaacgttgaacaagcatgctaagtgaagctaatgtaaactactatacagaaaatgggagctcctgaaagcattagtatacttttttaatgtaactgatttcatatgtttaacagatgaaagttggcattgacttttgtaacaacctgaacgctggaaagcatcccacataatgtcttcgtgctcttggatgccaaagagacacaagggtgcagcttggatgccaaatacttgccatagtaactttccggtattgttttggcgcaaaaagtcctgcaacaatagagtattagagatactggcatacccagaagaaagaacagaacaagaaattcaacataaacccctttgaagagaccttcggatgcatatatagccagaatctaattccctgccatagattgcaagaaccaagcttcgcacacatacaatcttccattggcagccaacactgtagttttaagaggtaggcagatcaggcaaactgtgggaaatgaagaagagcaaagaaagggcacataaatgttagtagcaaaaataagcttcagttgaataaaccattaaggcctgattgctgcattgtgtatgatcgctgcaaaaagaagtgattgacaagatgtgcatatactagctgacactgtcacatcaccttctggcacagatatcctctactccctagcaagcggcaagcaatctgccgcgcggagaagtactgcagcttcttgtccgagtcggcgagcgtctggtagacagccctgtgcttcttgtcctccatgtctttgaaatcaccctatgagtaaccagttcaagaaacaagcaaaccatgagccgatatcagtttcaattcctgcaatgctgtatcacctcgggaatctgcaagcagcatccaggacgtggaaggggattgagatgaagccaacaagccgtttaccttaatcttggagccgacgccgccgaagcgcatcttctggccagcctcggcctccatctcgagaagctcgccgacgacggcggccaccgcggccgggagcggcgaggaggtgccccaccgcctccactcctccgcggtgacctcgccggggccggtgacgggcgggagggcctcctcctcagcctcttcggccgccggctccgcggagaaggccatggcaaagcgcgggggagcacggtgggtggggggctggaggaggtgggggcgaggggg

SEQ ID NO: 5523 - DNA, 21349 bp, Oryza sativa
  unsure (1)..(21349): unsure at all n locations
ccgcgtttagtattgtataacctcatgtctaaaacatccttgaccatgacagatcaacccaatgaaactgggggctctacggagtattcaacgccatatgctattctgtaaatgaaacttgcccatgagaacctaaagaaatgctaggtgaaagaaggataatgtttaagtgccaatcactggtgctaacgaactcaacccaacaaagatcattggtttagaagtacctaccatacatacgaaatgcataaagcagcctctccaagcttaaaaacatccttgacagtgacagatcaactcaacgaatctgggggctctatggagtttcatgcaaacttggctaaatacaaggcgaacactcagattatcatgtcgaattatttagccgattggatcaccggtttcaaaggcaaagtactacctaatacgggcaccattatacaccactaaagctaattaaataacctaccagcttatcactacagctacaaggataaaacttttatcataccaaagtttagctacaacaacacacatcgtgacttcgcgagtcatcaataaagcaagaaactttttttcgcggccaaaaacagcgagaggccggccacgattgacaaccgaatcgcaaccctcaccttgttgatctcgagctgcggcgcccacgagtggagcagggcgaagaagtagtcgaacatctcgacgcccgtggcgaactccttgggtcccagcttcaccggcttcgcctcctcttccttcgcgccctcctcttcctcccccttcgcctcatcctccgctcccttcgcctccccctccccctccaccttctgcttcttggccgcagctccctccgccgcctcctcgccagcagcgccggcggcggagtcatccccctcctccctctccctcttctgactcggattcgccgcagccggctccgccgcctcggcttccatcgcctccccacctgcggcaaccaccacctcgggttcagccatggccgggagctcgaagaatccgcggagacggaggcggaggcggaagtagggttttggaggtgttccaagcgaagcgagagggttaagtatcacgcgagagaacaaaagcgaactcgatgcgagcctagcccatgtgggcccaccagaggaaggcccggcccaagagcaaagcatcgggttcgcgtcttcgcgagggaggaaggaaggaagcaaaatgctgacgtgtacataaaccgctcgtcgggaaaaatgccactcctccccgcgccgttccgacctctcgctcccgccgccgccgcggcctccgccgcaccgcgccgcgccaccgccggagaggggggccgctcgtcgctcaccggggcgttctgttcctaagcatcggcgccgccagcgccgccgccgtcgcctgcaggacggggtgcgccttctcccgccgccgcttccccttcctcgggtaaccttctctttcctctttgctcttagattttgtgtggaacccgcgaaattgctaggcacgtccgaacatgcggctgctaaaaaattgaatcgctgaagtatggtacaagagtgtagtttatccatgttatgacattgatggatgtgtgaactttggaggttaacattgctacgcttttatctagtttgaattctatcttcttgtagtgatatctgaatgcaaaatttctcagggtaagaggtctcagctctgctcggatggagtccgcttccaccaccgtgccatccattgttgtgtatgtgactgttccaaacagggaagcaggtagtactttactgtgtttttgttcttgttatattgtgtgcgcatttcatttgtggaacttgctaggcaatatatttcatttcctccaagataaagcagttagagttgagattgatcttgcactatttgtcttgtgagcatcatgtttctcctttcaatattgttgtttagcgtttatttttttgttaattaattttagcatctatttctgccttttgtttaagcagtctttaaaagcatcatgtttcacatctactgcagggaagaagctgtcacagagcatcatcagtgagaaactagctgcttgtgtcaatatagtgcctggtttgtcactttgctcatcacttccgtttctctgacactatatgcctatgaacccagatcatatgtcagtgttattggccctctgtattccatagaaaacatctttattaccttcaaaaaatttaatggaaacactgaaaaggtttagtagaggtggcagtgtaaacgaattagatcaagaaaatccatcatatgtgggaacaaacccttttaaagctttgcttaccttactttggactgaaacaagaactctgttgaatcacgaaatataatggtgctttggttgtccaatgattgttgcgctgcccttccttatgctgttaggcaacaggtgctgtgccaagattcgcaattagcttgtttcatattatcgtttatactgaattatactgaagttctgtacatttttcaggcattgaatctgtttattggtgggagggaaaggtgcgttgtggaaatttacctatagactgaatagattattaatagttctcatctttgtaattcagtggtttatcattccttcggatgatgtatttcctgctccttagcagacctaggatttagtgatcaataatctgccttcttgcaggtgcaaactgatgctgaagagttactcataatcaagactagagaatctcttctagatgccttgactgaacatgtcaaagctaaccatgaatacgagtaagcttcattcagtttattgatcttgctgtacaatctgtctgtttactatagtttacttgtaacttttctccctgaaatcttaatgtaatttggttggcctattctttcggccggcccgggagaaaaatgttcctgtcagatttactggtaacttgttcatgcagtgttcctgaagttatcgctcttcccataactggtggtaacaccaagtacctggagtggatcaagaacagcaccaaggcaaactgatctggcattcaccctgttgtatacgcgcgctgcagacccgcagctcaaaaatatccaacaacatgaagtaactgatcggatgttctctgtttggcctatgtatcacagtgacatttgctgcaaggaatatatgtgtggttgccatcttgtgagttctgatgagtaacttgggtctataattctgctcacataaaaaatcgattcagtactcatacttgtgaattgctgcccttgatttggtattctcatatgaagtttttctagcgatgcaaatgatgaagatctttaagatcgatgtaaacataccaattcacactggtaaaaccctgagtacgtacgtaatcacctagatatagccctattggcacatacagatgagacaggcgcccgtgaccaagttttgatgtcacgtataccttattgcacagatcggaaagctacaagcccacaagaggacaccgtgatttcagaaagggaaaagaagagaatacatagactgcacaagccgttctcgtgcatttgctagcagcagcttggctctagatgagatagcggtagatcatcttaattaatcttaattcttaattagttgcaggactccttggcgaagccgacgcgggagttggcgacgtcgaagacgacccggatgttctgctgctgcaggttggcgatgacgttgacgacggagttgacgttctgcggcgcctcggccatggcgaggcaggccagcggcgtggcgctgctgtggatgagcgtgttctccatcggcagcgccaggtccacgccgccgtccatgtgcaccgtcaccgcgggggctccgccggcggccacctcgtcggtgttgaagcacgtgtcgaacgcgcccagcgacgtgtacccgctcggcgccgctacctgccgccggaactcctcccgcagcgccgcgtacaccggcgccgtccaccgcgtgatcaccgtgccggagtccaccaccgtgccggcgccggtggcggcgtcgaacgcgaacgatcccgcggggaccttcacccacgcgtgccccacgctgagccccgtcacgttcacgtagtagagagacgacctgtgcgggttcctcagcatcggcgtgtaccggacgctcctcggctgcccgccgccggcgcccagccggagcgagccggagaagtagtatgacctgtagctcgggaggcagtaggagaagacgccattgtacaagctcccggcctgagagagcagcgccatggggccacgcccgaaggcgagcagcccttgccttggcatgtttgtggtnggccccgtcaccgagctcacgcacccgaacgtgtagttcgggatggcgtccttgcccagcctcagcgtgtcgctggcgagcgccgcctggaacgacgcgtcggcgaacggcttgaaaaaggcgcacgtcgcaagcgtcgccggcggcggcgccgcgtcgccgccgccctgcggcgccgggcacgcctggccctggaacagcgggcaccacgacgaggagcacggaagggaggcgtagaaggaggagttggccgggccgaagaggctgctgctcgggcacgtgccgcacggcgagcagtgcgcccacgtcgcgtcggcgctggtgtcgagcgccagcagcagctgctgcgacggcgagccgaggccggcccggacgacgtaggacgggggggcctggccggaggcgacgggggcggaggagacgccggcggtggctgccttggaggagaggaagaggaggcgggcgtcgtcgtcgcgggcgagcgcgatgatggactcgagcggggacggcgacgaggggtgcacgttgtggtacacggagagctcggcggcggcggcggcgacggtggcggccaggaggaggaggaggagagggatggtggtggtggccgccatggcaatggagctctcctggctaagctagcttgcttgctaagagagtgtcactgaggggagtgaggattgtgactgagcgagctgggtttatatagggtttctggctgttgatcctgtagtctttggcgccgatcgattgaatggtttgagcttaattacggcggcacggacaacatgacgggctaatagcgcacattcaaatcattaagtactactctagtactctgtccaaaagaaaaataaaatctctaacataagtagtatctaggttcgtagttagaattggacttgtttttgtttttagagacgaatgggtattttaaaaattttgaaatatatttattttttgacaatgaactttcgtaaatagtttctgtaaaaacagattatttattggcttgaaaaaacgtgctcacgaaaaagagagataccataagctaataagttcatcattattaaggtctcctttgattcaaaaaaaattcataaaaattttagaggatttcatccctgtagaaatttttcctatatagccatttgaatcaaatgagtgaaatcttttggaatcctataaaattcctatagaatgtctaatgccacgtaaattttggaggaaatctaacacgaggttctacctcatggaaatcgtcctttgagtttttatctctcctctaattcctgcgttttttctgcggtccaatcaaacggtcattactgtgtttttcttatgttttgcaatcatctattttactcttacattcatatcaaatttttgtgttttttctattattacattttctcaatcatgcgatttaaaggggccttaagcttttaggaccatttatatattaatttgagttaatagtatcgccgatgatttttacagaacacgttaatttgaaaaagaaataagtctttaggattaacttgcttatactcttatagacatatagttgtttcttaagtttaattgtttttcgaaggttatagtttaattaaccgtttgaccaagcacatacggacaccatcttggcatcttttgactaacctaacacatgctcaaagaatgtgaactttggtcgttggtattatgccctcacaactccaccgccgtacagttcgatgctttactatttacctcaatcatcatctcatggtggtagtaaataaattatgataaggtcttgatttttgaacaatgttctgcttctcccttggagtagaaagattatttgggataagaatctctcactagacaaaaattgtcacaagaacaatgattaattatggagaagcaaaatactggcttatcacatgcaaaattgtagtggagtgagatgcacagaaccaaattgacccttttaattacttagttaagctgagacagcgaggaagacagattaaggaagttaaacacgcctaggagtgcgaccaaaagtcacaaagatgggcaagaatattgtaccacatcctgtcaaagtttttgtccggccactgcaggtaaaacctgacgaaatccttgattcctgacacgtcctgagacagcttcttcacgggtcaacaaggacaaggatcatcacaccctgtcgacgaatcaccaggtgtgtcttagcttagttatcaaccaatcaacaaccgttgagtgtctgttaataattactgttaatttgcattattctctgggtcattggctgtgaccggcgatcaggttaacttgtttaattattaacttggatgtgtacaaataacatcaacgtagatgctcgcatcctggtattttctgcagtctgcagaaacatgtgatccgaatgatttgttcaaggaccacgatccattggtgagtaacgcatgcttgtacgtgttgataaccacacttcctatagaggggtatcttagaaagatatttaaggctttttttaggaggagcttttagcttttttatccatattttttatagctgtattagttacataattaaaaggataactttgtataattcagaaaatttataagaaattagaagttggttttccaatttcttcatattctcgtccgctgcttctcaagatataaaacgtaacctacatgcctattcctcctacaaagtaacatatgcatgtctgccatgtccgactctctgactctcatcctgtagtatatgtaattgagatgcacttgatagtgtaatagtagtcggcgtgtggtttcaactctgaggttttatgttcaatccctagccctctcacaatttcacatccctccaaatctcttttttttttctctctttcagtacatgtatttgcttcctcacaattaatctccttttattttctttcagtacatgtatttgcttcctcactattaactagctagggaaatattgatgtggactatggatattttctcggtgaatctattgtgctgtgacgcctacagatccaaatgtgtacaaatccccgttcctccacgcgtgattccgcggcctcctttctttgggggttggattctactgctcgtctgttccttcttcacgagcagccagcggcatcacgtcccatcccttccatccagctcggcatgcattgcgtgcgcacgtaaaaagtgtactacgcagccgcgagcggatggcccgtgcattgctgtactcagcgcgcagatggctaagtaaccttcttctcaatataaatgcatctgcgatagaacttgagatatcctacgattacgaatctgcatatagttatttgtccagatttgtatttgtagaactataaatctaaatctaaatagttgcttgatcagatttatagtcgtaagatataacacatctcgcactaggtatatttatattgtaacaaaggaagtattgacttgctaattgatgagaatctaaaaatacacttagcttttttttctttacttttttttttagattttacaactcaagtatcttagaggcttccatcgtttgtcctataacttattagccgctgccacctaaaaattaatcttagagttcattttgattttctttttcattgtagttgtagtttatttttcaaagttgactttaaatttattaagaatatatatatatatatatatatatatatatatatatatatatatatatatatattaaatttgtttggtgctccatggtgcccgggcaccattgttgaaattgagtatatacccaattcaaatgagtatgaaactttttcaattacttaggtattaacattaactactttactaactagttcaaagcatgtttgtactgaatttgaacttgtttttgttagattttgattctaggtatatagcatccatacatataattagttaggtatgtaatcatggattgtgaaataaagttaaatttgagttgttttgttgataggtatagatatgaatcgaattattataactaggtatatactcacaatttgaaaattttgaaaaatttgagtgattttgtacattagataccatggtgccctatatatatatatatatatatatatatatatatatatatatatatatataaaactacccataattttttttggcgaatcagtggtaactagcatttatgtgagaactgcttaggagaaattaaaattctagaacaagcagttgtccgaaaactctcctatcgtcctggcagaagagagcacagctgacaaacgcaaattgtaccttcaaaagtgccttgcaagcaggcaacatcaacaagccagccagccaaacgaacaaaccagcagtcaacggtgcaggacgctactgaaattcagcacgaagatcgtcgtccatccgtggcaagcatcgttcccggccatggctatgtacaaggtttagccacttatcagcaaattaattagcaggagaagcaaggataaggaacatagacagatcttcctacatctattaatgcatctatctcgtgatcgaattgtcggtgagagtaagcccaaaaccctcccctgtttcctcctaacacaaacagaacaaatctatactccatatattaatctaacacatatctgctaatcttcgggaggccaactgtacgtcagtttgctactccattttatattacaagttatttcaggtttgtcctatgttaaatatcaactatatttgtagaaaaaaaagtagaatatctatagtaccaaattatctcatcaattataaacctataattgaataacattttttaagtaagtttgtttcttgctgaaaatgcttatacaatttttaaaattttagttaatttgaaagacgtttgatttagaacaaatttaaatgacttgtaatacgaaacagagggagtacagttggttccctatgcttccaaagggagcaggttcacgggcaccttgttccttgcgggttgcggcgaattagcgatgcacgcagagttgcagacaaagctcgccttggatcgttctaatccacggctaataatgcagttttgttctacgtgcgagcctcgcttgcatgcgtccatgcggtcgcagggatcagatccaatcccgtgcaaaagctcatgggaggatgcagttttatccagatgtagtacagctcatctgaatttcctgccacttcatctgcagtgcaaatgggttctgaacccataggttatgatgctttgagcttgcggcaaatgggttggaaaagccaatcgttttcttcttttttttttcattcaggaactctcaaattcaatcaatcctagctttttttttttttgaaataagcaaaaaggaatgcctgatatgactatatggagcatggagcagttttgtacgtacaagatttgcacaaggcacaatcctggttcgtgctcagatttgaacacaagatttatatttgtttccgtgtctctgacaggtcaaaatgcttcactggcgttggcaccagccaaatgatcatacataaaattccatgatgcgaatacaatcgtatatctacaaatgcaatcaaaccctgacgttttcacaagccctacaatattaagcggcactgataaacagccaagtggacagacaccacgacagaatagaatgatggagaaatgggaaactcatacaacagggtgttcgtcctacagacggccgatggatttcagcgaagtgaggtcttgccggcgagatggagcaacgcctgcttgtggtaggcggcgcggagctttttgtacttctgaacaaaggttgggaggtcaatgtccttctccaggaacttctggtgcagctcctccgactcctcgtccaactttgccatcgattctgagcaagcaccgaagcaattcatgaaaatgtcagcggttgcggttgggtgtttgaaaaattaaattacatggttggacttcaaacaatgacagaagcataaatcaaggtttcacgaaatggaactaacatagacgccactatgacgctagtaccagtcctagcctgatcattggccggttacagaagggtagtgcattcatagcaaacaatagatacatacaaaacatgcccatgattcggtgcactaattcacataatgtattcaactacaaataataaagcacagactcttattaaaatacacagcaaaaatgatgcagatgcagctgttcagaacccttactttggagcttgtcgagcagtgcagcaggagaatatgacctcataatctcatccttttgcctttccaactcagccaacctatcttgagcagcagctagttctgtagttcttataatggtgcactgcacaataataaatgcgatttgaatctcaggaaaaaaaattgaaacgcagacaaaatccattattatagcattaactgtatttaaagttcgtttaacaatgaacatcatggctacagtagcttatagtttctgagatggaggtcacagtactaaacctgattcctgagctccaagatccgttgctctttttccaaattttctcctgtaagttcagaagatccaaccatatttgatttagaaacagtagtaactaacaagttgtttatatctttttcatagttaagacaatccaataaaaaagcattgcatgccgataacagaaacacgaataactcacttgcaagttgcactgtctcctttctaagctcatcgcgtaactgaacattaagaaagaacaagaagtgagcaaattgacaagaggtctagcattcagacaagtcaactatctaaggttaaaagcagcaccgaatataaattaaagaataatcacccacattaatgcccaaatcacaggagatgtgccacagcccaaagcctcaaatatgaggccagaaaaagaaaaagaaaaataattggagcatatagtttggagtttcctgtgtatctttaactactggaggaaatacagaaacatctaagtacagccaccaatacaaatttcaaacacctgtgtactcagcaacaaaacttacgttgttctgggttttaacttgatcgagtgaattgaagaaagcattatatgcctctttgtctttcaacagcctctgcaactcatcaacactgcagaaaaaaggacagtattatatacagcagttttgcattccaaacaagcatgctcacaaggaatagtgtgaaaaacacatgtagtaaaggtggcgattataaaaagcaacccaaccatacataatcacttcttttagcatttatatacatcccttctgaattgcacaaattgtcgtgccctctgaaaagctagggattcttcattcattaccaattgatagaatatagaatatcagccatgatatcattattgcaattaaaaattcattactctaatattattagttagattctagtgactctcttttagtactaatataaacactagaatatgtaaaataccatggtaaaaagtaacaaggctgttgcaattttaacccacagtatagataagataaggcataatacaatgaaacttcgtatacaggaagctacaagcaacttatcaaaaaaaggttagctgctgaccttttgtcctttaaccgagcaattatccctgcagcctcagctggagatggttgagcacgcgatgaagactgggaattatcagaagctctttgatgtggaccaacattggaagagcttggtgtggatggatgtgaagatgaaccaactacagactgagggtaccaaggttgcgtagggttgtcctggaaatttggatcaggttgctgctgctgcgagttgctgctggcaagcattcagcagaaacaaagacagtaagccagaggagctcgtttttcaggaaagcttaaggcaataagtgaatcatattaaatagccacgttaatttacttatgctaaaaattaaattcagcgtaactgaagacccaaccataagaaataacagagtagctgagtggtggacactgttcggatgataaaataaacttttggaacaaaagcaaagcaattttttgagcatcaatatctgaaggctttttagtatagaaagaaactaaggattacgaatcacatcaagcctgctggctggcactgatcaacaaatacaatactttctaccaaataaaagaggaagctcagtttatagaatacaaatgctatgcgaggaaaggttaggaacagacataagaagaacaaacgaaaaaagtattgctttcagtaaaaataacatacccaaaaagaggaaatctccagctcattgtactagagcaatctgcataaaaagaaatagcaggttacatatgttccaacagttggtggtaatcaataagctgtacatgcatatagattctaacggaaaataactagtagatggtaatcgctaacgccaatgccagactaattgttggttgcatcagaaaaataaaaggaagaagaatggatcaaatctagaacaaattgaaatcaaacccctcaacgcagagttcctattgactattgtcaaaaaacgatatacttgtgataagtctcatgttcggtaggacgcgttttctactccaaaattactgcctgcgtaatcaaatcaaaatgccaagcatttggatggcaaaatgttctgtaggctacggcttgcttctactctcaaattgcctagataccgtagagcggttaatccatcactgaagattaccatgagctgctgataactaactaacttgggtgtgactttcaagaagtcatcagaacaacagcataaaaacgtgtcccccactcccccccaaaaaattccttgtaaaacctgtcttgcaaaactaattcctctacctgaatcacaatcgccgaacggattcgacaactttaacgggatcgtgaaacaaaccacagcaccggttttggatcgagggcagacacaaacctgccgagatcagcctcgaaaccgagttgccggtgcgggcggcgctcagggacggccggcgagggtcgcggaggcctggtctcaccgccgcgaggtggcggggaggggagcgcgtcgcgttcgcgttgcttcgggtgggagcaagcgaagcagcgatggacggtggccggcttgtcgaaggagaataagcaattgggatttgggggagaagaagaagagagagaggaggcgagaggcgacgcggagtcggacgcggactgggccgtggggagaggataggtgggctttctgttgggccgtgtaacctctgcgacttgggttttgtttgtgtttgcatcactgggccccggataggagaatgtgtagggagaagtggtccaaaacgtcgagaacggtagcatttgttcgaaacgattttcggtcagtcgaacaattgatcatattagcaatttattacttcctctgttacaaaatatttgacgccattgactttttatcatatgtttgaccgttcgtcttattcaaaaaatttaagtaattattaattcttttcctatcatttgattcattgttaaatatatttttatgtaggcatataattttacatatctcacagaagtttttgaataagacgaacggttaaacatgtgctaaaaagtcaacggtgtcaaacatttcgaaacggagggagtattacgatagaaatatggtgtttaaaagtgaatagaaaaaacaaaatttctatttgactaaaaaaatcaagaacatatatattatttatacgaaaaatgatgcttgatcggtagagaatttcagcgaatgttttcattattaagaaagtgtcgtccaatcatcactagatgtgtgtttatgacatgtttatcagggatttagctcaatctgatctcacgagcatagtctagatcgagtggagttgtgaagcagctcggagatcgttcaatcatggtgatctcgaagaagttgagttgtgggaaatcgttcgatcaaggtgatgttggagttgacggcacaatcaaatatcgagatcaaggctgagggggaagtgggaagtgagtcgtagtgcccggtgagggagacagcgtaggtacgtaattagagctagctagtaagctaagtacggcgccgtcgattaaacaccataaaaccacggcggcacacgtacgaccgatcaatattcgatcgatttaccttcatcttgtaaggacacgataggagcatcaattcctccggagacaatctcagatcgaaggggcgatcgttaacgaaagcgcgagattaattttatcagctctctagtgtgattctctctggtatatgctgagtatcattcgtaagtcgcaacccaccgtaagctatgcaatcttataactatactaattttagtgttgatccatgttaatcatacaggaaccacctatatatttatcgacaaattttcttttaaaaatttgatagatataattatagtacaatcgcaatgtaattacactgtaacttgcatgtaactacagtataacttgtatataactttcacgtaattttgaatcattagatctattacaagatttgttctagtgacgaacaaaaagatcacagtacacacgtatatgaaaggatttgttcccacgacctcgattttaccgaaataacatgttacggagagatttttgaaagttacatacaagttatattatagttacagtgtaattacatacaagttacagtataattacactgcgattgtactgtaattacatctgttaaatttttggaagaaaatttgtcgacaaatatatagcaaaattgaatcatatatatccttccttccttatatagtgtggttgcatctccacatttttcttttatttttcaccggtccattgactgtaacagtaaccgcgtcgccctagcacgatacggcaccaccttagactgtggtcttgacatgtgggccgacatggcacggtccgatataggtgatgtggcgtgttaggttaagccacccatttggcctgctatataacaggtgggtgcttggttaccaggtcacaatttaccacccctaaaattaggtgagtttaattttattagcagttgtttggttgtggtcgcagttagtagcgagagtatctttcaataaattggatctcacgcgttattagtaacataaaacgtgtatcaagatcatgttagccttgctaacatgtgattaagaatttaatcatttcaacttaaataaacgtgacgataatatttattgataaacggtgacctgaacgaaccacctactcctaaatttgtttgcaacactccaccaacccgtcttccaggctccaacacggcaacacctcatcacaccgcctagctactgcatcgtccacgcatcaatccatcggtcagtacgttgtccctcctgacctccctgttcctcgattccttcctccatcctcccgagaaaaaccacccaaaacagtttcttcggcgagagctcaaaataggatactcctacccctagctactctacaaaagctcatcaatttctgaacgatagcaggaggctttgccgtcatagaaagaaatggacggacgatggaccgactgatgccaacgtacccctcttccacccccccttcccctcctctctcctctctcatggctatgtttagggcatttgaccggatgtcagaagtcctctctcctctctcatggctatgtttagggcatttgaccggatgtcagaagtcctctctcctctctcatggctatgtttagggcatttgaccggatgtcagaaggagttttcggacacgaataaaaaaactaattttataactcgcctggaaaccgcgagacgaatcttttaagcctaattaatctgtcattaccacttgtgggttactgtagcacttatggctaattatggactaattaaactcaaaagattcatctcacgaattcctccctaactgtgcaattagttttttcatttatctatatttaatactttatgcatgtgtccaaagattcgatgtgatgtttttagaaaaaaaatttgggaaactaaacgggcctaatagttccaaagttttctttttccaaacttctaactttccatcacatcaaacctttcatacacacacaactactgttctatcacatcgtaccaatttcaaccaaacttccaaacttcagtgtgaactaaacacagcctaagagttgattcttttaatccctccatcctaaaataaatttaattttctacatatatcaatactccctccgtcctagaatataaggggctattgagttcctaaaaacatcacatcaaatctttagacacatgtatgtagcattaaatatagataaaaagaaaaactaattgcacagtttgcatgtaaatctcgagacgaatcttttaagactaattagtccatgattaggcataaaagtgctacagtaacccacgtgtactaatgacggcttaattaggctcaaaagattcgtctcgcggtctccagacgagttacgaaattagtatttttattcgtgtccgaaaaccacttccaacatccggtcaaacatccaatgtgacacctaaaaatttttatttcaccaaccaaacaggtcctaagaaattttagggctggacacggttattaagaaagtaggtagaagtaagtggttgagggttgtgattggttggaaagagaatgttggtgcagaagttgttatattttgagacaaatcctgatggctaaaaattgttatattttgggacggagggagtataaagcttaaaacagaataccatatttattaaatcctaatacagtcattttccagtactttatctgcttccgatatattttttaattttcatgaattttgatgtaatgattattaaaaataaacttattttaagataaatgaatgaaacttactcctaaattttattataggacgaagggagttacttttattcttcagtagctcattttgtagattacggagttttcggtagcttatattttttaggaccgaacatttcagaagaaactcactactacaggattgattatcctggacaccaccccattttatttccatgcggtccgtaagtcagactgcacggaaaaatggtgggagcgtcgcccgcacacgaaaatcaatttttgtgtgcaggtgacttaacaggcccacacgtgaaaataaccctattttcgcgtgcgggcctcctaatccacccgcacagaaaaatagtcgtccctcccatcctattcaaaattttcctctctctccccgcggccccttctctcctctctctcccttatcttctcaccttccttctcctccactcattttcctccctctttctctcaccttcttcttcagttgcctccttctccacaacccacaggcgggacggcggtgagctcggcggcggcgggcggacgtggggaggcggcggctggcgtagacgggatgggcggcccgcagcttcttcccttcccttcccagcagcaacttcggcgcgcgggcgggcgatgacgggcgaggagccgcggctcctcccctccccggcggcgacgggagcgcgcgggcggtggatccggcggacgggagggcgatgaccggcggccgcggctcctcccctccccagtggcgacgggagcgcgcgggcggtggatccggtgggcgggagggcgggcaacgacgggcggcccgcggctgtccctgcccggatccgacggcagcgttcctctcctgcccttccccgctcgagggcgacgacgacgaggcgggagcggcggcggcgaccacaatgacgacgatgacgacgacgaggagggagggctctcctctccctactttcgcgaggcgacgaccgggcgggtgcggcgaggcggcggcggcgagggccgacggcaaccggcccccacacgcccggatccggcggcggcggccgtccctcacggcggtgagggtcggcggcgggcgcgacgatgtcgacgacgagttgcggcggccggttcgcttgcaggccggcgggcgggcgacgatttttctttttttttggttttttttattccgtgtgggtggtatagtatgaccgcacgggataatcgattatcccaagcggtccttccgtccgcacgcgaaaatactgattttcacagacagcggtgtgcaggcgggtcaaatgaccgcacggaaaaatggatatccccgtatggcaaaatgagttacgtagtagtgactgtagctgtcaaaggatctgtttaatttgaggagcctctgacagctacgatttcttctaggttctcactcgttactttttagaatttggagaattctgtaatatatctctaggccctttaacaactgtcaactaaaatgttgtagtcgaggaatatacaaaagtacaactaaaatccagaagccagaagctatttattttcagctcatctcatcttttgtttttcagaatctacaaacatgccataggctgtgtttagttcatccccaactaccccaaactttcaagtttccatcacatcacatcacattcaaaacttttctacacacataaattttcaacttttcccaaacttccaactttttttagaaactaaacacatcctatggagtgggacaactgcagtttcttctaaaatactccccttttctaaaatataagtatttttagtacagtgataacccaaacattttaaactttaaccattaatagaaaaaagatcaatcatgaaaaaaaatgatgttactggatttatcatcaaacagactatcatagtatgtaactctttttatttaaatcatcttacttttatagatattgttggcaaagtagcatctcgaaaaccgtgtcagggtccaaaaatgcttatattttgaggtggatggagtaacaagtttcccaaacaattaagcttttcgtccagattctaagaagttgaagtcagagtctaaaaaacaaactagaagtataaggtgtgaaacctagttttttagattatcagaagatgactatcaaatgctccctccgtcaaaaaaaaaaagcaacctagagccacatctccttctagtagtacaacgaatctgaacaaccctcctagatccacatctcctcctaaattgtctttttttttggacgaatcagggagtactccatatgtcaaaaaagaattcaactctacggatgaatctgaacatatagattttcttttaatagaaagagtataattactccatctgtaaaaaaaaaaaccactaacttagttaaacctatttgatgtgattgattttttttaacgaagtgaggagggtgtttgggaaacagagacttattccaagtctctgtcacatcgaatgtttggatactaatttagagtattaaacatactgtaattataaaacccattccataaccttggactaattcgcgagacgaatcttttgagtctaattacgccatgatttgacaatgtgatgctacagtaaacttttcataattatggattaattaggcttaaaaaattcgtctcgcatattagctcttatttatgaaattagttttttttattagtctatatttaatactctaaattagcgtcaaacatccgatatgacatggactaaaaagttttagcctcacctaaacaccccttaattcttaaaattttaagctcttcgaaatagttccgaaggctcttgaacccagaactatgtgacttttcaaaatgtcaaaagttgcaggggcaatggcgtggagggagggtacactagtccctgcgtccccaggggatgtttagatatacagttgtaaagttttagcgtgtcacatcggatattgtattatggtgttgtatgggttgttcgggctctaataaagaaactaattacataatccgtcaataaaccgcgagatgaatttattaaacctaattaatccatcattagcaaatgtttactgtagtatcacattatcaaatcatagagcaattaggcttaaaattttcgtttcacaaattagtcgtaatatgtacaattaaatttttttctaaacctatatttaaaactttatagagatgttcaaacgttcgatatgatatggtgaaaatttttaagttgagatctagacggggcctgagtcctaaccacctcgtggcggacacctgcctccgtccctgtggctccaccacttgaaagcctttgccataaaaagtaggagtcgtcctactcctacccctacccctacccctgctgcagtgctataggctagccctacctccctgctcctgtttcctctctttctctctcgcctccttcgcttcgcttccattggtggtggtctccattgctcccttcctccctgcctttttcttccataagtagtagtagtagcgggagtggccgccgccgcagccatagatctgcggcgccgcgtatctcgcggctggtttggctggtgcggttagcggctagggttttggttgtttcgtctgatcgatcctccccgattttgcggcggcggtggtgaattggtgtgtgatctgatatggctggcggcggcggtggcgggggaaggggggagggggaggggagggcggcgacggggaagagggagaggatagcaatacggaggatcgacaacctggcggcgaggcaggtgaccttctcgaagcggaggagggggctgttcaagaaggccgaggagctctccatcctctgcgacgccgaggtcgggctcgtcgtcttctccgccaccggcaagctcttccaattcgccagcaccaggtatgcatgtatatacagttatacacacaccaacacatatatgcttctctcttcctcgccggcgtctccttcgctcgctcgcagttatttctgtttaatttgcttgcaattaaatctcgatctgggtgatgatctctctgtcggttcttggaatatcgtactattgttagggctctttgtcgatcgatcagggtttcttttttcttctg

SEQ ID NO: 5524 - DNA, 13428 bp, Oryza sativa
ttagaaatagctgaaattcggaattaaaaaataaggatattaaaagaggagactagagtccatatagaaatacaatttagaaatagctgaaattcgaaattaagaaataaggaatattagaagaggagactagagtccatatagaaatacaatttagaaatagttgaaattcggaattaaaaaataaggaatattagaagagaagactagagtccatatagaaataaaattaggaaataactgaaattcggaattaaaaataaggaatattaaaagtagagtatagagtccatatagaaatacaattaggaaataaccgaaattcggaattaaaaataagaaatattagaagtagagtatagagtccatatagaaatacaattaagaaaaaaaatagaaatatggaattaaaaaataaggaatattagaagtagagtatagagttcatattggaatttaaaaccaactaaaattcggaataaaaaggagcctccatgttcgctctcatggcctagaaattctcacattaatcagagaaaaagaaaaggcagagtctcagagaaaaagaaaaggcagagtccatatagaaatacaatttagaaatagctgaaattcagaattaaaaaataaggaatattagaagaggagactagagtagttattacacattagtagttttgaaaagttattgcaaaatttaaaattatgttgtcattgtaatatattttataataatataatgagaaaacatatatgcttttatatgagagaaaatataatgatgctagccgcgcaatctacgcgggccaccatgctagttcatgattaagacaaagtggcactgttattttgtgatgtttttcatgtcagtaagcatatgttccttgatccgaagaagtatttaggttcaactgatataaatattccaaaaatcataattgaaatgtttttacattgttgttaagattcttgatgagcaacagcaatatgagctagtaaagttctgcaaggacgaggaacttgttcttctggcggatgaggtaaggctagtcatgttcaaaggtgtcagtgtgttgagtgatataataatgttaacaaagtatgatgttaacaaacacaagagaaaactgtccagataatcgttttttggggggtgttgataggtataccaagagaacatttatgttaccaacaagaagatcaactctttcaagaagatagcaagatccatgggatacaatggagacgatttacaattagtatcattgcattctgtttctaaaggtgaaatcccatcatccgcctttctttctccaagtacattgtaactccttaccacatagatatttttttgcctgccatcaggatattacggagagtgtggcaagagaggcggttacatggaggtcactggcttcagcactccagttagagaacaactctacaaaattgcatctgttaacttgtgttcaaatatcaccggccagatccttgcgagcctcataatggatccaccaaaggtgcaataacatatctgtccttacacgaaatgtaattgccaatatacactagattcataacacagagagaccatgcatattgtgcaggctggggacgcatcttatgacctctacgaggaagagaaagacaacatcctaaaatctttatctcgtcgtgcaaaggtgtgtggagtttacttttaacagattcacttcttgctatctatgcagacacttgagctaagacatcattttgtctggaatctggatcacaggcaatggagtctgcatttaacagtattgatggaattacatgcaacaagacggaaggggcgatgtatctgttcccacggatttatctaccacagaaggcaattgaggctgccagggctgtcaacaaagcacctgatgtattctacgctctacgtcttcttgataccaccggcatcgttgtgactcctggatctggttttggacaagtgagctactttctactcttgatctttgaaccatagtgatatgtgctgtctgaatcccacagaatgataagtgaactgttttggggaacggctgaagctcacgcagcacaatctatattcctgaagagtctggtagtagtagtagtctcgttctacaagaacagatagcaccaattaaaaaaaaaacaataacagatagcaaccgttttttctaccatttcagatcatcagatgttatctgttcacctgcaattctgaattcctgaccactcaagtttggtcctttgtgaaaggttgcagggacatggcacgtgagatgcacgatcctgccgcaggaggagaagataccttcgatgatctcccgcttcagggaattccatgaggagttcatgtcacagtatcgcgactgatggactgaactcataaggcttcgccatccagaagacgagaaataaagcaaaacgccgttaatctgcgatgtgttaacggaagatgtgcagcaaccttaatctggaaaacttgagcatactcagtttgggtcgtaaagaattcacgggctgttgcatcagtgtttgcccggtacaaggtttgattggattagcacgatgaatgagtgcagggagacctgcagctaaataaatactccctccgtcctataatataaagtattttgaatttttgattgcaacgtttgaccgctcgtcttattaaaaaaatttaaaattattatttattttattagtgacttactttattatctacattacttcaagcataacttttcgttttttatatttacaaaaaaaaaattgaataagacgagtgatcaaacgttgcaagcaaaaactcaaaatcccttatattgtgggacggagtgtgggacggagtgagtgttaatgttagtagttgtgagttagtgactcgtacctaaaagtaatgctacgaaataaaaatgtgttgagagagtatcttacattcagtaaaggttttccaatcgagttggctatcttgaaacggaacgagaacagcagctattgttttgagctctgaaatctgaagcaggcgacacggagcagcagtctatagcgaatctcttcttgaagcgaaactcaaactcctcgcgatcccgttcattggggcgtggtcgcgtagattcatcattcatgggcctcgcactcccgcggctaagagcaagaacaatagtaggctttatgccagctataacaagaagaaaagagaagagagaaaaaagcgggctataaatttgtatccagctgaaacatggacttcaagacactttgtgtgtttgagaggtgagaccgagtattaattgtgtagtatatttttatagataactatttaatgaatgagctattagattagttatagataatttgaagctaacatttggctatactattaaacttgctctaatcgggccatgtgggctgcaccccaaccatccgggctctcggctctccagcagcatacgacctctcgggactcgggagccctacggatttttcttaattttaatttttatctattaaaacattttctaaaacattcttaaagtataacagatctacacctttaacgtcctctatttttacgacgtggtatatgttctaaaaaaaattaaatcctagctactaacctaaacatatatgtgtctaaattctcatattaggattggattgagttttttatgaaacagaggtgtagctgttaatgcatgttaactgttgttgagaggggagggttgcaccgtagtgcttgtaaaatagccagccttactttacgtagtcgttagcattaaccaatgactatatgtatgtcacgttatataaagaaaaaacgctaacacttttccacgaggccacgttgttgccgccttgtctgctactacctcgacattttggtaccgagaaagtaccaataccgcacttccaccacctgtagccatatggacacgatgcagtggctggcatgttggtagtggcaacgcagggatatgtgggtattggttggcacatgacaaacggcgtcgcccaaacacgtgctgcacgcacgggtacgtcgtaaacgtatgtgcggccacacaccagccgtcgtgctcacgcgtcccagttttaatttgtactttttcctccgtctctttttaggtggagtcataattttcgtgtttaactttaatcatctatcttattaaaaaaatttaatcaatatttttattgttattatatgataaagtatgaatattattttatacgtaacttatttttttattttttaaataaaatatcaaataagagagacgattatggttgcgtttaaaatagaatgcatggagtactagtgtactacatcgagcaggagcgccatagctttgcggcgtccacacaacacacgccgtgccttttcccggagtggcaattggcaaaggcaataacatgcccagaattaagtatgcaaagcggttgctgccaacgccccgggttgtgcacatgggctatttggagaattggattcgcccctacgagtagtagttgctcagctagggttgctgtttgtttgccaaagatattctctgccactccctcctgaatgtttaacgcagttgatttttttaaatatatttgaccgttcgtcttatttaaaaacttttgtgaaatatataaaactatatgtgtacataaaagtatatttaaaaattaatcaaatggtatgaaaagaattaataattgcttatattttttgaataagacgaacggtcatatatatttaaaaaagtcaacggcataaaacatgtaggatggagggagtatatacgaatggtttatgtgaaatgagggggggtgggggggggggtcttttccctgctatgttggaggaaatattctgccgcggttaggtcagtttccaccacggaatgagtggtttataccagagaattggatactgattgctgagtacattccttccttcagaataagagatggaatactcccatattgtcccatatgcgcaaggtagaggctgtttgcttggtggctagagtttgccatgccaaatcttacccacaccacactttgacagcttaggctgagttcgtcagcttgagttcccaactacacatccttcgtttttcatgcgcacgcttcccaaactgctaaacggtgtgttttatgaaaaaaaaactatatacgaaaattgcttttaaaaaatcatattaatccatttttagaaaaaaaactaatactaaattaatcacgtgctaatgaaccacatcgttttacgtgtttggagggagagtttccaactctctctgccaaacacaaccttttgctaagttctttcctcaactttgccaacatacctccctcgttttccgcgtgcatgctttttaaactgctaaacgatgtgttttttaaaaaaaaattatacaaagtcgtttaaaaaaatcatattgatctatttttaaaaaaagtaaatatttaattaatcataagaaaatgagtcgctccgttttacgtgcgcacagtctaaggaccccctccttgtcctatacatgctcttagctatcaacaaaatatgcccgtaatatgcccaacgagttacgataggaattggatgtaagaatattcggattttatttcttctgccaccctctagtggtgcaattcttttattttagttagaagaaattttactacttaaatttatatagaacaaagtcaacagagcgttaaaagtttactgcaactatgcattttaacattacgaaatcaaaagctgatgttttgccacggcgaagtcttaactctaaccgttaaatctcttatcttcacagtgaccgtagcagagatcacacattcacatgcaaaaacacgtctctttctctatacttcactttcacctcgataaaaaagataaataatccacatggcaggtgagaaattaaactattatcccgattatgtggcgcccataaagccagcagcgcaagcccatgtcatgccaacacagtagagcattgcacgcgctgtattcaattcgatcgccatgtgtagcatgtgcgaatattttttatcattagaaaaatatataatcttttcgaggttttgacaaggagagctatagctttcagctggcccaataataataataatcaaataaacaaggaaaacaccacatgtttcactgtactagttgagctctgaccactatatataatcacactgccacacaatctgctagcaattctcctccccctcttgcaatccattctgaattctctgatcttgaattcttcatcttctctctctgcaagaatctcgagatttcaagatcgaggagaacttaaaagtttttacgccatgattccgagagctccgagcctcttccatatcgaggatggagctgtgggtgtcgcggcgtcgacgaagaagccaatgccggctgactccggcgagctcgtcgggctccggctgatcatacagcagtcgccgaggcaacggccgccgctgtccgtgctcaggcggtcggcggtgaggccgtcgccggcggcgacggcggcggcgagtcaggatgaggctggtgctcctgcaggccgggggttcatggggttggggttcttgaactgctgctactgctgccacaagaagctctacgccgacatggatgtgttcgtctacaagtaagacattttacacaacaaatcaagaactccgccttaatccacacttcaaatagaaactttatttggtgattagtgatcatgatcgagctgaggaacttgtggttaattaattcttggatactgactgactgatttatctgtggttttttttgttttgggcagaggggagcacgcgttctgcagcgcggaatgccggagccagcagatggcgagggaggagaggcgagagatcgagatgctggtgaggcggcgccgcgacgcgttccaccgccggcgagcttcgccgccggccaagatcggtggacacgcgaggctgcagatcgctgcttcatgatttatatatacatatgacagacttatcgagatcgaggttcatctccgctagtttctgaacaatttttcaggagaaattagggaggacaatacaacggagacgtacggctactcattctgtcacagattttgttgtcctcgtctacttcacatgtataaattgtaattgtatttttcgatctcttcttttcgtctataaccagcggtagtagtgtagttgctgcagggtgtagatgctgcaaattaagttaagagtgtacaagaaagtagatgaaactgatggacatttgacaacgtgtttacggagtgtttgagatagattaagatgaaaataaagttagcatacgtaaaacaagaaaaccattaatatattattaattgagttaattgttataaactttaaaaatagatttatttgatcttttaaaacaacttacatacatcaagtttttcagacgtaccatttagcagtttgaaaaatatgtttacgaaaatcgagttaagataagtatcctaatcgaaaagaacgtgataactctgaagacatattcacttgcgtggacttaactgatggaatgatcgagctgagacccggaaaacattgtccagatcgaaaataaccatgaaaggttccttaatgcttttcccgaatttcaatcataaaatggcgtggacgttcagtatccgcatagtgcaaatgatctctcaccatggaagcatgagatctgggtgctcatccaacaaaggcctgtcgctttgatcaggcagcgactagctactccctctgtttcagattataatatgttttgactttgatcaaaatcaaattggttcaaatttgaccaagtttatagaaaaaatagtaatattttcaacccaagataaatttattataaagatatatttaattattaatttaataaaactaatttggtaatgtaaatattactatatttgtctataagcttagtcaaacttaaagaagtttgattttgatcaaagttaaaatatcttataacgtgaaacggagggagtacataacaatagatttgcactgtgacaaactatgaacagctagctgcagactgtcatctaaaaaacactgaaaaagttccaacaggatgtttatattagtgtatttgaggaagcttccgattcaaatgtgtactctcttgtgatagaaatcaactatcagggaatctgttagtagtaaatcaaccatctgaactagtatttatctgaaaaccatctgaactatccacggtcctgaactttgcataatgcccccgtttctgtcgctaccaatgatagcgaaaatttttgcataacacggacaactccaaaacacgcgagtacaaaatgggcctttagcccactcgcataaatgggcccccaagtcctcaacgatccttccgctgttactttgccgatgggcctcgtaggccagccatgttagggttcagtagatgggctttgacgatccaatagttagttggtcctttgcttcggcgggcaagaattaagaggcccaactctgaagatgtactggcagacctgaacttactacttcgagcatgttcagattgataccattttttaaagtaaagttgttaaatatgtgtatccatttagtttcttaccaaactttagtaaataaataagaaatcctgccaaaacttagcaatattactaaattgccaaaatttagtaagatttattttggctacaatctaaataggcccttcaactacgttggagttcactgaacttgttcgtaatagatatctcgaacaagaattaggaagtcctgagcattcagctaagtatttttttagcataataaaaaatgactgccagcctaggagaagcagccgctttggggtgggctggttgcctgcggccatggcaatggatagagatgccaattgtgccgttcaacgcacaactgaactggaactggataggaaggctgccaggctggaagggattcctagggtatgtctgggaagtttctacattgtgcagcttctcatgaaatcaaaatcttctctaaataatttagcttttgatataaattctaagaagctatagtagtaaaatgcagaaaatgaattagaaatcaaaagttgaaaaacctactacctcaaaaaattgcatttctagctctaaagctttgtcccacaaaaattgtatttctagccatgtggggcccagcaaattgattcatctagataagtttccttctctcagcttgtaatttaagtatgctaattatatgggttaattatctcaaacttatttttaatcatttgtatatatggaatgtgtgcatgcaatgggttcattaaataaggtcattgtggtcattttctaatcctactgttttatcctaaattagctagaaatgtaatttttatgagacggagggagtagctttttttataatctcagaaactgaccatctacgagctgtttgttactccaatcttaagcttctcaaatagacccatagttgaagagatgccctgtgttgctgcatggtctctgcaccgcacggcaggggagatgtgccgcttcatcaattggccgctccgcccacatgcaagatgcaacgccaacgcccagaaagtaggcgagagagacacatttcttcatttttcttgactatgaatgcgagacactgaacctgttctgcctctggatgataagaaccccacacgttccaactacgcgctgcttcaatttgtagtactgtagtactgtttagagcaggtacaatagcaggctacaaaccagctgcaaatatattttaagaagataaataaggagagagagaagcagcgggctacagatttatagccacctgtagcacggattttaagacgtattgtgtatataacatgtgggaccatatattaatagtgtagtatgtaactatagtataaataagctattaaattggctatagataaattggagctagtagttggctactattgaacttgctcttataacccgcaagttgccgtcgcctcccgccatctcgcatgattaaaagtttaaaaccgaaccaccaaaagcgcgacggcaaattgcatcgccaagttgccactggaacagggacacgcaattaatgtctctcacccttttcctctatctcaaaaggtacatttcgttttctttacctaatttctccctctcaaaataaatttatctttcattcatctcacacgtatcaatacaaaatcggaaaactaaaatacatctattttatcaaactctatatagtctcttatttatctatttttaatataattattttatgctttcacaaacttcgatgtaacgattactctaaaaataaatttattctaggacaaatgagcgaaaaatgaacatataatgagagagaaagtacctttgctcaagtttcaaatgttctcgtagcaaagagtactactggtaaatactctaccatgataataaacctttgctacaatatgagataaaatcctttgtgttacaaatagataatgaatctggtaaaactgaaaatcacgctgtgcaagcgactctgtgaaaaaactgtttctggtgcttttgctgctgtgcctgggacctcctcagcttgtgcaataccgctttcctgaaacttggcacgccgcagaccgcagccaccttggttttgcacatcaagttgaatgaccgagtgtgacacaagatcctgtataaacagagaacgccattcgttaattcgcttgcaaaaaaactttccccagtgtgacatggacacttacgtcctgtttagttcgaaacgaaaatttctagcgtgtcacgtcaaatatacggacacacatttaaagtattaaatgtagactaataacaaaacaaattacagattctatctagaaactgcgaaataaatttattaagcccaattcatccctcatcagtaaatatttattgtagcaccatattgttaaatcatgacgtaaatagacttaaaagattcgtcttgatatttacacgcaatctatacttttttttatatttaatatacatgtgttcaaacattcgatgtgattgggtgaaaaaaatttgcgtgtacactaaatagggcctaattcgcttgcaaaaaaaacctttccccagtgtgacacggacactgaatatatatatatatatatatatatatatatatatatatatatatatatatatatatatatatatatatatatatatatatatatatatttgctactcgtagtactagctttgactgtagctgcatcctgctgcctgcgacccttggttgctaccaacagatgatgctgtattaataaacgagaaagtgagcaggtcaagttggcaacttgacaataccggaattccaagaaactggggttggggagaaagttttggtattcgcaggcgatgcagccccgatctccgtggctcacccgtgtggccgtgatgccgttggtcgcacacgtttgggtgaggggagtccatggtgttgcggaggaaggtttggtaggaaggatcggcgagctcaaaaccggggaaagctcttcttcactgtgttgtttggcttgttgggtttcggattcgtgtgatgatactccagtttgatactacagtaaaatcacatgaacccgtaaaatgtactaatagtacggtcagaattttgaatggattttatagggttgatatccatatagtctaagagcaattttaatagtatagcccactactaagtctaattcatttatagccgatataatagtcaatttatacaatagttgtttactatactattaatatatgatcccacctgtcatacatatattgtgtcttggagtccgtactgcagctgactacatatctgtagcccgctactcttctctctcatcttttatctcattaaaatatgttcatagctagctaatagtctgctattgtacctgctctaagagcatccacaatgtagtccaaaagtgatccataagcaatataatatgtcattcaaccacctagtaacattgtgaaattagtacatagcaaaaaaataacaaaagctacccataaacatatgggctggaggataaaatatattatttgtctctacttcttctctccttctaatactatttgctatctatatacattatgaatgttacaatagttaaaatccatacatgtgggtcccgtctatatggactacttttgctatacattgttgttgggcccctttaaatcgtagaattgataaaacgtaggaatagaaaaaacgtaggattttgatagaaatgtaagtgtaaaacagaggattgaaaaaacgcaggaatgactgtttgattgaatcataagaaaaacgcagaaattggatgagagagatatactcaaaggaaagttaccaagaggttgaagctcttgctaaatttcctccaaaatctatataagattgttcatttcataggaatttcaaaggattggataggatccaatcctttgtttcaaagtgtttcttaggaaatttttctataggattgaaatcctccaaaattccaatgtttttcctctaaatcaaaggggccctaactacatgtagttagtaacacttacttcaatcaaatcaagtttattttaagttttgttagcacctgtaaccacatttcaatattgaaaagacttttgttgcttttaggttttctcatcttagtttattttagagcctttgtttctaaatcactaataatatatatatatatatatatatatatatatatatatatgaaagttttattcataaattgtttgtttgcaaatatgtcgtgggtctcgtttaagggcctgtttggttggtgccacattttgccacacttgaggtagatcagtttgaccaaatgtgattagtgtttaatttatttccacaattttgacatgccacattttctactcttttggtcccactagtcatagactcttttcttagccaaagtttaccacaagtgtggccatcaaattttgagacacataatttgcatcttgccacaccttcggtacaaaattgtggtaaatcgaggagggcttccaaacaggcccttaggggtccggatcctacctgctccagtggctaacgggtgcggggtgccgagcagcagaagcagtgagcgcggtcgtgccctccacgagcccatctccttccccttccctttccttgccgggccaaccaatgcacgcgcgccgtcgccgtcgccgtcgccgcggacagctgccacaccacacacacacacacacacagcacggcccgtgtctggtactccccctacgcaagtgggcaaacgcagcagcagatgcattgcaccttctcctcccccctccccccgcgtgggccccacccacctgacct

SEQ ID NO: 5525 - DNA, 5067 bp, Oryza sativa
acctccgagcacaagccgttcgtcttccgcgccaagaaggcggcggcggcggcgtcgagcaggcgcaggaagccggcgcagtacaggggcgtgcggcgccggccgtgggggaagtgggcggcggagatccgcgaccccgtcaagggcatccgcgtctggctcggcaccttcaccaacgccgaggccgccgcgctcgcctacgacgacgccgcgcgcgccatccgcggggacagggccaagctcaacttcccttccgctaccacccctgacacccgcaagcgcggccgcgccaccgccgccgccgccccggccgtcaaggcgaccccggtcatcaacctcgtcgaggaggaggacgaggaggaggtcgccgccgccatggcgtccatcaagtacgagcccgagaccagcgagagctccgagtcgaacgccctcccggacttctcctggcagggcatgtcggcctccgacgagttcgccgtcgccgcggcggcgctgtcgctcgacagcgacgacgacctcgccaagaagcgtccgaggaccgagccggaggacaccaccgactccggctccggcgacgacaccgacgcgctgttcgacgcgctgctgttcgccgaccagtacaaccacttcaacggcggcgcctacgagtccctggacagcctgttcagcgccgacgccgtgcagaccaccgccgccgccgccgccgccgaccagggcatggggctctggagcttcgacgacggctgctgcctcgtcgacgtcgaggccagcttgtccttctaggctctagccgtcgtctccggcgaccctgtgactcgatcttgtaccatgtcatgtacatagaagagtggttttgccaagcaagcatgtgttcgtcctggttcctttcggtaatgaaaaattatgtgaggcttctcgttctcgtaaaagatctttttggctgtgcctttgatgcaaaaatctgagtttcagttaatcaccatgtttatgttgtctgatgttcaagaaatcaagacaggattaatatgttcaagaattctttggttctttcaacatgattgatgaatcttttgaacaagaagaagatagtgttaggccgaacgcagcaacaactggtatgctttttgaacaaagactagaccattagttactgctactgcgagtgcaaaggcaaaattatctgaaacgcgctcctattcagattcacatgaaaggcaaaattagattcgaatatggatgaattaccccatctatctttacactgcttcacattcagatgcgactctaccaacgagaaatcaaatgacccaccagcatctatcaggctgtcgatcatttcggtggcgagtttatatcaggtcgcttcaacgaacttgctgtcggcagtagcaactatcatggcctccaaacagcgagaaaagatgctgctaatcttcgatcttatccctacactacttctactagtaccttcattgttccattaacatcatctccgtcaaaaaagaaacaaaaaatatacagagaaagaaagaaagaaagtaacttcaaacagttctgaattcttgaatttccctgtcgtgggatactgtatcgctgtgacaacacggtggtgatggccatagccatgccgtgtttgtctgctaatctgtttgttcctgtcactgattcccttcttgtgaaggcaaagctttgacacagccgtgtcaccgatggcacgaaacagatctttcactttctcatgcagtgaagttactttggctctcgacggcgacacagaacgatctctctctttcacaaggcgaaagaggatttgtaattgttcgtctcctctggtcaccatgaattatataaatttataatatgagtacaaccctattgagttttcatttttctgttttggactatttcatcaaagtcaattgattggagatggcagcagagattgttcgagcagaacgagtaaacaaaaaaggacgagatatatacatttgttaagcctcaacttgactgcgaggccacatacagagcccccaaaagctaggaaaaaagtagtgatatttcccccatgttagagataagggacacgaataaatatttgctatgtctagaagccgtccatgcgttcttggcagagaaacagtgaacctgttcaagatgctttctcaagtaggtagagttgagttgctcaactagcaattccagcatacgacaaagcaaatcgatcacagcaagagccagccaacttcaaaaagaaaagttttttctttcttttttttgggcaagttgaatcatggatgggaacacgcatgacagcgccatttcattgcattatacaaaccgaaacgctgcaatcatgtatggactctgcctgcacaggcccagctgggcaccattcctctgcttcttgcataccaaactcttctcttatcttcagagttcatcactgaattaaaatactctgttgatagtgctaaccattttctcctgtgaccaaataattgtttctgaatttcttctgcttgctaactgcccagggactagtaagggcctgtttggttcgtgaaataaaaaattttggatgtcatatcggacgtttgaccggatatcggatggggttttcggacacaaataaaaaaactaattttataactcgtttgaaaaccgcgagacgaatcttttgagtctaattaatccgccattagcacatgtgggttactgtagcacttatggctaatcatagactaattaggctcaaaagattcatctcacgatttcttccctaactgtgtaattagtttttcttttaatttacatttaatgctccatacatgtccaaagaatcgatgtgatgtttttgggaaaaactttttgggaactaaacggggcctaaatatgttccgaattcagaagaaaaaactgtcaaactaaatcataaacggcagaatcttgagtttcttttaggaagcaaaaggttgcaagtgaaatgcgaatcatgttcagttggtttctgttctattccatgagtgtccggactttttgtgccacattttgtttgggggggggggggggggggctaccagttgtgccccataccgctgtctgcatacctgggcaagaaccacggttttgtgtgcttgctgtgtagtatggatcatcagaaagagttcttgattagctaagcgatgacaaatacaaaccaggtttaattagtgcaagtgtcataaatctcaaaaagctagtcctaggtagtacttaaccggtcaatagaaataacaaaggagataggtattactagcatcacagtttatgatatgaaaatgaatggttagtgtcagaactggagctttacaaattttgttggatcagggagaggataagagtgccaactccattgcattggcttgttaaatactactagtagccactaattaacatgaaccctccaattgtatggagctagcttttaagtacctttagctaattaaacacccacttgttgatgcagcctactggcaaaactggaaggccgtactccgggaacggtttcggtatcgtgagatcgttgccttgttgtactggtaactgtgagtatggacgtcactggtaaattactgggcttatctatatcctgcagttactgaacccttgtcaaaagggcaggccatgtgcaaaccagacgatcaagaactcaattcccgtttataacattggagttcactgttcatcgcagtaaatgaacaactagctcgtacaaaatttctgcatataattatataaaataggattattgaaaaatttcacaaaactgcagatattttgataaaactgtcacaaaatcacatgtttaagttgttgtgtcacaaaatacgcatttaacatcgaatttatcacaaaagtatagatctaagctatggtatctcgtaaaaagcacatattaaacacataattaattgcaaaagctttgcaaaagtatatattgtaaaagttatcttgatgaaacttttaaaatacacaaagttaaactgggtacaaagcgataaatctgtagcttcgtgatatcatttcttaaaaatatagttttatgataaattggaccacgttgattatgtgtaaagctttaagtctgtaattactatggtactccctccgtcccaatatataaaaacctagaaccggataggacatttcctattactgcgaatctggacatgccgctaggaaatatcccatccggtgcctgtctagattcgtagtactatgaaatgtcccatccggttctaggttcttatatattgggacggagggagtagttttcaatgaagggtaaacggttttgtgaaatttactcaaagggattatcctttttatggaacttcttacgaaattctaacccaagggtaaactgtgtgtcaactgtcaaggagtagtagtaggaactgagcatccaggctgggagtttagaaattagaccaggttcaggttctgaaaaccttttggtgccaagcggtggaggcgacgagagagaaaggtcagaagtgtactcggttggtgcaatatgccgttcctatcctcaattcctccatcctcccacccacgacccttgagcgcctcgcaacgtcgtcggctcggctcgactcgtctcgtcgcccacgaattttggagggtcgcgtactgagctcgtggcccgcgtgaccatttcttttattttctccccctacttttcccgcgctgctttcccctcgcgccatccaagcgcccgcctctatatatgcgcgccgccaccatgtccagctccggcaactagctactgcgaagtgcgaactgatcagatcgtcgagaggaaacccaagatccaacgacgacatgtgtggcggcgcgattctggctaacatcataccggccacgccgccgcggcccgccacggcggcgcatgtgtggcccggcggcgacggggagaagcggcggaaggttggtggaggcgggtgtgatgacgacttcgaggcggcgtttgagagattcggacgtgaggactctgagatggaggaggaggaggtggaggaggtggtg

SEQ ID NO: 5526 - DNA, 22914 bp, Oryza sativa
ggggacgcgagcgtagcggcggcgcgccgacactgcagcagtcagggcacgcggcactccggccgctggctactggcgggcggcagcaaggcagggtgcaggtgggctggcggccagctgggggatgcggcggcgtgacgcggcatcaagcagggaagggggcatctgggcaaggtgcaaagggcgtcagcagcaagcagcagcactgcagcaggtcatcagcccattgcccagcacagcagattgaggaattgtggtatataacatttttgatttgtcatttaaaatcaatttcaattgtcaagtctagttgttactaatagctcaagtcttcaagaaatcatagagatattgaactgaaaaattttgtttgtgattcctagttgctactttgttatattgctaggttgtgaagatgccgaaaagaacactgctcacatattattctagtttaagtaacacaaataccagcgatcctccactcaataatgagattgcaagtcagtcaaagaggcctagggcagagtttagtcatatggatatcattggtgatccagtggaatggaaaccaattgagaattatcaacctgaaattagagatcaagtaaaaaggatatatgcattgagtggtccaactcaaccagatttttgcacatttcctcgtaagtggcaaagtggtgaatggaggtcctttcaaaaagcttggttcaatgagttcgattggcttgagtatagtgtttcaaaggatgcagcttattgcttgtattgttatcttttcttttagctaggaaaacctaaaaatttggaagttctgtatttgctaaggaaggttttgttaattggaagaaagctaaagataggcttgctacacatagtaattgtaagactcacaatgatactaggaaaaaatgcaaagactttatgaaccaaaggacaagtatatttaggaaaattgagattgttagcaaggaggaagacattagatacaagattcggttgacatcttctttagatgttataaggtttctcattaagcaaggtgatcctttccgtggacaagataagaccaatgcatccctcaataagggtaaatttagagagatggttaattggtacaaagacaaggtcccataagagcaataaaaattgccaaatgttatcacatgacattcaacaggatcttactaaagcttgtgcagaagaagtgacggccgtgattatggatgagattggacattgaaatttctccgtgcttattgatgaatcttgtgatgtatcgataaatgagcaaatgggtgtcatcttgaggttagtagtaacactattaattttttgccattttgtgatgctttcattgtaaaatttcaatttctttttaagtactaaccctattaatttttgccatgcagatttgtgaatgatggaagggaaagtgatggagagatttttgggtcttaaacacattgagagatgtacaacggttgcattaaaagaagctttggttggtatgctttctagttataagttaatcatctctaggattcgtgagcagggttatgttggagcttctaatatgagaggggaatttaatggtgtgcagaaattgattagggatgaaaacccttttgcttattttgtccattgttttgcccatcaattacagttagtggttgttactgtttcatcttctactgcagccacgatagatttttttaactatgtgcctttaatagtcaacactgtgggtgcatcttgcatgcgaaaggatgccttgcttgcaaaacatcatgatgtattgttagaaaaggtagagaatggtgagattaccacgggaagagggctgaaccaagaatgtagcctagctaggcctggagatactagatggggatcacatcttaaaactttgcttcgcattatggtaatgtgggaagctatcatattgtcagggttatggataccacatacctaatagtagttgactaaatctcggcaggacccaccacataccatgtcttatacggaaacaaccttcggatataggaggagttccgcataaggaaagatgagtatagttctacatggaaacgacaaggactactcggattgtatccatattggtttccctagttctacttggacaaggggacacctatgggtataaatacaaggccccctaggaggagaggggacacggaacaatagatcaagacacaagatcaacatacaagccaacatacgctaagacaagatgccggatatcgacttcagagataagcatgcctagtcccctatggtgtctacggatactgtcaggagagacaaaagcgctgtctttgatctcgccggatgcggattcgaggaggaaggctaccctgttgttgactacgagtcaacacttcagaccgccaagtcgacaacagatagataggctaccccaaatattgtattggtgtgattatgatgaataagagcaacgaccggcttcggccaacaggagtagggtcattacctgacaattcaggggcccgaacctatataaaaatcttcgtccccatctcttttattacaatctcgcatataccctggtaccaacgatccccatactatgcaaatactggaatcgcgacatcaaacgtcgacacatatatgtgcttgagaatgttaagaaagattctactaaaccaacatttattggtggagcatttggtttgatgggtaaaatgcaatggtttgattttgtgttcataatgcatttgatgatagacatcttgagtataacagatgacatgtcacgtgctttgcaaaggaaggatcaatacattgttgaggcaatgaatttaatcatttatgttacacaagggagaatggatgggagcctttgatgaatagagtagcatcattttgtgttaaacatgagattgaagttcccaaaatggacaaggaggtaaatgaaagtgggacatctctatgtcgaaagcacaaggtaacaaataagcattattaccatgttgagatctttcttgcagccatagatgcaattttggcagaaatgaatcgtcagtttagtgaagttagttcaaagttactaagtatgcatgtcagcctttaatccatggattttcttatctaattttgatgtggataagcttgtgaggcttgctgaaatttatagtcaagattttttggttggtgatcttatgcttctacggcctcaacttgcaaattttattaccaatattaggagagctaaagaatttgttggatgtaaagatcttgcaaaggtggcagaattaatggttcaaacaggaaagaacaaaacttatccattggtgtataggctcattgagttagtattgatacttccggtggcaacgacttcagttgagagggttttttcaaccatgtctcttataaagacaaatttgagaaacaaaatgggggatgaatggctaaatgacttgatgatatgctatactgagaagcaaatttttagaagtattagtaatgaaaaaatcatccaaaggtttgaagatatgaaagcgcgtcggatgttactacctaaaaataattatttgaagctattgtttgtcaattgtcattattcattaatttgacatttcttttttatagactacccctgatgaagaataattggcgatagggtgtactagtgtcgcacatcatgcatcatctattggacatttcaatattgctttgatatggataatgtttatttttcggtaactctatatatttatactttgtattagacatatagccaatttatatgagacatatctcaacttttattggccacttttggtttagcccctactataattttatcctggctccgccactatgtataactagacttgtttttaccatcacatatttgcaagcggttaaatagtcacattttttcaaagtattgtgtcatcttttcagctttcataaaaccagaatacgactcctatatttgcttggtaagtcctataaacaaaaaaaaaagagaatatattgagccacacatattataccaattgcacactacctccccgttttccgcgcgatagggcaatttcccaacttctaacttctcgtttttcgtgtgcatgctttctaaactattagatgtgtttttttcaataaaattctatagaaaaattgctttagaaattcatatcaatccattttttaagtttttcagctaatacttaaataatcatacactaatgagtcgctccgttttacatgagagaagtttctaatccttacattagaacgcacctaaggaatgtactccgtacttatcactagaccactttactgttgacaactatcaaaccggactagcggaccaatgttgctttggttcagtttattgtaaggacaaaatttaaaaggttcagtttctagctggaagagacctcctatcatatatttctagcaggaagagacctctgatcatatatttctagcaggaaaagacctgtgatcatatatttgggtgtcagataaattcagctgaactaaaagcttgtcataccttcagttacctactacaagtctacaaccatgagtccatgatcaactctgaattcagataggtggaaacatactgctgaacaacatagttttctatagataaatgcatgcacaaggagagcctcaaggtagaatctgattgaaacgtcttcacaagaccggtggcatttattcaaggagaaaaatcgtcctgcatttgtttcggatgcaataggatcataagtcccattttagttcttggagtttaacaagtttccctgtcctccacaaggttccataaatttatgttttcttagagcaagtttagtagtacagcccactacttactataagccaatgttaaagctaacatatataataggttagctataaggttagctttatttttttcatcctctctctttatctctctacgaatttaatgcatatttcttagagcttgtgtgtagctagctcttgcatgagagccaacactctccacttttatttatctctctcttccacataagcatttagcttgcttatagctcaccattatccttgctcttatgtacatattatacccatattatggggattaaccgaagaacaaggccttaatgggaaattatcttggaggcctccccaactgttcaacagcaatgaagcaccatgtataattgaccagaccactacgaactacgaaattgaaaagcttgaatttctaacaagtaagagacctgtcatcacatatttggggtcagtgaatttcatttgaacttaagcttatcataaacaagcatttgaccaactgtggtgcttgcagatgggtttggacaattttctatggatcctaattgatggaagacaaatgcaaaggtcaagagccatgctcaggaagaaattcaagtttcaacctgattggaatgcgccatggcaacattcccctcctccatgtccttgagaaattcagcgaatgcagtgcacgatgatcccccttccttccatgctgccgctgcgctctccttcatcgccatgacccgctccaggactccctgctgcgcatccgattccatgatccgcctcaagatggcatcgacgatgtcggcctggacaagtgccccgggtttataccctctgacctcgatgccaatcttcatctcctccacgatgaacaccttgttcatccactgctccgcgtcgagcggccagcacaccattggaacgccggctgcgacagcctccagcgtcgagttccatccacagtgcgtcacgaatgcgcccgtggatgcgtgctgcagcaccgccacctgcggcacccaggacgcggtcaccacgacgcctctgtcggctgtccgcgccaagaatccgtcaggaagaagagacatcgcggcgtccggcttcgtgcccgcgggcgcgcgcagcgcccacaagaatctctgctcggacctctcgaggcccgtggccatctcgctgacctgctccggcgagagcgcgccgcggctcccgaagcagaggaacacgacgctgcgctccggctgcgcgtccagccaagcgaggcacgggtgcctctcctcctccgcgccgccgtcggtgatcaatggcccgacgcagtagaccggcggcgtggcgcggttggagaggcagcggccgtccctcagcgccgccaccccgggaccctccagcgcgtcgaaggtgttcaccagaatgccgcgcgcgtccgccatccggtcgaacgcgtccagcatggccgcgcttatgtccgtcccacggtcgagcacctcctcgggcaagtgcgacgccggcagcgggcgcacgccgggaaacgacacgggcgcgtcgccgagctccctcaagcttccgctgctcccggcgcaaaaccgtggcaaacggaggaaaacggcgaggttggtggcgccggtgcagaagaggaggtacccggggacgccgagctcggcggcgacgtcgagggcgtagacggagaacatgtcggccacgagcgcccgagcggcatgggggccacgcagcaggtccccgagggcgggcgcgtgggcgcggaggacggcgagcatacggaggagcgggtgagcggcggcatcggcgccggaggaggcaggaggatgaggaggaggagggagtggatggacggagagggaggggaggcgggatgcgtacttgcggagcgcggcggagaaggcgggggcggtggtggccgggtcagggacggcgaccgtgacggcgaggccgtggcggatgcaaaccgcggcgagctccagcatgggggcgagatggcccacgccgaggctggggaacaagaccactctccttgcagccgccattggaggatcgctgctcacctctgctcttgcctttcttgaattcttggtgggcaatccgcgacggatagagacgatgcactactaatcaatctgagggactttctgccctttctttttcatttttttccccttctttcgtgtggactagcgtggcgtggttgcttttccgtttttgtttaatcatcactgtcaaatatatacacatatcactgtatctgttcaactaatgacctaactttctacttcgtactaaaatgatccaaatggatttggggaagactgcaaattgtgcgttcgatttctgaaaatttaggcgttgtttcaccacttctatgtaaattattttattacttttaaatgtatcaactaattacacattaaaaaaatatcgcccttaaatcaataaccactacattaaacattaaacccaattaccaaaatatcgaaaatattgaatgtgcaacgagtcgtataaatattggcttctcacacacggatcattaaatttgaacggttgattttttttctttaacatataatcctatggcctctttcaaattaatcaaaatgaatacaaccgtataattgtataattgagcaaatactttagggaaaaattagaacatactaatagggtacttggatggatcaaaagcatgggtgtcagcttctagccttccacagaccacagctaacacgctggatccggcaggtggcaattatggtggaaagaccgcttctcaatcactccacaaattttctctaaaattactctgaattgggccatctatctatctattatatactaaaaatccattaaactttatataaacgcttctaaaccaccatatggtatcctataaaagctcctaagctaccacatggcactctcataaatcggtggacccactatttttaactattaaatttctttttagaaaaaaaataaaacccccataagcaatctctctccttttccctattggcctatatggtacatgatccttcacttctccgctggcggccccaagagaaaaaagcaagaaaaaaaataatatgcacgtacgtaaatatatacacgtattcatggggaaaaaaaggaaaataaaatatgtacgtacataccccagaaaaaataacaaaactgagcacagtatcgatggaaaaaagaattaaagaacatgtacctacgtacatatgcacctaccatcgagaaaaacaacgatcaataaaacatagaacatccatgctctctataataaaagaaaaaaaatactacatcacgtattaacaatattttaattaaaaaatcacaaactgtattatacctttttatgccttttctcacaaaatagagttaataattacggaacaccacattcatttccaaacatttccatctacttcacctccccctccccttcccctcatgtatatccctgtttgctccttcctcttgcttgaactggcactatttattcttttcccccattcctattatttggttatccaactaaaatagaaataatttgtaattgtaattttcaaatgatgataatttttaaactacgtgctacacgtatgatttctaatataactatttctctatttataattaaccaaacaaattaagattcatatacctatgtttttctatatatgaaatatatatagtcaatgcatgtattatatatgccatccaaataacaaagaaatatgataaagaatatcaacaaatattacatcattacatagatcattctataaatatgcatagctaaactaaattagtagaataaaaaatatatatttataaattcaagtatgaaagaatacttttatcgatagacaacacttgcctttttacatgtcgtctgaattgcaataaaaagctacaaaataattcaacaacacatgttgcgccctcatatatcatatgtagattttttctacatctttcaggtatgaacacaattccatttatttctttgtgcatgaaccattaaaaacaattgtcatatattatacacacaaattataataaatttattcagactttggaacccagacattttcttgcgcaaacaagtgcatgggagagaaagagaagtacggagagagttagtaagccagtcttgacaagctaagaataatgtatcaatattagatgggacaaggcacaacgagcgtattttttaggcatggaacatatttactaggaattagatatgatcgtatagcaaccaaataattttcatgctagaaatgaaaaaaaatgaaataattcatttggtcttgggaacacagggattttctatggtctttgatacgattagcaactggataggtattataggctttatataataatataaatatacttaatacatgccaggtacaggctaactaaataaaaattaaaataacatagtagtcgatctcaagtaaaaattcctaatattaaattaattttttttatggaaaagtatttaaatcatctaaacaatcacaatataccacattctaaaaataatgatgcatgctaattatataattttagttgttcgattgtgttcacgctaggttgcgtgaagcctcacacaccacacaaatagtgttcataaatagattgtgtgtcacaccacataatcatgttgaactctacaaacccatgtacatagtgtagtctcatgtcctatccaatccaccaattattgaccaatgagaatatatatttggccttaccaacttatataaaatgtcattgaaatttccatggaagttgaaaaaaaagtgtaatgctctgttactatttatcatatcacaaattttatacttaaaataagatttatatagaataaatagaaaatacaaaaaataccaattgggagtaaatttaaccaattggagaaattttgcttcttacttcacacttaaattgaagctactattgcaataaccatttcataataattgccttagataattggaacaactctgataggttaaaaaaaattatttaagcaatgccaaaaagaaaattaatgaataaataatacatttgaagcatggcatgcaaatgttatccaattaatattctgcttctataattgtcttaaatgaaccttacaatgcatgcccgcacattcgcgtgggctaactttctagttatatactaaaagtccattaaacttcctaaaaatgctcctaaactaacatgtgccattctgtaaacgctctcgagtcgccacatctattatctattatatactaaaagaccgtcaaacttcctaaaaccgctcctaaactgacatgcccgataaacgctctcgagtcgccacatgtcactataataaaatagacaaatctgataattaatttttatttaaattagtggacccattaattttgatcgttagatttatctttacatgaaaacaatatccctccgtaggtaagtacgatccctccacgcgcaacatatgtgctatgcatccgacctctgtttcatttgttccttttttttatccccataataattaaaattaaaaacctttttgggcctaaaaagcccatcaacctattagatatagctagcttttcctctatcctctcctaataaatagtctattaaacattatctaaatatttctaaacatctatataacactcttaaattagaggaaatctaagaaattatatactaaaagtccattaaacttccaaaaaatactcctaagattccatgtggcatcttataaacgctctcgagttgccacatgtcactctaataaaatagataaacctgacaatcaattttcatttaaattagtgaacccattaattttgatcgtttgatttatctttacatgaaaacaatctccctctgcaggtacaaacgatccctcctcgcgcaacatacgtactatgcaatccgacatccatttcctttcttcttttttatccccataataattaaaattaaaaacattttttgggcctaaaaagcccatcaacctactagatatattgctagctcttcctctatcctctcctaataaacactctattaaacatgatgtaaatatttctaaacatctatataacactcttaaataagaggaaatctaaaaaaaattctaaacatctatataacacttttaaattagaggaaatctaaaaaaattatatactaaaattccattaaactttctaaaaatgctcctaagctaccatgtggtatcgtataaacgctttcgagtcacaacatgtcactctaataaaatagataaatctgaccatcgatattcacatatatttctaaaaacgctttcgagtcgtcacatgactaataaaatagataaatacgagcattgattttcacttaaattggtggacccattaattttaatcattaaatttatctcacaagaatataatctccctccgtaagtaattaggatccctccgcgcgcaacgtacgtgctatccatccgacctccgtttccttttttcctttttttatccccataataattaaaattaaaaactcttttttgcctaaaaagcccatcaacctactagatatagtagctcttcgtctatatagcattcatttgttccgaaggagcatatcggaaaatctccacatcctacaaaattcttttaaaaaagaaaagcttttgttccaaaggagcccgtattgttattgtcaagaaagagagcaaaaaatcatctcagaacgggcgacctgggctttgtaataaaccatgtctcctaaaccgatactttacaaatgatacccctccgtcctattttaaatgtaaccatgagtttccatatccaaatttaattgtccgtcttatttaaatttttttaaaaaaattaaaaaaacataagccacgcttaaagtgctagtcattttttatcatctaataacaataaaaatattaatcataatttttttatataaaacgaactattaaagttggacatggaaaatcattggctgacgtttaaaatgggacagtgggagtacctaataatagctcatctctaggctaataacctatctaattatttaggggatagatgttactatcgagcaaggtaaagagtttcctacattaccaacacctaacaggctaacacacatagaatatgtcctcatcaattggttcttcctgtagtgatgttggtaaattggcatctcttacacgcatcatattcacccaacgcgcaccatctcaaatgcaacttccattattacaatgttgagccatatcattattatatgttagaaatctggatctttatctaattaaatctaggaaggcagaactttatgacacctgacacctcctaattggagcctggatcaagattagccatgtccaaggaaaaagttgtctcagtgccaaaattacctatatccaggaatgggtcaagtgagtcccactcagtaccagacacgcctgaagcatcacaaatcggtgcggtgtgccttgccacattctggctacttgaagcggcacctgaaatggtccttccatgctggtcgtctttattgtttgaaaatgtagcacccccaagatcctgagtatcaggtggtgttatgctgatgcgagctgaatcaacattgaaaaagtgagtaggataacccaccatgtaatcagcagggctgttgtatgttcctccttttgttcctgcaatagccacatcggcatcaattctactggacgttggaaccagcaattccccatgaaacttatttaaaacaatttcttgatgttctccgatgacagtgtccttctgcaccaaatgatctctggacatctccttcacttcatggttctccgcagtattgtcttccacaaaagcatcaattggagcatcgtcagtagagaatagccattcattgacttcatctcctgaattctcggtagcttggtttttacatgcagagtggaggttcttacatctcccggaatctaatacttcattgtctgaagcaatcgacagggatccttgatcaccatgagctgctcttctgagaggaatctttggatcatattgtagacaatgttcacgagggtgtacaaggacatccaaagccagcaaagcatgtgaacaaaattttgcaagctcggtaccagtctctagcctccctgttatgacaagaaaagataaatactacaacaaacaaaattaacacgttttgagaattacatggatgtaattaagtaaatgaactgctatatgaaatgcatgatttatttagctagcttaacaaatttcatgcgtatgtgtcctagtgggtttcttctgtatatcgttaactctacgttttaccaatgaattagcaaaactggaatgcatgtggaaatagatgataaatacagcaaatacagattggctcagaacctggaagaaggtattacctttgttgaagagctcaagacctcgttctaaataaggacaattgtcaggagaagaaagaaaggatgccaatagagattttaacaaggctaactggaagtctgaaaaagttggatctcctgccaatagtggtcttagttcatacatccccatagtacagaaagactctcttgcaacattaataagaagcaggtctatttgtgtcctccagtagcatgctctgaatgaaccaccctgctcatgttgagagtcaatagccaatttcaacagaatatacgcaagattatctactactagtcccccatcccaaaaagacttcatttctagctatgaatctggacaaacgaagtctttttgggacacatgtctatacatcctaaaagtaagagtggcacaataaataacaccttggaggcaacctagccaattgagtagagatacgaaatgatgagtggattaagaagataatggtactctacagtattctgtttgtattaatgaccaacagttaaaccgttcttataaggaatgccaccgtgaaagtaaaatagtaataccagttcaaatagtcaccgttcaaaaaacaaaatgctagaattgcacatgaaatagatatgaacaaaagaacttgtcttgcaaatgaagacaaaaggatggatatacaaagggcaactttacataagaaaatatacactaaaggaagttccaatacgtacaagcgcaaacaaaacaccaccgcaaccatggttttcaagttcgatttaggccgaaatttcagccatttcggttctatcgaaattcctgaaaatttggtttttttggaccgattttttttttgaaattttaacataaatttactgaatgactaaattatgaccaaatttgcataagtttgagaaaaacagaaaaattcggccgagataatcacttgcccaagaggggagggggtccaaaattactgaaattgcaatcactgaccacaaccacccaaaaccaacaaatagaagttatggactagaaataatgtttcagagagccgcatcacatgctggtcaacaccgctagatcatttcctcctcaaccccccacatctccacttgaatcccctctaagtccatagtgaggtcaattgcaatgagtcaatagacgacgcaggcgagagcatatgtggcctcatcaccatggtcgaacacctgctgagggtgtccggaagcatgacaatgttggcgaccaagtcaccgtgggaactcactacctacagcagatcagtagacgctgatgcaggaatgtccactttgaagacttcatgacctctttgaatgttccgagaaatttgataataagccactaaatacgcatacctttgcaaacttgccatccaatccgcatgccttttctaacgcaccattaggagtgctaatttttttttatttcataccactttctctctttctcatcattttctcattttctctcattttctgttttatcctcctttttcaaactgttttacccctggccccacctatcaggtaagagagagagagagagagagagagaggttttaccgcagaaggggatcgggaaggggaggcgacacttgttgtgctcccattttgcgccggcgccgtctccaggtcccgtcgctggacgccgccactaggacccatcgccgggcgccgccactaggacccgtcgccggcaccgctaccagcctccttgcccatcaccctgcaacccgctgccaccggccaacctccttgcctcactgccagccagcctccggtccctagggtttgaagggagagggggaaagggggtgacggttctgctgcagaggagatcatggcgcaagcggcatgctcctcgattccaagtgaactcccttctaggtaatgctataaccctcgacatctccattatttgcactaacgggctgaggagcagaactaggacgtaattggttagcgggtaaactaatgatttttttactctcatttttcttgttcgtacgcgataggactgaccatgatgtggagtttagcgtgcacgttcagttcggtcagtttacaactaaacttgatgatggtacttgtgttgaagtggcgcgtaaatggcttgaatgggttgtggactatcatcagtgcacattggagagcttggaaaaggaccttgcagcaagggtaaaatgccaacatgttctgatcagtggctatgacatgagcaccggcgaggaaacaccgtttaaggataatatgaatgtagtccatgcattatttgttatgaagagtgatagaaagttgattttatttgttgatgtggaggataagcctattcagttgataactaactcgatagttttataggtcaatgaggtagcaatgggtgaagttgtgataggcagacaaggtgatgctcaagaatgtagcagttgtattgattgggatagtctagagatagctccaattctacataaccaagttcctcagcttgctattgattgggatgcattcgagatagaaccaattccacaacatcaacttggaggaaaatgaaatgtatacatttgttggacttagaactgaggatgagagagctgagcaagctagaattgaagctgagaggcaaaggaattatgttcctacaccaggtccagctcatactaaagggaatttgaaccttaacaaggtaaagattgctgttaatgtgtaatacctggagaatctgaaattttctatgacagggatgatcctcctatggaagttgaaagctcatatgtaagcatgaatgaatttaggttagctgtgaggcaacacgctataaagggacaatttcagcttgggatagagaagtctgataaaagagtttaggggcttttgcacagctaacgaatgcccatgggctatcgcggccaggctgatgcctaaatgaaaaatccatgagggtactaataactaactaaacaatgtctcatatttcaaatattggtttgactgtatgagttgtctcatggctgttacctttttttttgcgtatgttgcgggttaccttgaacaaatttgcccatacttgtgcatcaactgggagaataaagaccaaaatggcaagttagtgggtggcagagaaggcaattccttttctaaaaaaggatccaaatatgggtgcaaagaagttgatgggggaacttagaaaccaagtacaatgtcactttaggaaaccatactgtgttcatggctaaggataagatttttggtcctggctcctgacctctttctctggcgagaagaggcaagggcagcaagcaccctggctcctaaccgcagagcaacaggtaaaaccctccctctctctgttttacctgacaagtggggccaggggtaaaacagtcccaaaaaaggaggataaaacataaaaagagaaagaaaaagagaaaatgatgagaaagaaagtggtatgaaataaaaaaattagcactcctagtggtgtattagagaaggcatgcggattggatggcttattgtcaaatttctcttgaagttccctagcaaccacaacaggaggctacagcttggatctcctccatttgccacaccttcttcctttaccgagaagaaaggtcttgattgcctcattattgctttggagttcagcgctgtatttcttggcctcatccagctctggctccgagatgcttattctcgaactgctgccagcaacaccaatgaccaggcgacaccggtgattagcactgatgcatctgtgatcgtgggggctgaggaatggaaggccggagcaatggctagcccgactgcaggcatccgactaacagactggtcagaagcaacaggggaagtcctacaaagacaagagaaagctctcagcaaaagaagacttcccgagaacaaggaaaaattaagtctacatatatacttacgtggcttacggctttgaggagcaacgcggagtgaggggtgtcaactagccttgggactagtgactagtgaaaatatacttacatcttcgaggagggactaagtctacgtatatactgtcggcgctcgaaggaagagatggctgagatgagaagaatggacttgaaggtgaaattcaaaggcagcctacaaactttatcaaagagaaaaagcttaccaaggttgtgcgtgttctagaatctggagcgaagatggcattcaccacctcaaagtgcttagtccatttacaatcattctgaactcgaaaatacctaattgaaaccaatccgcacctatccatttcacctgtgcactcaaactgagcaaaacccaaactaaaaatcagctcattgaacccatttgatcccaaccaagcaggcctaaacatgagggagccctcgctcatctgaccttatttgcactaccagataagcactaagcatagttacaataggaaaaatgtatttaatgtggactaggaaaaaaaatttaaggcatttagaaagctgacgttatgatttggttacaataatctagttgaggagccaaataggtgaattagacagttatgcactcttgtttaactacaatgtattagtaaaagaaatctatttcgcttaagcatgagaagtgattgcttaagcaaaagaatgcgtaaatatacagttatacacataccagagtcagaagtacttcaaatgtttccagtgctgctattttgacacacagtgaagacattgattttctaatgcatgtaggttcagggctcccagcaattgagcttttcccatgcaatgcctgattgttgctggaagatctttctaatgaagactgatttattcctcctattggagctgaactcataacgaataggctgttgccagaattatcatccagatcagcagaaatgttgctaactaccacctgaagcaagtgcatacccatccctggtcaattagtggcaagaaatttaagagctttaacagaaaggtgcattacaagtgaaatattatgaaatcatctgagacatatccagtgaatgcagcatcctggactacaaaaccacagttgtttggctcagactcaacaggtggtttaacatttgatacgtccatgttaactactaaaaaaataacagttacagcaagtacatagagtaaaggttttctcccggaaccccctttccaagcataaaacttcgtagatcatctgctaatggcatgaaaatttattttgctccaaggctccaagcaggcataaagtgacttagtgtcagtaacataaatatacaaatagattctatacagttctaaatatagagcctgactgtctatttgataaagaaaaagagaatgccagcttgtctggtttgtacgaacgttgttgtctaagcaaaattcagctgacctgtttcatgtacaaaccctctatatatcctttccagcagaagcgaacacctggcatatgctcacttatgcagcagttttagattaacataacattattttacatggagtcgaactcaagggatagtgcttgggagctttactgctgtgagaggacaagagtggcgtagaataatgtcattaacctcgttagcccgatcgggcatcggaactggaagagtggacatgtcaatatctcgatcagtttttaaactacagtattctcccttcttcattgtgccaagcaatattggatatctatcactgtgtaataggaaatattggcaacttttttaacttttcaaaaacaaacacaatttgaaatgtgacaagtacattaccagtgtcgtgtcagtaagaaatatctgtgcataccagaacctgataatttgtggtaacatgtatagaaatttcctacaacacgtgtaagcgacaattcactattgaatgtgaaagggggctatgcaactctgcgaagaaattaaagatgtgatatttattataacaaagtaattaaacaatagaatcgatgacaaaaaacagcacgcgaaacatatcaatttccattcaggactatcatttctgaacacttgtacgattaactcacaagttggctaatttcgataacccaacttcaaatatgccaaactagtacttttaataagaaaagttaaatgaaaacatattattggttggcaactcagattgagaacacttatggagttctctacagttggtttgatatccttttccccccaaaaaactcaacagctcattatttcctaagacccccgaaatgattttcaatggtgctctgtctattcacaattgtacagacaggcccccaaagagatccagaaatgacatcaacagtagctaatggtaagagttacaaaacaagtgttttgagttcgagaggataaggtgcatactaaagatgattagaggttatttggatcagacattagttatcattttcaaatatttgaggcccaaggaggcagggagattcctcaaatatcagatgtggattgtggagaatggaggcgatatttcggatggaatatgataaggccccaggacaatatggttttccagctagagttttaccaagttttctagatcagagggactgatttgatggccatagtatatgattcgcaaaggcacacttcccctttactgccatctttggtactactatgttgttacaaaaaagcaaagagatgacaactatacaacaatatagaaccatttgtctactaaatgtgagtttagagaaaaactttactgaagtgaccacaatgagaattgctggagtgcaaaatttttataagatccacgcaaacaacttttaagcttggacattgtaccatggaaggaattacagttcttcatgaaacaatccatgagattgcttagggaaaaaaaccaaatggagtgaacttttaacaacatacttaactaagaaatattagatgggactcttggatagaacattttgcaacagggggagtatgatggtaaaagtgatgatagtttgaacttccgaactaagacagggtgacccatagtgccataatcaactctattatttaatattcggtggttatgttggcaatttagtaatatactattcactttaatttgatattatacgtggctatcaatttatatttgattgtttttaaataaacagtagcagaatccctaagttctaatcaactaaaattttgttccatagggctattgtagagaataagtgaacaaaatggacagatagaattgtgattggggaactcaagtaacatcgtgattattttaagtagtctctacgcatgtatccctattatacatgctttgggccactggctcatcgaactacaaggtccattacatcaacactatttatccactaacttacagaagaaatgcatcagtgttttgtttcgactactaatgcaagtggtgtgttaagtatattttttataaaagtgtgaatgacctaccaacacccatcgagctcatcaataatcgcacaatagtgtagagttttcttcttactgcaggcagctttgctcctttgaagtactcagttatgagcgttacaacactaccagcatgtggtaatagtgaactgcaggagaaattataactaaaaattaaatcaatttatcatcttaacatcacatgagatatctatgaaggctacaatactatagctagtaccaactgcaattaaattagataaggggtatggtaatcatcattagcctcatttgcaaaatttcaagtgataaagcacttctggaaatcatttagacaaacaaaaaatcaaagttatttttctaaagatcataaatttcaaatattgtactgaagcttgtctgctaatgatgtgtgtgtgcgcgtgtgtggaattatgtgttctgtttcttcatatgttcttttaaattttttttttgtgaaagatcacacaattactcaccaatcctggtgatttgtgtgtgaataattttgaaagtaaggcagaaacaaaagatcaagaatgcatgttacctgcgcattcctttaataatggcaccaagaaaatccaagaaagatgaatgcagttctagaatctcagaaaaagaaagatgacatgaaggggtgtcttgttgtactagtgatgatttatgaaatgttacatctgtcagcagcactcgttgtataaaagttaccaccgcaggcactggaatattcaccttcaattaaaataagggcccaagaatgtctgttagtgctaaagattaaaagcaaaaacaatgtttctaacaaacctgaattggataagaagtagttaacatcatggagcagcagtgtataagtgctgaaattgtaggaactgcaaatgtgcaaaatttctttgctgaatgaaagttccaatctccataggttgtctggcctcctgacagtggtggaggtttacttccaggtgaaattagtggcatcaactcaaatccagtatagcctgcaaaatgaacttgtggttcaacattgcacaaaattgtagtacaactgagaaggtaaaaaatgaggcaccaaatatctttgccttcatccagtccaacacaactaccatttaacaaattgttgaccacaaccaatatcttctggatcatcagtgacaaactattatgtgatactctgacacaaggcaatagtgctaaagtgctcgcaagtttctgaaagatgagaaaaatgaaaggatcagtcacaagtggcaaactgatgataatgaaaactaaatcaatgatggaatcaaatgaaaattaaaatggttcaataaaagcaaattccatgcctttgaatgttgtagattgcattgaccactcataatctttgctgcaatgatggattcaacctgaaattactaatatcagtataaaacttactacagtcagtgagacacaaccaatagatccacactttgatgtaagaatgtcagcattatccatatacttgtgaaggtgagcgtatatcatattgtcacatagaaatatcattgcaaggcatataagaaatgagtgtggggtatgctaccgaccagatggaaactgtgaatctttgatcagccagattgtgctctccattttgtacttaatgtgtcaaaccaggtaaaaggtaagagatgcatttgacgtgctagattcataaatcaacttgagctcaaggtaccaacaaattatgacaacagaatgagcggtagaggttattataatctctctattcctatacttctgattactaaaataagcattcccaataagccacatcatagaaaaattggaagcctttggatgaaagcatagaagaataatagccattgaatgttaaacatgtatccgacatctacagatacaagaatggcagttaccaaaatcataggacatgaagttagccaaccaaaccatatcataactgcctacatgaaataaatctctccgtggacatgcttgcgctgataaagcccataacagacggatatgcgtcagttatcacttcactacacatgatcaaaaaccttttataaaataaattacaaagaactgtcagcaaaatatggtttagattccccacataaatagaagtgtgttcttcatttaatttcatatccagaatcgcaagatggtttggattatctgttccaataat

SEQ ID NO: 5527 - DNA, 14294 bp, Oryza sativa
aaaatcccttatatttagggacggagggagtatgtatagtagatgagctataaggttatctttatttttcttctcttctttatattcctcatctatgtatttaatgtatttatcttgaagtgtgtgaatagctaacttttgcataaaaatcgaccgcttcattttttagattctctcttctttacataagtggtttataacctactaatagtattaatcttgttctaacatgtaaaatgtaacctctacacaatcttaaaaaaaatggaaagagaaagtaaaatatatagtgtgagagtgagttagttaaagaagattttggagtttgtgtgctaattaagcggtaacatattatacaagttgccttttattgatttagagcaggtttaataatgtcgtaaacttgctaaccgtaaaacatccacatcatctatagcacattagtatagattgctcatataacaatggtctttattactatcatttacggtaacaactgatatattttttaattgatacatgtcccactaattactgcattcttcactattgttccaagcatgaaccaatctccaccaggtttacttctctttcttcattgtacagtgtgctgcagctgggtgataattgtatcgtcggctcgcgttctctctctaccattttctcctccagcacagcagtggggctgacttggttacgctatcactgatccaggttgacctattagacatgctcttatagatagcatagttaaaagaaaaaagtacgaattacaccccccgacccgaactatcgcgcttgaccgaattaccttcttgaacccgaaaaccatgcattgctcaccctgaactttcaataccggatgaattaccaatctagagcggttttatcctacgtggcatacgcgtggcagtccagtcagcattttttttaaaaaatggtggggtccacctgtcatgcctccacttcacctcttcctaatatctctctctctcttgcgcgcgggcgcaagtgcgcacggcggcgtggagccgcgaacgatggcggcgtacatgggcgggtggtgggcggcagccgcgaggcaaggaggtagcattgcccgcagtagggatggcgacggggagaacgggccgagcgcggccgtcgaggtggaggctgcggcggaggggggcagcgagaaggtggctcgatgatgaacctgaggagaaggacacctcctgcatgacgaccggcgatgaaggcggtgagttcggccggtcggtggtgaagccgaaggcagagcgtgtcatttgcgccaactgcccgcatcgtccttccagatccgcgcggcctccgcccccgtccgctaatgtccggtctcggggaggatggaagggaggtggcgccatcgtgagatacaaccacggaggaggcggggacgacgtcaacgtgagaggcggagacagcagtgccgcgatgaaggtgggagagcggaggaggacgaggaggaaacgatagcgagagcgaggaggagacggcggcggtgacaaggagaaggggcaacgatggaatttcacggtcgcacggaggaagaattggactacggcgtcaaataaaaaaccgattcaggattgaactacaacgtcaaacaaaaaaataatatggagggagtaattgacaacagagaagacattactcacgtgagaaaatagagcgccattgacctcaagcgcttgaggtgccgttgccaaaggcacggttgcgtacgatgtcttggggaaagtggagtgcgtgcgcccagtatcagagcttggcgccaccacctcagatctatgcttcgctgcctcgctgcactggaacaacagaacgacaacctcgctaagccaaactgccggttccctccgaatcaagtgctagcaggccagttcaagcgatatgccgatacgttgtctcctgtctacagtctccacgcagcccctcaccatctttcatcgcgccaacgccagcaacgaagggacaagagaggaatgaggatggtcgatggcagcatgaggaatgaggatgcaaggggagaaagggagctagcgtgacctaggaaggaggaagacggttatgatgggctagcgtttcccaaggggatgggaagggagagagagaggagaagggcggcggtaggctagggtttgcccgagctccttgtgaagttgagattggagagagagagagaggagggtgtgggtgcggggatatcgtgtgctactgagctaacgatcccgacgatcggatatcaatcggatggccaagccaggcgattgaagagagcgctccaaattcaccagccttccagcgcgggcggaccgacatgtggacccacgagaaagtatggcccagcgaacagagaaagaacggtatttttttttgcgtaaaaatcccatgcgccatggcaaagccacgtcgtgctgaaatccctccgaacgccatggtgcaagcagatcgcccttacttttaattaccccgactagacattttgcgcgcgttgcgcgccctatcaagggtccaatgaacttttaccaataagaatattgtgagaataaaattaaagatctataatctctctgatagagacaaaaatcatgaatttctatggtaaatagagtgagcatcgtgttgtagttatgctaacaaatttttttcctaaaacacagagttggtatatctagacaaaattaacatgaacaccatataacagcttaaaccatcacgtaggctaaatataaatcacatagtgcatagcataattcatcaattcagcttgttttcttcacatcctattgaagagggtataagtcatttaataacatgtaagtacataatatacatcgatacttaggaagtgtaatatttctgcatgtcatagtcagacaatcatatcttaacaatccattttgaccaaaagtttaaccaccaaactgtccgcacagaagaagcatatgttagacaacaaagtaaaccatactggggttaaaaaatatagagtaaatttcataaaactacatatattttgcacattctatcacaaaactacagatttaagaacttatttcacaaaactacagatttagtgtctacgtttatcacaaaactacaggtactttgcacaatacatcacaaaactacagatttaagaacttgtttcacaaaactacagatttaatatcttcatttatcacaaaactacaagttcagtgtcttcattatcacaaaactacatgttttagcattgttaaaacctgtagttttgtgataatgaagacactaaacatgtagttttgtgataaaagaagacactaaatgtgtagttatgggataaacgaatacactaaatctatagttttatgaaacaagtttttaaatatgtagttttgtgatagattatacaaagtacctgtagttctgtagttttgtgataaaagtagacactaaatatgtagttttgtgaagcaagctcttaaatctgtagttttgtgataaattgtgcaaaatacctgtagttttgtgaaatttactcaaaaatatatctcacgaatttaagctagataacatttctcaagtacctgaagaccatgtgtacaataaatgatttattcatgtgcattagatatgctcagcagcagccagcaagctatacaaagaaaatatcacattgttcatacttctttgaatggcataactacgatatttgtaacagatagcagatgtttcactcactaaatcaacagtacatagaaaaaaaaaacatagctaactaactacttgaaacaactgtttccgaaggaaaactacaactaagcactgacatgatagctactaaacacaaaaggcaaaaactcaagttaaaatcatggaatacttatcacacatccataatgtattttttaatagtgccactgctaatttccttcctatttcattcgacctgagaactcaataaactaatgctgaaatagttaaccttccacaaatcaggcattcaaattcatgcaaaatggaaattgctcaagacaaatgatggaaactgctatgttattttacgaatatccagacaacgtgttgcagtgagacattaaaatgctatgcagattcagggttgccataattaacttcttctccctggtaagacctcgtcaagcaaaagccaatcaacatgagctgcatctgaattcaatcaacaatgttagaagcagttgtgttcgcctaatttttctgaagatcaatcttgttatctgttagagagtaacaatagacccccactaatttaagtagcagttaagaacaaaaataataaattcagagagaaatgacaactcccatctaactctgcttaccttgcagaagcacaatccaattattcattgaatcctaaacctacagcaggacactactattaatatgtagtttaaatcattagtactttgttcactggaaattatgcaaaatcatagatggattattgatatttattgaactaaaagcatgatacataacattcttgaacttgggtccacattcaacatgaattgctgtcacagaaaaaggagaaaaaacagagtatgcattctgatgtggctgccttgccttgccatctaatgtattctgatctggctaccttgcattgcgcctgacaccaatcaatggaaaccatgacactaagacagagagggccatctcttaccgacaagaaggaaccatatcggggattgcaatttctctgttcatctcgaattgcaacggaggagttgcaggtgaatatggcagcgactgtgccatttccgtggtccatccaagatctcatcgaacctagtatttgtgcttctacacctgccatccctaatcggcggaggagatagagctcagctgctcaggaggcatcagcaacggtgaggaggcagccgacagggggacagacgccagcgatggtccactgatccggcgaagcggccgaccgctcgaggggacgtaatgtcggcgcggggcttgctggtggtgacggagctgagcgtggtgctcggcaccgtggtcacgctccttggacccgtcaaccttccctccaccagcgggcggcgctcagccagacattggtgagccgctcgagttagaggcgggcctcttcgtcacgggcgacagcgccggtgcgaacatctctagccctagccatctttgacgaccccctccaccatcggcctcgctgtggaacgtcttttctagatctggacaccatgtctcctcccgatctgctcttcctcgacctcgcggcttcggaccggtgccatcgtcgtcacctccaccgccgtcaacctgggggaccacgccggcactccatctccgactcctcgccggcgatcgatctcctgacagaaggggatgtgcaggccggctgcaagagcggaagagaggcggctagggtttgggagggtggggtgaggggtgggcgccggccgccaggtggtagggttgttcgtttttacaaaaaaggccactcacttgttgttatttaaagtgcggcctatttttcgttttttttctcttcttagcataagatatttcaggtcttggagggccttaaagtaagaatacagaacacataaacgaagacaagggacttatcacagattatcaataatagcaagggctttttttgtaaaacgaccagagtcaacgcgggcctcccgctcgctcgtgaaattcggctgcctggagtttcggggccgacgtggatagcacgggaaacggccacgcctatgcaaaacgctatggaggcgccaatccagggcaggtttaaatttaaccgctgtctctaactctatcatattaaatatcacgatcaaggacaaggtcacaagggccatcaagattctaaaattttatacacgtatactagggcctatttgaaggaaatctacagcaattagttgcagtcttgtatttctagacaaactttatgtcaaaaatcatttcaagaccggaagcacaccagaaataaaactagtgatcattggatcagacacacagtttgccaactacaaacagctatcctcaccacaacaatcatggagattcactctaatgtagacatgtattgcagttcactgctgaaatgaattgagacaaaaatatcaatgtatcatgaagcactatattcccccatagaacatcatacccccccaaaaaataccatgtgcattcaatgagaacatacctggaaagctcaaagcaaggctagtgcaacaaccagctattccagcattaacaactgcaaatgaagaattcataattagtgctatatattcaactaccaagatgttacatctaaaaaactagcacgatgttaacagaaaatagggaactaaaacaatgcacatactgtcatctttgccacgcagccttctcaacaggcacacaactagacaatggacgccagagagaactgcaaaactttgatccgataaatttatgttatgagcaaggtgtctggatgattttcatgtacagaagaactgaattcacattatcaatagttaaccttggcagaggaccctgggtgctgaacaagcccttaaatcccctcttagtgaacaaaccttgtcctgaataaagaatccagtacagaacataaagattttacacgaggaaaataactagttgctacaaatggccttaactaattcacatgtctggtacttaacaagattaatagcatcttcattgacataaatatcaaaattcagatgaaggaaccaaagattcctcacaagatgtgctattatctacacattctagatttattacaaattcttacagccatactaggtgagtttgaggagaaggggattgagaagattgggaagatacgcaaaacgaggtgagccattaccgtatgattaattgagtattaactattttaaatttaaaaaatggattaatctgattttttaaagcaactttcctatagaaaatttttgcaaaaaacgcaccgtttagtagtttgggaagcgtgcgcgcggaaaacaaaacaaactatctctctttctccagctgccgaacacagcgtaagaataggttaggaatgaacttcctttgcatgacatggaaaggaacaaaatctaaaactagaaaaagttcgtgattacaacaacatagacaacatgggcagcaccggaaacacataaacactgaaacacaagggggcaacggagaaattgggataataccatatccaatggtagacaccaaatgaactgttggtagtggatgcatgagtgttgctgcactctgaagcacggtagacaaatcatgatgactaaaagcaactgcgcacattgaaagttttattagcatgcaatttgtttattacccagttagaagagatgcaaatagaaagattgcgttgttatctttttaaaatgaagcgtagagaaaaaaatcacagtaactaaagaatgctgggcattcataacccattctgtgcagttacaaaacagaaggtaggttattggtcatagtctctgccatcttcgtaggaagaaataccagtacgaacaaaaggtacattattgtgaagaacaaaaacaacagaggccacagaggtggtgcatcttttgtagctatacaattacttgaaggatggtgcaacaagaaatcaagcttacagaaaagggtaggtcttacttaggcctaacagtctagcagccaggtatttacttgctgtcactgtacaatatatggacatagcaaatagagcataattaggcataattactgaaacaggggataaaaacatttaaacataaaagggggaaaggtctatacatccatggtggcaaaacctgggaggtaattagaaattctcacacggtacaggggaagtattaggtggatttgtagtgcaattgataaagtaggcaacccggctgttcagggggtgaaatggattttttttttctgtgacagtctaaaactgacgctctgtatagattgttcatggtgtaaagtaataactattctctactaacgagcatgtccaaattgatgatgggttagaaataagaaatattacactgcccagcacaaacaataagctatcattgatgatgagttataatgcaggcaagaatagccaaaatatataccttcttacatagcttgaacacgactttgtccagaaggcttcactaactcctccctgtcaatcatcatcctaactctctttgcatcctcaaccattccggcctttgcatatatatttgacatagtcacaaaatttccagggttatctggctccaattgaaccagtttctcaaaagcgatctgtgcatgatccacatcatggtgcatcctacttccagataacaaagcaccccatacaactgcatttggtctgattggcatctgatcaataaatccagcagcctctctgaacctcccagctcgtgaaagcaaatccacaatacaagcacactgctccatagtagggatgagggcagaattttccacaaaccgctcaaaaagcgcaagaccttcatcaaccaagccacagtggcagcatgccatgagcagagttgtgaatgtcactgaatctggctgcatcccacaacgcaacattgcatccacaagttcaagtgccctctctccatgcccattctttgcgaaagcacctatcatcacattccatgacacaacatccttccgttcaatctcgaagaacacatgttctgcattgtcgacacatccaacacgtgaatacatgttcatcaacgcattccacagaattgcgtttgaaccactatcaccatggtttctcaccatgtgcccatggacctgtcttccagactccaaatcacaagcccccagcacagcaaccgcggtacgggcattccctcgaacacctcttgcgcgcatctcccggaagcaatcccacgcctcgccattcatcccggcaccagcgaaccccccaatcatcgcgttccaggacaccacgtcctcgccgtccatacgatcaaagatcctcttggccgcgctcaccctcccacacatcgcatacagcgcgacgagcgccggccggccgaggcgtagaaggccagcagtggcgcggtctttaccccgtaggcgtgcgcggcgcgaacggggagggaggcggatgcgcggcggcagcaggagacgacgcaggagaggagctcggcgtcggggcgggcgaccgcggcggcggagaagagggagagggcctcccgggggcggccgtggcgggagagcgcggagaggatggcggtgtaggatccggtggaagggtgggggatgagggagaaggcgcggagcgcgcaggggaggaggccggagagggagtaggcggagacgagggcgttggaggccgggagcgaggaggggaggacccccagcttgagagcggcggcgtgtagggtggagacggccggggcggcggcgccgggggtggtggcggcggagacgagtaggcgagggagggagagagggtcgacgggaagagcgcgccgctcgccggcggcgggggccgaggtcgagcacctggcgcgtccgaacattgcgcgctctgtaaatcccgtagattaccattccatggctttccacgttaatcgaacggcttacaatcaccatggaaatgccttcgagtgtttgacgatctttctctcttttgattttctgttttaacaaacatcatgatcaatacatgaaaattcgtatacgtaggaatcacaaattgaaatcggttcctatcaaagaaaaaaaggaatcaacgattgaaattttcatattggtgtagttttgcattgtatcggatagcggggttgatgcgacaactgcacggaaatatattggttgtattatagtaatgttagtttcattttaaattaaaaaaatgttattgataattaagacttcaatcctaaccgatgaaatgggatgcaatatccttttctcgaatgcacgtgcacgtagtcgtaccaactctatcactataaacacattcaaaaatttaggttagaagtcaccgcaggtactacttaccacgaaaaaaataggctagaagatatacccgtctaataaaataatcactggccaccgcaaagcattgtttaccgagaaagacatgaccaatttattattgcgccatttcccaaaaactagtacagaaatcaccacacattaccatatgccgaattcatatcctctactcagcattatgccaaagttatgttgagtagaggagactcaaacattgtcagacatgttgcaccataagtaacctagctaattaattgatacttaattcattcgtagaaagtaatccatgatagacacaaagtaatctatgatagacacactacatgtaaagaacacgtaggccaaaatctcatatttctaattaacattttccccatatatatatatatatatatatatatatatatatatatatatatatatatatatatatatatagtaaatttgtttggtgctccatggtgcccgggcaccattgttgaaattgagtatatacccaattcaaatgagcatgaaactttttcaattatttaggtattaatattaactactttactaactagttgaaagcaagtttgaactgaatttgaacttgtttttgttagattttgattctaggtatatagcatccatacatataattagttaggtatgtaatcatggattgtgaaataaagttaaatttgagttgttttgttgataggtataggtatgaatcgaattcttataactaggtatatactcacaatttgaaaattttgaaaaatttaagtgattttgtgcatttgaaaccatggtgcccgggcaccatggtgccccatatgagtgtcctatatatatatatatatatatatatattataacacggccgggaggaggaaatgaaaaaggagccatgatgagaggaatagacagattacttacatctatctaccctaaagttcaacaaatactttcactcattctttcattcatcactcaatggttcagattatccctgtgaaatccaatgctccagattcaccctccccacaaacgagcgctcccttcccaccccaaccgcgcccaaacctcaccatcacaccgccccgccacgattgacgtccccgctgaccccagcttctcgtagaacgctaaaccctaacctcccctctctccccaccgctcgaggtcgcgccctcatcgctgctgctcgtcgcccggagcgagcgatgcggtcaccggagatgagcacaaccgctggggcaccacgctttctcgatcggaggccagcaggatggaggaggttgcgggagagacgccgacgccgtcacacgctgttgatccgattccttgctactagatcaggatgcagtcccttttttttcgtaatctgcatgtaatcctagggttggaggaaaggcactgtggagaggagaaaagtgagacggggtgccggcgtgccgatgcagacgagtggccaagaataggtaaatagctctgttctattgctagctagcttttttttttacttactatgacaaattgatcgatctccctgttggatttttattaattctgattgaggaatgacgttttgttttgaacttttgtgccgtttgatttgcaagattactttgctagatttagcaattgtataatattcaaaacagaggctttcactatcactaattagagagcagaaacagaaagaatatagagtcagagttggtgtaccctgcaagtctgacgattggattgtacatgaactgcaatttgcatttcatgctactatggcattatgctcagtgaatcttgctgacttcctttattcaggcacaagtaatttgtgtcggatgatcaattctaagcagtgtctatgtgaataccgtttgaacaaggagctgtgtgggtttttaggattcaattctaatgaagccaaagaaaatatcttgaagatatttttcaggttattgttgtcttttgtgtccttcagagatggggattttgtactaatttagtcactatcttgatatacctgtgctgctgctacccataatactaaagtctgcctagataatgattttcaaactgcattgcatgaccagaaatattatcagttaggattagattgttctcaaggttttaatgattgtcacatggatagttctttctactactttcactatgtaggtgcatatctatgggagtaatatatgttccatgtgtgtctgcatcaactaaaatacctgatggatgtacatgttcattaggaaattagagctgcaacaaataaatttcatgatttttgttcccaccatcatagtaaatttcatgtgatatagaggaatagcaagctaacacacgttcttgagattctttaaacaatcaattatttacttgttggtaaatcatgcatctacagttagatttgtggtttccgtgattacattacatcacctgaagtaatcaacagatttgagcattttgtgtatgcaagtagttgaagaatttcaccatgttctgcatgatatgaagtatgaacattatgctagagttactgtagatcctggcatcacagtcccttaggtttggtaaattcaaatttaccatgttactaagacatgtacgataatttacaggaatatgaaattatttttagaccaaatatattacaacaatatatataccgttgtttggttttgagacatttgaacttattttgctaaaatatgtatcttttagcatatgattgtttaattcacattactaaatatcgccgtagcgttagtacgggcatattaccagttccaacaattggccatgttttttcaatggaattttcgttaaccaaatgaaggcatcaaattcctgtgtctggggtagacgtactaggacaacacgaacaggaaaatacgcacagaacatacttcctccatctcaaaatagataaatcaactcttgtacactagaattcattcatgtatatgtatatgtaaaattattttgcttgaccctagtatgaaggtgaaatatatttaattaaatccgatccagagcacaaaatgagaagtgtttttattcataaatttctatttaaaacacacgagagtcacataccctatcgagaaggctgtaccgtctggacctatgattaaccatctggagcgttgtgctgctgttcttattacaaccacgccgaacctcgacgccggtgaacaccgcgaatttctcgtcgaaatcaaagttggacctccaccctttgtacatgaatctgacaatgcagaacctgccggcgccgagagggacgaggtgcggcgtcaccggtgagccgctgggcgacacggggctcaccttccacacattgcgccgcggcggcgaggtcggacgcgcacagctcgttgccgtcggaggagagcgcgaaccagagcttgtgctcgggcgcatactcggcgcggcctctgaacggaagcaaccagtcgccgagcttggtccatgtggcggtggacgtgtcaaaggagtaagtccccgcggcggcggcgacggtgctctgcactgtcatccagatgcatgagccgccgacggccgtgtaggcggtgaggaagtcatcatcatcttggaaaaagttgcggatgctatcaagggcatcatcggcggtgaaggcgaagggcggcgaagggaggaggcgccagtgccagtgcggcgtggcgaaggggtggtttgggtggcgatcgtggacgagaaccttgaagcaagaggagggggattgggaggaggccgggtacctttccatgacgtagatgttgcctccgatggtgagcgacaccgggaaggccttgggtgtgttcatcgggggaaggatggtgacggcgcgcgaggcggcgccgtacagcaccccgctgccgctgtagtcgacggcgaccacgtcgttcttttcgccgcctctgccgctgccgctgccgctgccgagaggcatgaaatccacggaggagggccaactcggaagcccgtatgatgggcaagggtggaagatcatggcggcgcgaggcagctgagcgtcctcgacttccatagcgccgccgcgccgcccttcttcatcctcatcggcggcgagcggacggaacagcgtcgagacgtcgacgcggtgcaggccgtaggacggctgccgccgggcgatgccgtcgagcaccagattcacaaatcgccgccgactgttcattctcgccgccgccgccgccaccgcc

SEQ ID NO: 5528 - DNA, 21258 bp, Oryza sativa
ggtttcatatatatggagagatctttgtgtcagcaattgaagctcacgcgctttactttgttataatggctgtgtttttgttcgtttatggttgattagattcttgagtgatttaatgtcctcactgtctgtgtgagggatctcctttatgattggttcgcttagtttttgttatagggtaaaaggctgcaaaaaggtaagggaagatccctccttttgttttcttttgcaggggagaagagcgtttaagaaaagaggttataaaggggggattttttcttaaagggggctatcgtttttcaggcagattaaacatttgctttctgatgatcttgtttaatcatcattatctaaaaaagattttgtttattgatggatgctgaaccgccgtgttgtttgcccacgaatgtgtaattgaatcctgctatgctagtgccaaaatacattgtttgagctgatcttgtgcattactgtatatatattgggattttcaacgcgtagttagctttcagcttcgtgatgcagaaaccaaggtttctctatttgtacagcaacaatttataggagctatttttcttcctcaatgactgtttcattgctacaagggagtgttgatgtctaaagttgttctaaaaattatcccttgtttaacttttgttgagttgacatgagtttgatcttttgttgtagaaattttatcttatcggaagggacaagacaaggactctatggagggtgctgaagattgacaggatggagcctactgagctggaaatcgaggaagatcatacaagttacacagagaatgaatgccaagaactgctgtggcgaattcatgaggggaatagattgactggtggactgaaatttgtcacgaaatgctatggaatagttggtaatgaaacaggaactgagataccattgtttattgatcaaacttcctggtagttcaaaacttcaaattataacatttactccatctttgctttactcaggttttataaaatttcttggcccttattacatggttctaattaccagaagaaggaaagttggtacaatctgcagtcatgaaatatattctgtcggcaagagcgaattgattgcaattccaagtcctattgtgtggcccaacgtggcttattctagggatgagaacaggtctttcattttttctatgtgtaaatattgtgctttgcctgttgtaaatccatcgctggttcctagcaatatgaaagatgccagcttgctttgttttgtatctggacatatcatagtgcttgtattcatttatccttttgtagttttccttctcgtaatatttcagttcatttgtttgctacattgtgatgagacaatgtgcactatcggcgccaaagtgtccttgatttcacgtttttcttttctatgacaattttcttttgtgtgcgtgtgtctatctgcatatctttcagataagtttttgttcatatattcacgcttgtagttgaacctgggcaattccagttgttctgtgtgtgcaattaatatcactttgcctttaagtatacaattttcttgttgataataatatgcaccctactcatacggtcggtgcatacgtcaattcttgcagttctgagcattgtgtgtggtgttcataaggtcagaggtatatagaattgtttcgaatttctttgatccactaatattcttcttagtatgattctaaatatactatatctagagtttttctcatttctattgtctgcggatatttatatttttacctttcactttttgtagatataaacggctcctttgctcggtcgatctctcgaaagacttcttcttcagctactcttacaatatcatgcgcagccttcagaagaacataactgacaagaatactgggcaagttgtttatgagacaatgtttgtttggaacgagtttctgtctcgagctatccggaaccatctcaagaatacaacgtggactgttgccttaatccatggattttttaaacaggtattctgctgcaacattctaagtctccgatactgcatttgatgcgatccattcttttcatctctaattgatgagcttatgcatatccagcactgtctattcatcaacgaagaccacaagtagggatactgctaactcaatgccatcccactaacttttgtgttttactccacaatgtgtgacctgacatgtagtgaaagctcgaaataaagggtttgcaaaggcatggctttgtataacctgctgacatttatcagtttgagcttcttgaggctttcccgagtcgaaaattttgctcgtaagtctcagcagactgttaatgcttttcctaagttgttaaattcccctttgtgcagtcttagcaaaccaatgcttagatgtgaaattacagcgctatttatacttatctgtaatgtttattaaacggtaagcgttgtgccgttgaggttctttggtcctggttcaagacctttgaattaggacatgtatgattggcagttctaaatgtttctgataaataggaacttcttattgctactctatttgcattttcattatgtaagtactgtgtttcatactttcatctgtcaagtattatacacagagccatgctaaacatattttgttgcacagtcaaagctctcagtagctgggaaggaattctggttgacacttatagcaaggcgctcacgtcattttgctggaaccaggtttgcattacaatcctttgggtttagcaccctaatttatgttgaaaagaatggagcctaaacaatgtaatctatgtcgcctgatcttacaatgttaattttgcatgtcattttcaaatacagattcttgaaaagaggtgttaatgaaaagggtagggttgccaatgatgttgagactgaacaaattgtttttgaggacacaccagatgaaataccacatcagatatcatctgttgtacaacatagaggatccatacctcttatatggtttcaggaaacttcaagactcaacattaggccagatatcatacgtaagttctagactgtcagtctgtcatgcatttgccatctgtagactgtcttctctaatactccaatcaccttgctacctgcagtgaaaccggatgtagactacaagacaactcgccttcattttgagaaccttgcacttagatatgggaacccaataattatcttaaacttgatcaaggtgagaataagtgtggaatacaaatttggtttattctctgatggatttttttttgatagtttacatgtgaatcactactgacttatatatctatcaatttaattgcaatattttttttctgaaaaggaaatttaattgccatattgacgaccttatgttctttgttatcaatctggagttctcatatccatttcgggtcccttgtatttttttcagactcgtgagaagaaacctcgtgaatctttgctccgtgcagaattcgcaaaggctatacattatattaacaaggggctgccagatgacaaacgtctaaagtttttacacatggatctgagtaagctttctagaaggtagtgtatcgtactccaaggaaatcttatatccaagccattaggattcaagcttgtaattacttgtaaattgccttcgatgttaagtactaagtgctatttacaggaaaggtaccaatgtgctttcgctgttgaacaaggtagcatcagatgtgttggatctaactgacttcctccactgtgagataactacatcaaagtatgaggatgcatcaaggtaacatttggcctacttaagagttataagagttatctaaaattttgcctggccaccagaaacaaaatgatgttgtttgtccaaaaatgttccttcatgatgttaccctgtaacatattcattctttggattagtaaaagttgtgccttgagcacagtagaccacccaaataaggcagcttttgaaccaattggaagtaggtgctctccaatttggtcttatcttatgagctcacataacagtactaatgcattttttttctttttaaatgcatcagtggacaagaagctgttgccaactcaggtgacttcgaaaacatccaggttcaaaatttatgtgcaattaagctagtacctcttttactgcaaaagggtgtcctcaggactaactgcatagactgcttggaccgcacaaatgttgcacagtttgcgtatggcttagctgctttagggcgtcaacttcatgtgctccagctcaataaaacccctacaattgaattgcatgctcctttggccgatgatcttatggatttctatgaacggatgggtgatacgctagctattcaatatggtggctctgctgctcacaacaaggtacttgcttaattctatttactgactcgttggagcaaaatttgtgcttcctctactgtgtaatacaattctcaaacaaatgcatctttcattaaacccttcttcatattcttattcaattgtcctatttttgtttctttcaaagcgatttttcttcttaattggcggtgaagtcaatagtcataatattatttttcttctaaagatttttttttctttacaccccaaaagtccaaacttctcttttgagttattagtctgactgtctgagtactccatactgctgatatatgttacagatcttctgtgagcaaagaggccaatggaaggcagcaacacaatctcaggagttcctccggacccttcagcgctactacagtaatgcctacactgatcctgagaagcaggattctataaatgtgtaagcttctcatgtctgtattactctatacatgtacaataggcagaattctcggagaaaattatatgacagaaccatgggagctgttggtatcgctctagtatattaccacaaacgggtctgtctgactttagaattgcaggttcttgggtcatttccaaccacaagaaggaaaacctgcgctttggaaattggactcagatcagcattacaacattggcaggcaaggaactttaactgaagaaactgggaggtactgaagtcaatttccattaagaaatgttgttcagaaagctgtaatatgcagtacaacttcagcttatatttagacagtttaccagacaatcatatggaatatgaaagattccaagtaaatctgacactgttcacttctcaatccatgttataaattcaaaaggtgtcaccattttattttgctctagctgcctgtttgctcgtttggattgaacaatactaaaactttgtcttggaactgcaaattaataagggtgtgagagcctttcattcacacagagaacttatatttggatgttccacctagtaatgataatcaatgatctagaatataatatgttgattagcttaaggtagaacctatcttggtattaattgctgatataatgatgtgttgggttacccaagctatctagaatctggtcaattagtggttctgccaattgtactttgtttttgttatattattttattgaattttggaatttccatgtctagtttagtaacatccatatttcatatcagcagatcattcataaagaggtcgttatcggacggtaatattttatgtgacaacactggtggacctgtatctgactgtaatgttggaaaaaacaacacaagctcagaattgctcccaatgcaaccactggaggatattagagaaccttctgattctgcaccagagatctctatagaacctaacccgtgctccaggtgctctatccttgtttgaaaacgaattggtggttgttggagaacttcagattgtccatactatgaactaactgcatttttctcatgttcagtacaaactatagcacattgtctgggagacactcaatttcagaagagcggcagaattatttgagaagattgggttatcctgaattgcactcttcaaactttcttgatcttgatctgttatcatcttcaggaaattcttgtgaggaggaaatttatgagaggtaacacatctgtgatttatttgtatatccaactgcacaaattctatccccttgatctggcaactaaaggagtgaattctaggctgagatgttatattactcacactatagtattttatttcatttttttggagggaactgctgtaatggttaacggtaataagatgtttcaaactcatttacaggtcatcactcatcaattcacccatggatgttgtcagtattgaatcaactacatcatacagtgaacagggacacaatgatgaggtcagtcttttcccctcttttctttttaaaattactagaaaaaatgcccgtgcattgcaacgggtaaaggctattttaatattaatattattattattattattattatatcgagttaagatgaaattcactgtgttaaattcgcttggatatatattttgttagaaaatcatgagctgtaattaggtgtccgatcgtctcaagttagtatgtgagtttttaaagagatttcttatacgatttcttctgtatttctaaaagcgaacgaacttacaaactgactcaaaactgtctcaaatacggatttgtatttccaaaagcgaacggacttgaaaaccgactcatacgcgaatgaggtaccaaaataccggcaaaaacatcttcaatttttataatagtagagatatatgccactcaagcttgctgtacatttgttttgttccaacccagattttacatttttcaaatgtaatctatcgacgcgttctttctgccatcaggcatttactctgtacatttattgatattgaaacttttcctccttagcagggaagagatgacacagatctgtcacgctcaagcagccaaatgtcagacatccgtgactactctgaccgcttcacgcattgggtggatggcggaggcatgctttgctactagagctataaaattgtcttggtgacatctcagcaaaaggattcaacagcagaagctatcgcagctacattaaaggaaacactcgaagtcaagctacatctgctgcaaactgcaacggtctcgtgatcgaagagatcatcacaacaaatggaagaaacatcaacttggtttgcccagagaaagtgctcaaagatgacaatccattggggaatatgaaaccattctgactcggttcggttgaggtacacgattgaatttctatggtgaagaagaattgaccatactgaagacaataaataggagaaacatatatcacattctttgcaagggttagcttagttagaatctttggcaatatgttataggaaaaggataaaacagaaaaaagaacttctcaaacaaaaatgaaaaaaaaatggaaatgctaatccctgttgtaaatatgttatagtattatacatatttaccaatttttactttacttgctctctgtatggaacttgccttttcagtcttcactgtacaaaatacactaatcgttggcaacacggtaatgattgcgagacaatctaacaggccacacggtacaggaggaaatgagttgtcaagccaatgtttcagtcagcctggttgtgtgtttttttttttcctttccagagatgtatgaaattgcacctgatgcatgaactaattttcttctggggtcctgctgattcatgttaccagtattgtcttgcatgaaccctgaactccatgatgaatgggagtgctgttgcaacatgatgggaaattactatattaacgaatcaagatacaggtttgtgcaactgctgcaatactttggttgtatcttttgatttttaggaaaatcgtttggtcgctagggcccctttaatttgaaagagaaacataatttaaacttttttatccattgagcgacagcctttccactcagcatcgtcggatcaccaaggccgactttcgtctttgctcgacagatgagtcttgcagtcaagctcctttctgcctttgtacttgaggaccaatgtccattagcccaaggaaacctttgcacgccttgagtttatatgattttgaaccaatagaaatacaccccccccccccaaaaaaaattgctctttcctaggatttttcaggttttgaaatgcatggtaaatctgttttacacgtacatcagtagagtagagcccttagaactaagtttcagtgaggcagcacgtctgtttaggtggagattagaagggataaaatgcattcacgtcttgggaaattgtttttgtttccgcacaacatttctcaaactgtacaagtaccagatttgaataacaaactgagcgtatagaaccatgccattgcaccgaggaaaagattgatataaacgctacagaataaacttaggacaaaagtagaaagcttaacatataccacacatcttgccgagctcaccctcacagcattgttgttcgaaatagggacggacaaacaacacaggttcagctagaaattcctaaaaacagttgagttcatggtgtagctatagatgatcacattggattttgggtgttcattcatgcctcgggaaatatttaacttaagctgcggaagacatctcaaagtgattgcctagcctaatcccagccttgagcagctggttgagctgccgggtcccatccagtaggcgcaaccggtggaacgacggcggcttcagtggctacgggtgctcctgcttgatcccatccttcggcagcagcaactggagctgccacagaaagggagaatgatcagttccaagttagtacaagcgcttaaggcatgtaaattttacagcctatgcaggaaaacgaagagacaattgctaacagtatgagcagcaatcagcacaacagtttttttcaagaatattccaatgatatgaaatttttagcatcacaagaacaaaattcagaggtccacaacagttatatacctggttaaaaatataaatatattagaaggggataaaccacaaacctggagctgcgccccaatcaccaacagtagcagctgggggagcagccacatcagaggtccactggtcagcagaccattgttcaggtgcggtgtaatcagtgatggcagcaaagtcttgtgctggagcttcctcctcctgctccttggcctcctcagggtctctgtagaaaaacagatcaacctgcaaaagacatactcagtgtataagcatacaaaggatatgaaattatcttcatgaatgcacttccaatgtcaacgtgttcttgaagtaataacaccgcataccataacatcccacttgtggccagggaggatagtacccctcatctgcagaaccatcctagccaagagccagaacaggcacccaatgctgttcctccccttgttgttggccgggatgccgatatcgacataccgcattggggaatcggtgtcacagaaggcaatggtcgggatgtttcccagagcagactccttgattggctgcagacataattcaggataacacgatcagtaaacaatactgtacccaattcaccaacgcactaccgtgacatggtgatcattttcacctggtgatcggtccttgggtcagtgaggatgagcagacggggctcgctgaaggaggtctggagctgattggtaaatgtaccaggcgtatgccttccagcaatggcgtgcgcgccagtgtactgcgcgaacttgaggacggcgcgctggccgtaggggcgggccgactggacaatgatgtcctgggggttctcaatggcaacaatcaccctcgccgcgagctgcagcttctcccatgtcttgccgaggttgatgatgtagatacctatgaattgcagcaacgatgttcacgtattcatattcaagataccctcccaaaagaacagcagcataccttgcaacaggttgcaatgcaactatgccacacacgatatgacacgaaatcagatcaagttgagcaccatgccgtaataattctagctcacaacaagttggatacttagctaaagctaggatactaacaaagcatgaacaaaggcgagcactatgatacaagtgcacaatccacaccaatccaacctaggaaatctagtggcaagaacatggtaaacctatcctacgtaggaaatctcatggcaagaacattgtaatggctagctgtgagcatcgacgaacaagcagagccgggtgagatgcctgtaggtgggggtgggtgcatgcgtaccatcggagcggcgcttgtagacgtagcgctccatctggaagtcgcagttcttggtgccgaggtggacgtcggcggcgagcatcatctgcacgtcctgctccgcctgcgacagcgcccgcgctgcgcctcctgccactgccgccatggtcgcgtgtgtgggggtggcgcgcgcgaagggaagacgggggaggaggagaggcgagagctcggagagagtggcggcgcgaaggagaagggaggaggaaggagaggggcttttatgtcattatatctccgcccccctgaaaaccctaattggcgtttaggtgaggcagcgactctccttgggcagggtgtgcatgggccggcccaagttttttttctttttgcagaaagaccccctgttcatgtgaatttactcctttttcctcaatatgaatttgggcggtttcttttgccagcgacaacaaaaatcgatatccaagctgtttcgctcgatgaaatgatatacatatttgttttttctaagagatgcttgtggtaataagagtttattatcctgtttttggaagtcaaaaccactccccacttttgcggaaaactaaacgaaaactggtaaaaaaatgcaactactacaagccaactccgtacgaaaaaataggctaaaaccaatccgtttttacaccgaccacatacgggttttttttttcacaatgagtcccctacgcaacagaacactagcaatcgcaaaaatctgacaacgaggaatggttgtagtctcgtggtaaatggaagatcgagttgtgcccaaagccgaacacggccgctatgcaaaattttgctctgacctgataaaatatcttgccaacaatgtaatatcatggcagaatgcttacataaacataactaggcagatatgacgctcggatcgtcactagaattgacttgtttagctaaaacaggcatatcaaaacgcagtacatcacagcagagaaaacagatgcgcccagagtatcttcacgcgctcagaagttctgtaatgcaaaatctcagttggtctggttgttgactcagctaaggacagggaatatgcgagttacatgctcgaacggaacagtttcagctgtgttcttcttgagctcagggtgattgaactcgttgcgtggaaggacaatcagctgagatcgtgcacccttctcgatcacccaaccggagtttgcaatatggtgctccaggaacttgtccaatgcaagaccctcaatgttgatggcctgaaaagaaaagtaatgagtttcagccaacaagggacaatccatgtgcgaggcaaccaataacacctaaatgatagcaaaatttggatgatgatggtgacacttctggcgtaacaaatatttgtagcattagtaatatgaaacttaatattaccacgaatccttggtcatctaaagtttaaacaaaaaggattgaatgaaaactcatgctccctcgaggactcgtgtaataattaatttaaaatgacatcatttacctccgcaagaacaggcctaggaactttctggtatgtcaaggagagcacatgtatcgcataggattggattgcctgctcaaaacctgtaaagggattagttaagtaagccttcactagtgtttcaaaaaaaaaaaacacttcaccattaggtcaaacggaaagaatccatatcaattgccataagaaagtgtccaatatagcaaacattcataaaaataatccataggtagttcatgttagattaaaaagaattcctcagtagtcagtagaaagaatcaaacagaagttcgctcaagactgcttgatatggtaaccaatctctgggcatctaggatactaatacatactcatttacatgacaacgcgggcatgaacatgccacataaacacatggtaaacgtctaaacgatgataagtcacaaagttactttctaaaatatgagttgtgcgagaaaatgctgaaataaagtaatcagaaaaggtacagtttatcagtcacacccaattggccaaatcaatcaggaaaatggagggggaaataccagtacaatcatctagcttgcaacaattaccacttcacaacgtgtgaacaaaacatggctccaattccacaagacatacctggaacaacatccaatatgttgcggttcttcgacgcctcatcccaaaattgacggaacctagcagtctacaaagacgttgattgcggttaacagtggttatcccactaactgttcaacatatatacaatagtcaagccagatacatacctccaggtagtgagagagaactatcaacgtcttgaactgttcctccatttgctgaaataagaagagcatagaggacagtggtcaaaactcacatgataagagaacagagcccaacaaataaaagaactagatgtacagctataataaacacaatgtataaagtattcgggtctgttatatctacatatctaagactaaatgggcaaagattgttcccttgcacaaatatttaaattccaaatccatggtgaatatgattttattccatcaactacatgttattatatatatacattgcacatctctaggcatacatatatgataatgttatttcagggtcaatttggcaatcaccaccaaaacaaatagatcactgggtatcgatactatttaagatgcatccgcaatagcattttattagatagatagtttttgatgcgacatatacatgaggcagggaattgtttccgtaccacatgctctggaattaagaataagcataggctgaagtccgggcctggcattgccatgagagcctgtcaatagaacaacataaagagagcaaaacagttggaagtgatcaacaaaaaaccattgtttatttattaatgttaacattagttcttttctgaccttaatcaatatgcgagatacaatctgcacactcaacctttctggttcgaactgcaaagggaaacgcatcattaaataaacatataactcgagccaaaatatgggtaaaagcggtttgtacagagatggactgtcacctggtacagacgaagaagactaagatttgcatccaagttatatgtttggttggaaacctatatgaaaagaaaaggtcggtaaatttgaaagcattagaaccaaaaacttatgctggaataaaacagatgagctacaaaagatgcatgcacatactcacaatagctagagcacaaaaaaaaaggtctgttgagtttgtttctttatatgctggaataaaacagatgagctacaaaagatgcatgcacatactcacaatagctagagcacaaaaaaaaggtctgttgagtttgtttctttataaatcgtaagccaaacagcatgtcaaatattgatatgaatgtgtgtcatctgaccgaaatctccatcttgccactttcatgaccaacgacaacagatattatcaattgaaaatccatcagttagcattgagatgactgacaataagatttattgatgtaccaaacagcaaccattctctttacaagtgctgccgcttaattcacaactcctccacaacgatgtgctccactacagtctgcccgaaaaaaatacacaaatactgctatttctagctatcgccatagcgcatatgaatcaggattttttttttcataggagaatttaacgatttgcggaccatgtaaacatgagaaggcgcgaggctttttcagcacagccacggaccaatccttcgcaaaattccaacaatcacacgaacaaaatcaaacggggccgcaagtatcccatggctagggtttacctgatcgttgacgaagccctcgaggtcgttgaggatgtcggggttgtaggggttcacggcgacgagctcctccaccgtgtagctctccgccgcctgctcgctcgccatctcggggaaccctaacgcccgaatgctagagtagatctcgcgcgaaaccctgggagcggcgagaggaggagaggagagaagtggcggcgcggcggagggggaggcgatggagaaaagggttttcgggttcgtgcgaattttttcgctttagtccctcagctatccttatactcctacttcgtgtgccgcggatgcaaaaagatgctggtagaaatgcgcatgtgcccttccaaggtttggttatttcatggacacccctgctaataaccaaaggtgtggcataagcaacaactagaattgctaatcctaacaaaggtggtgttcttttcttttaaagatgaagataaagatagtattaagtgttttatgtaaaacgagatggtattgaggtgttattagttaagttttaatcaatacaaacttgatgaaaaatagattaatttgatatttgagagcaactttcatatagaaagttttcgtacgaaacacaccatttagcagttgaaaagcgtgcagcgtgtatcaaaaattttatcgaacttttgttggagaaaagaacaaggccttgccacttttgaaaaaaaaaattgaaataggagcctttagaaaaaagtggatccattttattcattccatgataccaatctattaaaagtaccatgagttcatgacgacgatttatttttggtaggaaccatgatattgatactagtaaatacgctcgagcaatcacatacgattgatgtgatgacacgaattatatttcgtcttttttacatgcgggacaattatacagatgatgaacatccttacgatcctatcacctacttcctccgtttcatattataataatttctagcattacccgcatttaaatatatgttaatgaatcaatacatatatatacgtgcctagattcattaacatatactccctccatccataatatagaaacctataactagatgggacacttcatagtataatgaatatggacaggaagcatgtccatattcgttgtactataaagtgtcacatccggtattaggttgttatattataagacggagggagtatatgaatgtgggtaatgctagaaagccttataacctgaaacagaggtagtacgtaattattaaatctatcacaattgataataacatgaccttaatttgctcatgtttgaaattttgttcccatgacaaaccatctgatgaagagctgaaaaccaaaatttagttgctactattatttatttctatattttacacaccaatctaaaatactattgttcctcacaaaattaaagcttgcaaagtcacaaggatacaagatccacacacacaatcccacaaactttacacaggcactttgcaggcttgcagcacaacgcccagttgcagctcaaaagcaagcaaggcaaacggacgtctggcccacatgtcagcctcacagtgaaggtgaaacaccatatggcatagtgcagagttcagacttcagacaagctcaaacattcagagttcagttcagcaagatcgtcagtcgagcagaagagaggcctgcctgaccaggtggcctctgcgctcgaacacctgcctcctgcgcctctcgaggtccctctccacggcggcgatctcctccatctcgcggtcgcattcggcgatcatcgccgcatactgcagctgcagcgccatggacaggggcaccatgtttctgctgctgctcgcgtcctcctccatgagctcaggtgtggcgctcgccatctgttcgtcgcgaggacactgcttgatcttgcactttgccgcgctcagtgcttcttgatctgcgacggcaacaagccaacaacgccaatacattagtaaatctacttgattcttcgaaatttgttggtttggtttgatcgagttcgctcattttatcaaccttgatcatcattcatcagtgagaatattggaatcctttctttctttcgcaaaaatcgagctcaaccgtatgatatgatgcgaacagggcaatgctccatgctacgagcctacgagccaagtttctccgccagcacacatgcaaattcaaattcaacttctactcccgcaacgaaaaaaataaaaacgaaaaaaaaataaattaaactataactagttaacgtatattcacaattaaattgttttattttattttgagatgtaggagttaattttaaacatgcatatttacaaagtgatatatcacgtattaatacatcttgagatatcctccgaggtggtagtacctgcataggctgctgcacggccagcactgcctgcgtctgcgtctgcggcgtcgacggccatggcgtcgtcgtcgtcaccggagacggccgccgcggggaggttgaggtcgatggtccagcagggccggtcgttactccggcgaggggagccatcgccgtcgcgggggaagttgagcctcgcgcccttgccgcggatgcggcgggcctcgcggtcgtaggccatggcggcctcctcggcgctgccgtacgtgccgagccacacgcgccgccccttcttggggtccctgatctccgccgcgaacctccccgacggccggcgccggacgcccctgtacttgctcttcttgctcgccttccgacgaccggccgccgccgccgccacgcgccgccgcggcctggagctcgaggagacatccgacgaaactgccgccggcgatcgatgaaatcaacagcaggagaagaaatcgtgtaaagttcaggttgccgtcaggtgaaaatccttcaagaaagcaggcaagatttctccatctcatcgtacaagaaaacgaaggtactgccttcgacttgggggacgacacacatgacacggccaaactctcgtcgccatcgtcggaaagctcgaactcatcgtcgtcgtcgtcgtcctcgaaaagctcgaactccgcctcgaagtcgacgtcggacttgcgcttccgggtggttctcctctcggcggcggggggagtcggggtcaccggcaggagctcggcggcggtcagccgccggggcaccctcgccggggtgaaatcggcgaggattgcaccgccgcacatggcgcggcgcgctcttctttctccgggagagacgtcgctatggcgcgacgcgggagagtggtaaatagaggaaaagtcgtcgtcgtcggcgtcgccgtcgctggctgatgtggggatgggctgtctagtctccgtgggccgctatctcccgatcttgtgggcgccgaagtctgtgggctgcctcgttgtcaattcgtctccttaaaaaaattgtggcaaaagttggttgcaggttaaattgattggatattcgatgttgtgaactttactgggataaggacatagactttattgggaaaaaaaggatagggtaatattgtacactagcatccatacttctcacctcatttaattatagccattcatctatttccctttaacaatcacacctctcataactcatttgccaaacacacctataaggttcagtagatgtggagattttctgggattaagggttcaacaaatacaatagcatgctataaactactccatctgtcccattttaaatgtaattgtgggtttatgcgcgcaacgttttatcatccgttttatttgaaatatttttataaacaatatttttattattattatatgataaaacatgaatgatactttatttgtgacttattttatttaattttttaaaataagatggacagtcaaacgttagatacagaaacccacactattctactgcaattaaaatgggacggggggagtaactacaagcgcatgtgaaaagagagagagaagaaaatcatactagagtatagatttgtagccagctgcagcatggatcttattatgtgtttatgagagatggaccaatggcatccctttgttctaaatgagctagtatacggaaattttccgaagaaataaaatcctccaaatttcctttgaagtgcctttaatccaaaggagtcctattcaaggagcatttgatgatatgaatgaatatacaacaattgtaaatcttaatgctcttagtctagtcactaacatgtggagctcgcccaaacactgtccaatgtccaatggcaaaacacacagtgatgtcttaatctctctctctctctctggcatgtgagcattatgacaaaactcaaaatcatatccacgtgcacaaagaaaggttttctgaatataccctccaaatgatactgtcaaaatcttgttagaataggttggagctaatgtgaaccggtgtagatgctgtcatgaaaagagtatactttagtatagcacaaaacagtaggaaagaataccatgggctcttctttcagcccacagcctgtctttagtgtttacccagggttggttatactcccacagacttgcataaagttcagaatttggaagcatcaaaccatgagtaacactagtataagaccagccgtttgtcctcatttgcagaaagggttagaaacccttagatttcatgccatcaagcgtaacagtgtaaccccaccatgtcatttctttgctacttatagcatcccaagttgatgatccatttcatgttttctctcctttttcagatgcatactatgatgtccaatgtgggtgtctgaactgaaatctgaactctgaactctgaaggctgttgtttccatcagggtgcattggttcagcagagatcggtgatctatgttttcatatgtgagtgatttctgttttgtttttgaaaggaagcgtatatgagtgttcatctatactcttcttttgcttttggtgaagttttgttaacggagcactcagtactaacaaattcttgcacaatgtttgtgtgttgtgaataggcagttggtcacgttctaccggtctttttcgatggaaatgaaggtaattggaggagttctatctgtttgatggaattcagaaccaaaatccgaattccacaaaatggctagaggaaaatttttagggctatttgcaattccacaaccataagcatggccaactggtagttctccaagtaaaagaagttaggagctggttatgatggtactaattattcagtttcttctattgatcctgaaagttctatgccaggataagaaaagcttgtgcaaaccctccaagccatgaaaacaattatcatcaagagaattgaagattctattttttttttcttaggatctgcagggaaaattattcagatagtggaacaggttcaagtagccatttgaaactcaacacaactttatatcaagaacaaatgaacaatgaatggtagatccaatcttcaatggagaatcatggaccaccgaattgggctatcttcccgagctatctacgactacatgcatagtataatagatgcaatcatgcaagtgtgcaactagtagttttttttttctgaaggagatgagattaggtatagcatgtaatggtcctggtgtataatgccatggcacactcaacttgcatttaaacaatgctagtccctgcagaccttgccaagttctctgctcatcctcattaggtaatttgcctttgcttgctgcgtgtgcgcacctaaacttttatatttgcttgagaatcctgcaaccccaacttaatttggaatttagttgagcaaagtcactgtcatggcctcatctaggtaagaaagataagagcaatttgcgcaaattgccgactaaaatatcactaatcaaatcgcaaaaccacggtttcataaggcgcccaccgtttcgcgcgtcggttttcacatccctgtagtagcggtactgttcctgaataaaaaaacttgctgaaaaagacagatttattttttttttaatttttgcaagctgcaacataaaacatgacagatttttttttaaaaaattttgcaagctgcaacataaaacatgatatgaactgatcaagtgttgtggcaaacaggattgccagcagataggaaaaccgtacgggttttcagaaaaaaaggaatactgaacaatggttttctgatcatctacctgattgctgtttggcaaatgagaaattcagacgataaaaaaaaacctgtctttctctccctctattttttcagcagttataatccaaacaaagcaaaattgcagttgtacaaaccaaaatacattacgactggactgaatccagcaaattatgatattcttacacgatccatctcaacatgacagagatcaaatgatggatcgatcagtggtacataaacaccaagaggaccaggttttcatagacttatttgacatcattaacaaccacgaccacgataattgacgacgatattgccgacatgatcgatttcataggactatttgaccagcagtacgaagaccccgtaaaagtagcccacaaattaagagtacataaacttaatatatagttttgatcataagatcggcagtagtacagattcagaatctaattgacaaacacaaacaccgcaatataattcggtaatcaagcaagccatgatatcagctgcaccccatcatcctccggttaaacattcatcaacgacgacgtgattaacctgaaccaagaaatggcatggtatctgatcaagatatataatcctgatgaacagatggattttaagtttttaactgaatccattaaaatggaagtgaattcagatgcttacaattgagtgcacaaactgcatcaatggaggagtacatcagaaaagggcgccgtcgattgggaagtcgtcgaagctccacaggttgacgccggcgttcatgtcggtgttcgcgctgttggcgtcgccggcggcgaagaggctgtcgatggactcgtagccgtcggagtaggggagctggaacagcatgaacgggtcgaactccagctcgtcggtgaaacccagcgtgtcgctgccgccgccgacgctgccctcggacgagtcgacgtcgtcggacctcgccttcttggcggggctcccgccggactccgacgtggcgacgctgtcggtgaaggagctcgtcatcatcatggccggtggcggcgccgcggcggtcgtcaggtcgacgaagccgttggtgaagaaaggtagcgcggtctcagcaggcggagagaattc

SEQ ID NO: 5529 - DNA, 39839 bp, Oryza sativa
gggggcccccgacgccgcctgaccccgctcctcgccctatccacgctttccctcgtcacggccgcgggaacgatctaccacatctccgcgtgggacccgaaggggaccgtggagaggtccagggcgtccgcgccacgcgtggtggagcgaatgcagcacacctgcgcggcgggaaggtgcttgtgcaggtcgctcatgtccgtgctgtcgtccgccaaccacgaggtgaggtccgggttcgagctccgcgtcgccgcgctgctcgccgacatcgcggccgccagcgccgcgcgccgcgcggccatcgtgtcgtgggggggcggcgccgtcgtcgactggctgctcgagagcgtcgtgcggcgggccacgcaggcggaggccgcgcgggcgctcgcgcacctgctggccgatccctgggttgcgcctgctgtgctcggtcgaccacgagcggttccctgcctcctccaattcatcttctcttaccagccaaaacgcggcaagaaggtaatgtcctgtcaggtgctactcttgaattatttgctttgcttggctgccgtaattgtagctttaacagaataaattttgcaatcagtttaaattattcgagcatgccaatgtagctggctctaatctactaggtgattgttgttgtaaattctgtccaatctgcaagataaagagagaaaactctgaatgtttatattgaattgttagtttctttctttttagttgagaattaatgatttggtgtagcttgatttgttcttgtgttaggaatttcagtattgatatgctatgttataggaatcagatgttgagatgtgcatcagtacagcctgattataggtggaaaacaaaatttgcatcctcgtgtgctctgaggtttctggcatttttatgttttcatcccatgtctttgtgagcatggaacctttggcccttcaggttttcagattgcaaactcttaatatatgctattgatgttaagataaaagatctcatgggggaatgagttatgttatgcacctgcatgccagttatgcaataatgcagttatgtctaatggattatcaagaccttggagttggtaaatataatttattttccttgatggcttggtgatctcagctctcctataggcaatttctttttttgcttgctggcagtgctttttcttcagcttatctcttctttttttcccctatacatgtagtattatgtttcatgcgcatcttaatctagcaatgtaggtctattaaaccatttagattttccagttctggtttccttggactttaacacaatatgagttgtttgtacctaatatattgccctcctgttaatacagaactcggaatactcttcattcaatgtctcagaccattctaaaggaaggagcatgcttgttgctgcacttatggacatcatcacttccaactgcgataatgcggattattcatcatttcagcctttattgccttcagatgctgatacaagagatattgcggcagccatcgaagtcattgagcaaggggggatgcattttgatgaccatgatgataataacagtgatgatggtgacagtggattaaaaggaatagggattaaggtacttggtgggactactgtcttgggattctctagagaaataaactcattggaggtgggcaactcggatgatggtattgttggagcttcgaatagtagaatattgatgcaagaaactgctactgattctccactagtggagaagctaagttctgctgctgctccaggcctctgggatgatttgcagagggagcatgtagctgtaccttttgctacttgggctcttgctaattgggctattgcatctgatttaaaccgttctcgtattcaagaacttgacagtgatggacatactgtcacaactgcactgaaagcacctgaaagaactgtcaagtggcatggagccatggtggcgcgagctcttttggaagaccagagcttgactttggctccttctgtccctgactggtgctcaagtcttcttttgacagcttctcgggctgctgagaatggtgacatggcattggctcaaatgtcactatcaactttcctattatccatgataaggtgtaatgagtcaaaatttgtgatcagacagaagggtcttcatcttcttcgtagtatcgcaaaaaagatagaaaatgagaatgctcagagcaggatgaaggaatcattagcagtggcactgagtttgctctatgctggtgaagttccgttgtcacttgaagaaactcaaagatggtccggcattcttcttcgttggctctttgataaatctgtttcagaaactacaaatctcacagctattaaaatcctttcatgcattcttgaagactatggaccagcttccgtaccaatttctcagggatggttggctctcgtgctttctgagattcttggagataacaagacacagaatttgaaaggaaccacccagcctcaaccagagagagtgaaggtaagaatcttgttattgtttttaataaatatatatttgaatgcgtgtgccgccaactgttcttagtagttaagttggttgataaatgagttttagataaataaacatgacgataatcagactgaaaatactagaacgtcaagaacttaagatcaccagtataatatagtatgtcacatgttcagatttatgacaagtattcctccaccgccgccaccccacgcccccgcaagtgccgccccaccaccgccaccgccacccccaaggcgacgacaccgaacgtcgtcgtcgtcgtcaacctcgtcgacaaagaggccgaggtcagcgagagctccggtgccagcagcagcgcgctgccggacttctcgtggcagggcatgtcggcgtcgtccgacgacgacgccgcggcgcagcaggcactcctcgacgccgccggcggcgccaagaagcgtccccggagcgagccccacgtcacctccgacgacgaagtgctcccggcgtcattcgacagtgacaacaacaccgccgccgccggcctgctcccgctcgacgatcctttcttgttcggcgaccagttcggcgacctcaacggcggcgcgttcgcctcgctcatggacgggctgttcgccgccggtgaagcgaacgtcgccggcgagagcgtggggctctggagcttcggcgacgactttctcaacgcgtcgtactattagctagggcttccatagttcttgtactttacttgtactgtactgtattgtactgattgttaacgttgccataaagcaatcttgctagtttgtaattctgcgtgtgtggtcgaaattttcatgtttgtgttgtttgaatctgtagttgtcgtatcgtttggggtgtgtttgatttgaacctgtgtcccttctgaccttgattcacctcaagcggcaaaggagccctttaacatgtgaaaattttgacagaaaccgggcctgatggactgcagtaaaaacaagagattcagcgtgcatgtagctgtagaaaactatgatccaacaggcccaaacaacccaattaatctgaacattcagaaagacaaatatggtcaattatccatcatggcagtaaaaaagataggaaattagtcccatggtgttatgtgttattatacttgtaggttgtaattcgttccttctttattattattgtattcaaagctacttggcttcgacttgcaacattaagggcttattcgtttttgaaggattttaacacacatgaataagaaaatgtggaggaataggaattcatgcacacttcagtctatatgaattttccaagagatttgagtggataaaaaattccttaagtttcttctctacaacttgtaggaaagggaaatttcctttggtttctatgggccggttcaaatcaacaagctgctatttgtggctaagaaaacaggtgaattattagcacatgatatatgtgctattataaattttaaaaatatatttatttgatttttttccaaaatacttttacatatatttttttacacaaaacacattgtttatattgatctagggaacgtgttatttgaaaacgaaaaacaagaaaattgttatttcgagctgccgaaaacgaaactcatacttcttcgttttcatggagagatagatcagagagtttcggccacaagttccatggagctcgtactgcttgtgctgtgtagtgtgtactcctacttattcaattagggcctgtttagttcgcgaaaagaaaatttttgggtgtcatatcggacgtttgaccagatgttggaaggggtttttgacacgaatgaaaaaactaatttcataactcgcctggaaaccgcgagacgaatcttttgagcctaattaatccgtcattagcacatgtgggttactgtagcacttgtagctaatcatggactaattaggctcaaaagattcgtctcgtgatttctcccctaactgtgcaattagtttttaaatttatctatatttaatactccatgaatgtgtccaaagattcgatatgatgtttttgggaaaaagtttttgcgaactaaacagcgccttagtagtacaacttgcgacaagttcttttgctcctcaagtacaggcccaagttgagtcacaactcacatctcacaagttgcgtggccacaagaaaaaaaaagcgtcgggaaaaaggtagtgtctagtgctaacgacttggagcagtaatatgcatttatgctttcacgtcggtaagatgtaatgggtgcctaacctaggccgtgctaatcctatctgttagtttggccgtctttagattcaaaattttttcttcaaacttctaacttctccgtcacatcaaatacttggacacatgcatggagcattaaatgtgaacgaaaaaaaaacccaattgcacaatttgcatgtaaatcgcgagacgcatcttttgagcctaattacaccataatttaacaatgtgatgctatagtaaacatttgctaaataacggattaattaggcttaataaattcgtctcgcacattacaggcgaaatttgtattttgttttgttattagtctacgtttaatactttaaatgtgtgtccctatacttaaaaaaattttagcacacgaactaaacacatcctttatctgttgactataaaccattttgtgccttttgtgtgtgcattggtccatgacacatggatgaccatagtgagattagtactgctgaaattgtgttcatctaagggggaaagagggaaagaggttgttgatcagagtgagaggatggggagtctaactgtctacgctctagtacttccttcgcatgataagttaatatagtacggaatataatatatcccagtactataaatctggacatacatccgccagatttgtaatattgtgatctatcacatctaactagattaatttatttttggataaagagaataagaaaactagactggaaagcctaacatgggatcttctgcgagaaatgtggttttctacgtggtttcagcggtttttgccgcggttttacgtagttacacgtttgcgtcgttatgtaaataatattagggtatcgtgtttcctaccagaacaaaataattatgtaatatgtgggtgtttactttccagctcatcatatgatcaagcatcacgttatataatactaaatgattgatcttttttatgagaaaccacaccatcatcatttggaaaaccaaggttgaaacagatgttgcggttgtgttgatggatttgggggtcgtgcacacggtgatcgatagatgcacgtcttcacgcgctaattatttttggtcaagactcaagagagccaagtatagaatagccgacagaggcatgtttggcttaattaggctgagaccatgacaatttttcagagagtttgctgatgataatatccgtcgttttagatgcggtaatatggtacttagtaaaaaaaggagccgtggatatgatgatattatcaaaagaagtgagcctcttaagctccgtagactagttagtttcctgacatccattaatttgctaagtcgatgatgtgggagaacttagcaccaaattgtctaatttagagttttgactacaacagaaaatgaagtggcattttattttattccggttactttgtttatcattatctctaagaataatttattgatatatgaaagttatttcagtacaatcgtcaaaaaatattttcaatattatgattttactagtttaaaataattactcggaatccacgcggcgttgttatagtacatgatgtggatggacgtgtgcgtatatatcgacacggtgcgaaaattgcagtagttggtagtagtatgttttaatatttagaaaagtaaataaaatatcacgagaatagaatttaaatgtctaagttctggagatggcaccgtccattttcaaaactttttcataaacattatgctgatcactgtcatgtcggttagctgtacgcctgtactatttgtctattttcagagtgttttaatggcttctagtactattttttttattttcctcaaaagtagctcattttattaattatactcgtaacatattttagtcaaactttaccagacaatatcctaacttcgcatttctagctatatgatactatacgatgtgattttcggaagaatacactcgataaaacatgtgggctgacatgacacggcctgtccagtgaaccatatctaatcgggcagtgcccactacccagacatgcatattattatttagggttatttgtaaaatttgtccatatttttttaattttgcaagatgctactcgaaagacagttctagtagtatttttacaattttttagtggcagtgttgcaataataattaatgatttaaaccagtggcaaatttgtaattgcctttattatttattatccaccatctcaatcatatactccctccgtttctaaatatttgacaccgttaactttttagcacatgtttgactattcgtcttattaaaaacttctgtaaaatatgtaaaactatatgtatacatataagtatatttaacaatgaatcaaataatatgaaaaaaattaataatatttagaaacagagggagtaataaataaaatcatgcaattccgaataataaaataaaataaaaatctaccatcccaaaggtgtcctatatgttccgtttggaaaatagaattaagctatggatactttcttttttcagatttgcaccgttttggagggggataggatatgcagattgagagtgcttggcgaaattactaaattaccctcgccgtttttgacgtattgttttcgtgagttatccgttagttcgcccgccgccgccgccgccgatccccatccatcccgcgaggcgcgagcgagcagggcgccgtcggcgccgtcgttcgtcatgctgcttccgccgcatccaggtgagcacatcctccgccaccgccgcctgcgccgattcccatccatccatcgctcgagcgagcgagcggggtcgccgtcgcttgtcctgctgcttccgccgcatcccttacgacgcacatcctcttgtctcatctccctctctccacccacgcaattttttttctcgaatttgcgttaaccctagcttcgttgtagtagaaatttgccttaaccttaatactaacaaatgtttgttccgaaaaaagtttggggttggggggggggggggtggggttcaacttaacccctatgtcccatgtcagatccgccactgctttattgtgtgtggcgcattgtctcttagctcttttaaggaaaactaactatcgttctctatgaaatctggctcgcattttctttcaaaaaatctggctcgcacgcactgctggtgtaaatatgatgatacattgtaagaatgaaatatagagttattaagtttagtttctttagcaagttattaatgattcatacactgtttatgagtgtgccattttacccaggtttccaaaggctgcttgctggcacagcttggagaacgtatatggttagaacagtgaaaaaggctttaaaaccaaatgaattattctgtttcctgtcatttcctttaaatatcacgcgatccaaacttctagccctaagtgtggtaagaaatcactgtaggatgatgcatcctcacaagccgtagagcagcttgggaaaaactggaaatttaaaactgtcttagctaaaggaattcttgctgtccgcatattactttcatggttaatttggtgtcaaattacatgcttatcagcatttttagtgctatatgtctggaagcactatatacacaatgataaatgaggtaggtagtataggctactagacctcttgttgatgtctagttccattttgtcatgaataggaaatgctagtgcatcaggatagtgaatattcctccgggagagatcagacggtgacatcttgaggtagaagaatgataagtgaaatctattgaataacacatgaatagaatttcactctattagggtccactaagccaaggctagatatgttcttttccatagcagcttgaaaacaccagccgttggttatctgttatgtactataatatatactgcctctgtaatgttggtacctccatttgtaaacatgatggtttggagatgggtggggtccccaataataaaagactatgtgaataactcaccttttatgtgaaactaatggtatcaatttcacatcaccatcttaatagaactttatatatcagtggttagagttaaagaagtatatctgtggagattctaaatcatcaatcattaactctttgtactttgaaaacagacatatggatgtgtttttgtgcattgaaaacctgtttgaacttaattagatgatcggttggtactgttcttgcaagtttccttagccccattcttcttgatcaaggttttcatctacctctatcttccaggatgcattgtattgaaaaaatgtttcaaatctacttctagttaggtaggtagacttccagcctttattttcctctctttttgctatcatgtttaagaactcaaagcacaatggaacttgtggctaaaactcacagcctcactggcagcgtgatagaaggctaactgctagtgcaagtaatgctgagagcaaacattatatgagtgggcatggtatgttttaccagagtaatgcgcttgattaatgggctgaaattgtaatgaaccttcacatggacatgaaacagaccagctgaaattgaatggcttcttcttccctaaattgctttcttgatttccctattacagcttcctctgccctgcattcatccagataggattaaattgttaaggcacatagcaggtctacattaaatggcccatacattttatccaaatcttacccatatgggtcagatgtgtatgattgtatgctctgatctgtagcggcttatatttttccttttagttaattgtaccgacaagctgggctccacatgatatttatatgttttggtaatgcaaccttttcgtaaaagagaactattcgttattttaacatacaaacacatcctttttcatttcattttttagaagttaattacgtgtgaatgatcatagcaggtcatgtatgtgaacactgctgactcaacatgaaactgccactgataaacaaatatagaaagaaggaactgcttatggcactatgatttttttaaaaattttatgcactttatgtacacttgttttcgcattatgggaatggggtgaagtggaaaaagaaagttgtgccatggccatctgtatgtccaacttctatgtatctatatatcttgtgtactgcgaacccttcaatctgaaacatttagttttcgtccttattcattactatgctattgtttcttgggtttcaggcagaacattaccagcctatcatggagacaacagatttcttcttggagcttgtttcctgagtaaactgcctatgctgcgcccaatgaagttgtctttggtatgcagtgctaatcccaacaaccataggtcaagaagttcggatatcacacgccatcagaagggtggatcagctcggaggaaaagtaagccttaccaggagaaagatgactctgagaatattgatgaattcgatactgatattatgtcctccaaaaatggaccacccatctctttgacaagcaattcccgtcctcaagcaacatcagtcccaggggaaagagagaaggagatagtagagttgtttaaaagggttcaagcacaattgcgagcaaggggaaaagggaaggaggagaagaagcctgaacaagcaaaagcacagggtgagaggggcagtgttgactcccttctaaatctgcttaggaagcactcagtggaccaacgaaggaagagcggtgatgagaaagaacagagtgttgaccaaacaaagagaagcaatgaatctggaaataaacaaaattcaagcatcttcataaagaatgacactcaggaagaacagaaaaagccacatcctgcagccttcaaaaggccagcttcaaattttaggcgaagatcccctgttcctaatgtaaagttccagcctgttaccaatgttgatgccgaacgagtcatcaataacatcaatgatgccgtacaagaggctaagccaactttggaaaataaggctgctacagatgaaccagactcggtttctacattcgaacctaattctgtaatagaaccagaaaacctatctttggatgaccttgatcatatttcagatgatgaacctgatgcttctgatactgatgaacccagtggagaatatgatgagccatctttgcaaatcccaagtgttccaattattgatgaatctcatgatacgactctgaaatcttccttaggaggtcctgatttaagcactttgaaggtcacagaactaagagaacttgcgaaatctcgaggaatcaaaggatattccaagatgaagaagaatgacctggttgaactgctgagcaacatggcttgatccatcagcagccctgtcaacttggctctgttttgtcccttgttagtcacattgtcttgggcatatgcactatcttgccattcctatcttatctagatgaagttcttttaggtagaaaactgtaaatgagcaaggtaaacaatgttctgttctggttttatcgttgccctttctgttacctagcctctagttaccattgtttttgcgtaaatccttcatcagaattgaaccctggattggccataagactggcaacgattcgacgtcatgctgattatgttctgatgtgtagtgttctattcttatctctgttgtttctcctttctcatggcagctcttgtctgctgttgcatggtttctctcgtttacatccatggttgttactgaacgtttgatgcacaagtcttttgtgtgttcatgaaaagaataagcagaagcaacctataatggatttctttggtgttcaatcgtttactgtctttgttcagagccaaggtactgattgggaggatttcctgggaattgtctgcctcccgattatcaattcaacaatcagcttcattaaggaaaacaatgcaggcgatgcagctgctgcactcatgtcccggttggcgctaaaaacaaaggtttttttttctgaacagaaatttaaaaattgcaagtgaatccattgtgctagtctgatcttgttgtatacatggatttgctaccaggttcttagagatgagcagtggcaagagcttgatgcttccacattggtacctggggatataatcagcatcaggtttggtgacattgtccctgcagatgcgtgcctacttgagggagatcctctgaaaatgaattgccacacgccgttcatgcgaaagatgtcgatcactggaatgtcagactagttgctccgtgtaaataatttgatcacatttttgtttgtccttcatcttgtagtcagctctcactggtgaatcccttcctgtcaccaaaagaaccggggaccatagtgttcactggctcaacatgcaagcatggtgagattgaagctgttgtcattgcaactgggatacactctttctttggcaaggcagctcatctagtggactccactgaggttgttgggcattttcagaaggtgattcatcaatctttagactgtaataagattataagaacctcacaagtggatgtgctgtaagctgtttctaaccactgaattttctgattcttacctccataggcaacttctgtatctactcaatcgccattggtgtgattgttgaggttataatcatgttcccaatccagcaccggtcataccgagatgggattacgacttccctctgtttatggttctgatcatagccatactaaatgatggtgacgatcatttctctctgaattttactgtttctgaagcataaatatataggttcggcatctgctttgatcaggaactatcatgacaatatcaaaggatcgcgtgaagccatcaccaagcccagatacttgcagctggagttgtcatcgtagcctaccttgcattggtcaccatgctgttctatttgtaactcctcaataggcttcatgtctgcacattaccagaagcaaattttcagatgattgcataaaatagataacaaaacaaagtatgatgatcagcaaggctgatatcaggtaagcatacgtttaacttcgtttgaagggaatgaggtgaatggttgctgctgttcaaagtgttcttccattgcagctttgcgttttcttctccttatcacaaagaatgcaaggactgccccagagcttccaccaaaacatgaaccaccattgtcttgacctgggctgtttggacggtttggtggaggggggagctgtatatgatggaggtggtggatttccgtcaattctgtacacaaggatcataataggtcagtgtacaactctcatttttgcatgttcataagccaggagaactcactgtagattgtttaacttcttaatttgactaggaatccagccagtgaaatgattttttgcaacattcctatataggaaagcaaagatatgagatgtggtactgcacgtgcaaataaaatattaattacttataggttgatttcttacagatcatcaagggagagattagcaaggacattgatataaccagtaaatttattgttctgcagatatctgagaagaacgagtatgggatcacaggcatatcactctaaaaagacatatctatgagataaaaataatccaaaaataatcctttttcttacaatgcctgtaatcccatgctcgtagatatgcctgtaaacccatattcgtagaaatatctatttttatctcatagaaatacacacacacatacatatgtacagcattcattataagaaacgtgataacaaaaaaaaaagaaagtcactttttcgagttgccgaaaaaagaactcatacttattttttctgtagagatcagcgagtttcagctactagttccatggagctcgtactgctcgtgcgtgtgtacttcctttaggtggtataacttgcgacagaggttcttttgctcctcaagtacaggcccaagttgggccacaagttgcgtgcccacaagcaaaaaaaaaaaaatcacctgtgaaaaggtaatgccaagtgctaacgacttggattggtcgctgtaaactcacgaaatgcatagtaatatgcatttgtgctttcacgtcagtaagatgtgatgggtgcctaacctaggccgtgctaatcctatctgttagtttatctgttgactactgtgcatcattttgtccaactttttttagaattacactattttgtccattttgtgtgtgcgtgcattggtctatgacgtatggatgaccataatgaagttagtactgttgaaattgtgttcatctaacggataaaatggggaagaggttgctgatcagtgagaggatgggggagcctaactatctactccctccatcccataaaagaacaatctaagatggggcatgatatttcttagtgcaatgagaaaacgtcacatattatcctatgttgtttttttgtggacagagaacataagaaaactagagtaggaagcatattctggaatcttctgcgagaaatgtggtttcagcggtttttggtgtggttttacggtatgtgcacgtttgtgttattatgtaaataatattagaatattttgtttcctataaggataaaaataattttgtaatgcgtaggtgtttacttttcagctcatcatatgatcaagcatgatgttatataatcaaatgatatacccttttttatgagaaaccacaccaccatttggaaaaccaaggatgaaacaaatggtgcaattgtgttgatggatttgggggtcatacacacggtggtcgatagatacatgtctgcacgcgctaattatttttggttaagtgagccaagtatagaatagccgacagaggcatatttggcttaattaaactgagaccatgacaatttttttatagagtttgctgatgataatgtttgtcgttttagctgcggtaatatggctcttagtaaagaaatgtaccgtcgatatgatgatcttttcaaaagaagtgcgcctcttaagctccctagactagttagtctcccggcatccattaattaatttgctaagtcgatgatgtaggagaactttgcaccaaattgtctagttttgagttttgactacacaaaaaatgaagtggcattttttttatcccggttactttgtttatcattatctctaagaataatttattgatatatgaaaattatttcagtacaatcgttaaaaaaatgtattttccatattatgatttaccaatttcaaaaaaaaatactcgaaatccatatgacagtattctagtacatggggtgatgtggatggacgcgtgcttcatgtatctacacggtgcgaaaattgcagtagttggtagtatttaggtttccatatttaaaagagtaaataaaatatcacaagaatagaatttaaatgtctaagttctggagatggtactctccatgttcaaaacttgatcataaacattaggcttcagggtgtcatattggcccctaaattgtttccatgaagagcgctgatcactgtcatgttggtaagttgtgctatttatctatttttacagtgctttagtggaatcttcttctagtactattttttattttcctcggaagcagctcattttattaattatatttgctgctttgccaagtaagtggagcgtggtgaccacgagccacatattttaagaagggagcattgaacttaccattcaaggatcgatcgcgatcgattcctaaaaaatagccataagtgcagaaaagcattgggaaggagacatgcttaaaaaaatgcggatggtggataataacaatgctaattagcctgtcgtctgctctaatccctttagctttgttgttgatctgttctctagctaccttaaactgaatttttgttgttattggagagcttaattgttagtatttgtggaagtgtgtgacatcattgctgagtaatcaacttaacctatagcatttaggatcctttgtggagggaaattagtaggcttgcctgaagtgttaccccctactccaccttctagctatcaatcattagtttgttttactagtaaccacgcactccatatcacttggtttttctctccaagttaaactttatttactacaacacctaaccagtttttattaaatgtatattaagaatatttgtcattatatttattttcggttagaaataccgctacatctttatcctcacaattaatatgaacagaagtagttgtcggtacctgataaacctaattaaagataacatgtatagcattagcttgtttaggtttaccggattattattttcatcgtttatttattggcttatcaggctaaagtaaatttaaaattataacttaatcttagagatgattatttttgggtcatttttcatgttagcctatttattagccctttgtttttagactgccaataataacaccgatataaaatttttacttataaattatttttcgatgtttaatgaaacttaccagagcagtactctttaattaactacctgcctttcttattacaagatcaactaaaaattttctccgcgtaaagctaaagctcagtgctgaatctacagtgccatgatcacgcagaattggtgcgggataacttcgtggggattcgcatgcaaggtgataattagttaagacaaaaaaaaacagaaagcaaagttttagtggcacacctagggtgtatttagttcacgctaaaattgaaagtttctagctttatatgtgtaggaaaattttaatgtgataaaaaaattaaaaatttattgaaaaagtttggaactaaacaagtcttaaacaaaggctaaccttatctcgcgcgaagacgcaattaggcgtcctttttagagttgattaatttttggggggccaagccgagcggagtggaccgtgacgaggacggaggatgcatgtgtccgccacaagccagggagaggaagagaagagacgccgcgacacgacacttgcctagttctcgtcgtctacgcatgcggcgctcgtaaaagttgggcgttctccccgagtactggcattatatatcagcagtaatttttaggtataaattgttttaaaatatcagataaattaatttgtattcatatatctttacattctttaacgtatgctaaaaagaatttaaaaaaaaagacaagcaaaaatatatttatgtgtgtgtaatatctgtgagtagcgggatttgaaccatgatagatagtcatgcgagcacaactctaccacctcactattagtgttttctcggaacttttctttatacggtgtcgttcccaggttcttgccttcggttacttcggatgtcaaggatcctcggatttggccacatggcacctgtagttctagctagagttgaaaaaaaaaagagagatcgagagaagagcacaataggagtagggtataaacggctcgaacctatataaactgcttgcctcccgctatgtcaagcatccaggacatagataatatgatttatctaattaactaccagatattttcaacgctggaattcctaataatttccgaactactataggtatatagatttgatcactatatcgtttagatctttcaattatgatgaacaagatttacatgtgtttatattttcatgtaatttgcttgtttagatttttgttagtcttttttaacaaaatatgagcgctcaaactaaaattacgtgaaatcaaaattgccaagtactatatgtaaaacgacgaagggagtaccaagtgaatgcttccactaacacagggacccaacgatactacgataaattcccaaccttatcgctacaatcaaataagtacttgctccgtttcatattatcgttccactttttttattgttaaattttattgtgtttaaccaagttatagaacaatttatcaacactcaaatatcaaatcagtttcattaaatatagcattgaatatattttgataatatgtttgttttatgttaaaaatacctctatatttttctataaatttgatcaaacctaaagaaatttaactggtatatataaaagccaaacgacttataatatgaaacgggggagtagaaatttaactggaatgatcttttttttttcaagtcaatagatcacacttttagaacaccatgttggtcaccattcacggctgcaggcagggcatgcattgcatggaccagcaaaataatatcttcccacttgggttgaatcagtgcagtgtacgcatatgcatgcatgagtctacaaatatcttgccacttggacagaagattagttcgtgtaggccacgcatctatccatccgtagttaattatcatgtttgagctggcctcttgagtgtgccgatatagatctctggtctatgtgaatctaatgagaggttgagaaagagagtaggtttgaaggaagggagctctgctcctatgattatccattcaagtgcttggtgtgaaagaggtgctcttctatgagctgatcacttcactgtaactcaattggggaataagatggcattgtattaaaaaataaatcaagacatatttctttgcctcaacggcgaagccgggatttagacatgagaagggactactccatccgtctcaaaaaaaaaacctagaactggataatatacattataatacaacgaatctggacacattatagtactatattggttttttatggaacggaggagacctaatacaccattatttaggttaattaattaattagttagataactatgtcaaaaaaatttgttggaggggacagaccactccgcaattgtttgcctgttagtatattactagaagaggtaaaaaaaagtcatcatactatttgttatgaaggtttaatgtcaccattgtaatttttattttaaattctagctcgtccagaattgcattataaaaaaccaccagtttatctttgtatcaaataaaacaaaatgtcatatgcgctcgagaggagaaagggtgatactgtgagaggaatatgtagtgcaggtgcatttggtgtgtgttgggctgatgagttggccgagtgggggcatcatattttgtttagtggaagctcatctttgaagagtggatctgagctaattatgaggaataaatatataggtgacctaattaaaggcactaacataaaatcagagagtattttatacgctatcaagtttatgacattgaattcgtctctctctccctttatacaataacttaccagattaggcatacaatatgtatgagcggcacttacttgacaacagtcatatattatcgagcaaaacttcgaagttgtgggcataaaaagaacataggcgaaatcagaacatattacacaatcagagcaaacttgacactacataattaatctatatcttttatatagttacagccactaagcatcaaatgatcaacatgcaagtacaataatatagtacatattataacttaaaatacaactatactacatcatttacaaattactaaaatttaaactcgatatataagcctggtaaatcatcatacttattatatcattttcacaatatttgaaccaaaactcatcaatcattctacaaaatttaagatgtatttatttgtatatcatgcagcaaaatacgggatgtcatctagctttttaaaaagttgacaccttgatgctccaaggacatatatgtgccattgaaggagttaattagcgtagctacgttgtccacccgcacttttttccattttagtaacaaactttcaactcaaaccatacaagtgtttttcaagaaaccaaatcatacgaattataacttaaaatcatattaccaaactcctgactatggcctcaaaacatccatcaagaattacacaattctaaactaaaactccaaaaacttttatcagaaaatatgtgccgaaaacacagctgcgctaaatagcaatttcggataaataggtggtgtttgaatctcctgaagatgaagataaagacaaagattaagtgttttacgtaaaacgagatggtaataacgtgtgattaattgagttttaatcattacaaacttgaaaaatggattaatctgatattttagacaactttcatatagaaagttttcgcacgaaacacaccgtttagcagtttgaaaaacgtgccacatttatgctaaagtttatccaacttttatcggagattcaaacagaggcgagacatgacgtggcacgtcagcttgggggcatctgtgcgcgacatctggcatgccagtacgtcatccgccaactcatccaaatttgtgtttataaatgtactatatatatttttttccctccctcggttacaagaacaaaggcattcgcaacacacacttgaagaaaaaaaacacgacgaacacgttaaaaaaaggtcgaagagaagtgggagacccaaaccgcgaacaatgtgtggaggcgccatcctcgccgagttcatcccggcgccgtcgcgcgccgcggcggcgaccaagcgggtgaccgccagccacctgtggccggccggctccaagaacgccgcccgcggcaagagcaagagcaagaggcagcagaggagcttcgccgacgtcgacgacttcgaggccgccttcgagcagttcgacgatgactccgacttcgacgacgcggaggaagaagacgaaggacacttcgtgttcgcgtccaaatctcgtggtaatgttcgtcgcgtgcgatctcgtctaggtgttcgatcgtgatggcgatgagttcttggcttgatctcaccgaggaagattggtttggtttggttttgttcgtgcagtcgtcgccgggcacgacgggcgcgcggcggcgagggcggcgagcaagaagaagcgggggcggcacttccgaggcatccggcagcggccatgggggaagtgggcggcggagatccgcgacccgcacaagggcacgcgcgtctggctcggcacgttcaacaccccggaggaggccgcacgcgcctacgacgtggaggcgcgccgcctccgcggcagcaaggccaaggtcaacttccccgccacgcccgccgccgcgcgcccacgccgcggcaacacgagagccaccgccgtgccaccgccggcgacagcacccgccgccgccccgccgcgcggactgaagcgagaattctcgccgcctgctgagaccgcgctacctttcttcaccaacggcttcgtcgacctgacgaccgccgcggcgccgccaccggccatgatgatgacgagctccttcaccgacagcgtcgccacgtcggagtccggcgggagccccgccaagaaggcgaggtccgacgacgtcgactcgtccgagggcagcgtcggcggcggcagcgacacgctgggtttcaccgacgagctggagttcgacccgttcatgctgttccagctcccctactccgacggctacgagtccatcgacagcctcttcgccgccggcgacgccaacagcgcgaacaccgacatgaacgccggcgtcaacctgtggagcttcgacgacttcccaatcgacggcgcccttttctgatgtactcctccattgatgcagtttgtgcactcaattgtaagcatctgaattcacttccattttaatggattcagttaaaaacttaaaatccatctgttcatcaggattatatatcttgatcagataccatgccatttcttggttcaggttaatcacgtcgtcgttgatgaatgtttaaccggaggatgatggggtgcagctgatatcatggcttgcttgattaccgaattatattgcggtgtttgtgtttgtcaattagattctgaatctgtactactgccgatcttatgatcaaaactatatattaagtttatgtactcttaatttgtgggctacttttacggggtcttcgtactgctggtcaaatagtcctatgaaatcgatcatgtcggcaatatcgtcgtcaattatcgtggtcgtggttgttaatgatgtcaaataagtctatgaaaacctggtcctcttggtgtttatgtaccactgatcgatccatcatttgatctctgtcatgttgagatggatcgtgtaagaatatcataatttgctggattcagtccagtcgtaatgtattttggtttgtacaactgcaattttgctttgtttggattataactgctgaaaaaatagagggagagaaagacaggtttttttttatcgtctgaatttctcatttgccaaacagcaatcaggtagatgatcagaaaaccattgttcagtattcctttttttctgaaaacccgtacggttttcctatctgctggcaatcctgtttgccacaacacttgatcagttcatatcatgttttatgttgcagcttgcaaaattttttaaaaaaaaatctgtcatgttttatgttgcagcttgcaaaaattaaaaaaaaaataaatctgtctttttcagcaagtttttttattcaggaacagtaccgctactacagggatgtgaaaaccgacgcgcgaaacggtgggcgccttatgaaaccgtggttttgcgatttgattagtgatattttagtcggcaatttgcgcaaattgctcttatctttcttacctagatgaggccatgacagtgactttgctcaactaaattccaaattaagttggggttgcaggattctcaagcaaatataaaagtttaggtgcgcacacgcagcaagcaaaggcaaattacctaatgaggatgagcagagaacttggcaaggtctgcagggactagcattgtttaaatgcaagttgagtgtgccatggcattatacaccaggaccattacatgctatacctaatctcatctccttcagaaaaaaaaaactactagttgcacacttgcatgattgcatctattatactatgcatgtagtcgtagatagctcgggaagatagcccaattcggtggtccatgattctccattgaagattggatctaccattcattgttcatttgttcttgatataaagttgtgttgagtttcaaatggctacttgaacctgttccactatctgaataattttccctgcagatcctaagaaaaaaaaaatagaatcttcaattctcttgatgataattgttttcatggcttggagggtttgcacaagcttttcttatcctggcatagaactttcaggatcaatagaagaaactgaataattagtaccatcataaccagctcctaacttcttttacttggagaactaccagttggccatgcttatggttgtggaattgcaaatagccctaaaaattttcctctagccattttgtggaattcggattttggttctgaattccatcaaacagatagaactcctccaattaccttcatttccatcgaaaaagaccggtagaacgtgaccaactgcctattcacaacacacaaacattgtgcaagaatttgttagtactgagtgctccgttaacaaaacttcaccaaaagcaaaagaagagtatagatgaacactcatatacgcttcctttcaaaaacaaaacagaaatcactcacatatgaaaacatagatcaccgatctctgctgaaccaatgcaccctgatggaaacaacagccttcagagttcagagttcagatttcagttcagacacccacattggacatcatagtatgcatctgaaaaaggagagaaaacatgaaatggatcatcaacttgggatgctataagtagcaaagaaatgacatggtggggttacactgttacgcttgatggcatgaaatctaagggtttctaaccctttctgcaaatgaggacaaacggctggtcttatactagtgttactcatggtttgatgcttccaaattctgaactttatgcaagtctgtgggagtataaccaaccctgggtaaacactaaagacaggctgtgggctgaaagaagagcccatggtattctttcctactgttttgtgctatactaaagtatactcttttcatgacagcatctacaccggttcacattagctccaacctattctaacaagattttgacagtatcatttggagggtatattcagaaaacctttctttgtgcacgtggatatgattttgagttttgtcataatgctcacatgccagagagagagagagagattaagacatcactgtgtgttttgccattggacattggacagtgtttgggcgagctccacatgttagtgactagactaagagcattaagatttacaattgttgtatattcattcatatcatcaaatgctccttgaataggactcctttggattaaaggcacttcaaaggaaatttggaggattttatttcttcggaaaatttccgtatactagctcatttagaacaaagggatgccattggtccatctctcataaacacataataagatccatgctgcagctggctacaaatctatactctagtatgattttcttctctctctcttttcacatgcgcttgtagttactccccccgtcccattttaattgcagtagaatagtgtgggtttctgtatctaacgtttgactgtccatcttattttaaaaaattaaataaaataagtcacaaataaagtatcattcatgttttatcatataataataataaaaatattgtttataaaaatatttcaaataaaacggatgataaaacgttgcgcgcataaacccacaattacatttaaaatgggacagatggagtagtttatagcatgctattgtatttgttgaacccttaatcccagaaaatctccacatctactgaaccttataggtgtgtttggcaaatgagttatgagaggtgtgattgttaaagggaaatagatgaatggctataattaaatgaggtgagaagtatggatgctagtgtacaatattaccctatcctttttttcccaataaagtctatgtccttatcccagtaaagttcacaacatcgaatatccaatcaatttaacctgcaaccaacttttgccacaatttttttaaggagacgaattgacaacgaggcagcccacagacttcggcgcccacaagatcgggagatagcggcccacggagactagacagcccatccccacatcagccagcgacggcgacgccgacgacgacgacttttcctctatttaccactctcccgcgtcgcgccatagcgacgtctctcccggagaaagaagagcgcgccgcgccatgtgcggcggtgcaatcctcgccgatttcaccccggcgagggtgccccggcggctgaccgccgccgagctcctgccggtgaccccgactccccccgccgccgagaggagaaccacccggaagcgcaagtccgacgtcgacttcgaggcggagttcgagcttttcgaggacgacgacgacgacgatgagttcgagctttccgacgatggcgacgagagtttggccgtgtcatgtgtgtcgtcccccaagtcgaaggcagtaccttcgttttcttgtacgatgagatggagaaatcttgcctgctttcttgaaggattttcacctgacggcaacctgaactttacacgatttcttctcctgctgttgatttcatcgatcgccggcggcagtttcgtcggatgtctcctcgagctccaggccgcggcggcgcgtggcggcggcggcggccggtcgtcggaaggcgagcaagaagagcaagtacaggggcgtcggcgccggccgtcggggaggttcgcggcggagatcagggaccccaagaaggggcggcgcgtgtggctcggcacgtacggcagcgccgaggaggccgccatggcctacgaccgcgaggcccgccgcatccgcggcaagggcgcgaggctcaacttcccccgcgacggcgatggctcccctcgccggagtaacgaccggccctgctggaccatcgacctcaacctccccgcggcggccgtctccggtgacgacgacgacgccatggccgtcgacgccgcagacgcagacgcaggcagtgctggccgtgcagcagcctatgcaggtactaccacctcggaggatatctcaagatgtattaatacgtgatatatcactttgtaaatatgcatgtttaaaattaactcctacatctcaaaataaaataaaacaatttaattgtgaatatacgttaactagttatagtttaatttatttttttttcgtttttatttttttcgttgcgggagtagaagttgaatttgaatttgcatgtgtgctggcggagaaacttggctcgtaggctcgtagcatggagcattgccctgttcgcatcatatcatacggttgagctcgatttttgcgaaagaaagaaaggattccaatattctcactgatgaatgatgatcaaggttgataaaatgagcgaactcgatcaaaccaaaccaacaaatttcgaagaatcaagtagatttactaatgtattggcgttgttggcttgttgccgtcgcagatcaagaagcactgagcgcggcaaagtgcaagatcaagcagtgtcctcgcgacgaacagatggcgagcgccacacctgagctcatggaggaggacgcgagcagcagcagaaacatggtgcccctgtccatggcgctgcagctgcagtatgcggcgatgatcgccgaatgcgaccgcgagatggaggagatcgccgccgtggagagggacctcgagaggcgcaggaggcaggtgttcgagcgcagaggccacctggtcaggcaggcctctcttctgctcgactgacgatcttgctgaactgaactctgaatgtttgagcttgtctgaagtctgaactctgcactatgccatatggtgtttcaccttcactgtgaggctgacatgtgggccagacgtccgtttgccttgcttgcttttgagctgcaactgggcgttgtgctgcaagcctgcaaagtgcctgtgtaaagtttgtgggattgtgtgtgtggatcttgtatccttgtgactttgcaagctttaattttgtgaggaacaatagtattttagattggtgtgtaaaatatagaaataaataatagtagcaactaaattttggttttcagctcttcatcagatggtttgtcatgggaacaaaatttcaaacatgagcaaattaaggtcatgttattatcaattgtgatagatttaataattacgtactacctctgtttcaggttataaggctttctagcattacccacattcatatactccctccgtcttataatataacaacctaataccggatgtgacactttatagtacaacgaatatggacatgcttcctgtccatattcattatactatgaagtgtcccatctagttataggtttctatattatggatggagggagtatatgttaatgaatctaggcacgtatatatatgtattgattcattaacatatatttaaatgcgggtaatgctagaaattattataatatgaaacggaggaagtaggtgataggatcgtaaggatgttcatcatctgtataattgtcccgcatgtaaaaaagacgaaatataattcgtgtcatcacatcaatcgtatgtgattgctcgagcgtatttactagtatcaatatcatggttcctaccaaaaataaatcgtcgtcatgaactcatggtacttttaatagattggtatcatggaatgaataaaatggatccacttttttctaaaggctcctatttcaattttttttttcaaaagtggcaaggccttgttcttttctccaacaaaagttcgataaaatttttgatacacgctgcacgcttttcaactgctaaatggtgtgtttcgtacgaaaactttctatatgaaagttgctctcaaatatcaaattaatctatttttcatcaagtttgtattgattaaaacttaactaataacacctcaataccatctcgttttacataaaacacttaatactatctttatcttcatctttaaaagaaaagaacaccacctttgttaggattagcaattctagttgttgcttatgccacacctttggttattagcaggggtgtccatgaaataaccaaaccttggaagggcacatgcgcatttctaccagcatctttttgcatccgcggcacacgaagtaggagtataaggatagctgagggactaaagcgaaaaaattcgcacgaacccgaaaacccttttctccatcgcctccccctccgccgcgccgccacttctctcctctcctcctctcgccgctcccagggtttcgcgcgagatctactctagcattcgggcgttagggttccccgagatggcgagcgagcaggcggcggagagctacacggtggaggagctcgtcgccgtgaacccctacaaccccgacatcctcaacgacctcgagggcttcgtcaacgatcaggtaaaccctagccatgggatacttgcggccccgtttgattttgttcgtgtgattgttggaattttgcgaaggattggtccgtggctgtgctgaaaaagcctcgcgccttctcatgtttacatggtccgcaaatcgttaaattctcctatgaaaaaaaaaatcctgattcatatgcgctatggcgatagctagaaatagcagtatttgtgtatttttttcgggcagactgtagtggagcacatcgttgtggaggagttgtgaattaagcggcagcacttgtaaagagaatggttgctgtttggtacatcaataaatcttattgtcagtcatctcaatgctaactgatggattttcaattgataatatctgttgtcgttggtcatgaaagtggcaagatggagatttcggtcagatgacacacattcatatcaatatttgacatgctgtttggcttacgatttataaagaaacaaactcaacagaccttttttttgtgctctagctattgtgagtatgtgcatgcatcttttgtagctcatctgttttattccagcatataaagaaacaaactcaacagacctttttttttgtgctctagctattgtgagtatgtgcatgcatcttttgtagctcatctgttttattccagcataagtttttggttctaatgctttcaaatttaccgaccttttcttttcatataggtttccaaccaaacatataacttggatgcaaatcttagtcttcttcgtctgtaccaggtgacagtccatctctgtacaaaccgcttttacccatattttggctcgagttatatgtttatttaatgatgcgtttccctttgcagttcgaaccagaaaggttgagtgtgcagattgtatctcgcatattgattaaggtcagaaaagaactaatgttaacattaataaataaacaatggttttttgttgatcacttccaactgttttgctctctttatgttgttctattgacaggctctcatggcaatgccaggcccggacttcagcctatgcttattcttaattccagagcatgtggtacggaaacaattccctgcctcatgtatatgtcgcatcaaaaactatctatctaataaaatgctattgcggatgcatcttaaatagtatcgatacccagtgatctatttgttttggtggtgattgccaaattgaccctgaaataacattatcatatatgtatgcctagagatgtgcaatgtatatatataataacatgtagttgatggaataaaatcatattcaccatggatttggaatttaaatatttgtgcaagggaacaatctttgcccatttagtcttagatatgtagatataacagacccgaatactttatacattgtgtttattatagctgtacatctagttcttttatttgttgggctctgttctcttatcatgtgagttttgaccactgtcctctatgctcttcttatttcagcaaatggaggaacagttcaagacgttgatagttctctctcactacctggaggtatgtatctggcttgactattgtatatatgttgaacagttagtgggataaccactgttaaccgcaatcaacgtctttgtagactgctaggttccgtcaattttgggatgaggcgtcgaagaaccgcaacatattggatgttgttccaggtatgtcttgtggaattggagccatgttttgttcacacgttgtgaagtggtaattgttgcaagctagatgattgtactggtatttccccctccattttcctgattgatttggccaattgggtgtgactgataaactgtaccttttctgattactttatttcagcattttctcgcacaactcatattttagaaagtaactttgtgacttatcatcgtttagacgtttaccatgtgtttatgtggcatgttcatgcccgcgttgtcatgtaaatgagtatgtattagtatcctagatgcccagagattggttaccatatcaagcagtcttgagcgaacttctgtttgattctttctactgactactgaggaattctttttaatctaacatgaactacctatggattatttttatgaatgtttgctatattggacactttcttatggcaattgatatggattctttccgtttgacctaatggtgaagtgttttttttttttgaaacactagtgaaggcttacttaactaatccctttacaggttttgagcaggcaatccaatcctatgcgatacatgtgctctccttgacataccagaaagttcctaggcctgttcttgcggaggtaaatgatgtcattttaaattaattattacacgagtcctcgagggagcatgagttttcattcaatcctttttgtttaaactttagatgaccaaggattcgtggtaatattaagtttcatattactaatgctacaaatatttgttacgccagaagtgtcaccatcatcatccaaattttgctatcatttaggtgttattggttgcctcgcacatggattgtcccttgttggctgaaactcattacttttcttttcaggccatcaacattgagggtcttgcattggacaagttcctggagcaccatattgcaaactccggttgggtgatcgagaagggtgcacgatctcagctgattgtccttccacgcaacgagttcaatcaccctgagctcaagaagaacacagctgaaactgttccgttcgagcatgtaactcgcatattccctgtccttagctgagtcaacaaccagaccaactgagattttgcattacagaacttctgagcgcgtgaagatactctgggcgcatctgttttctctgctgtgatgtactgcgttttgatatgcctgttttagctaaacaagtcaattctagtgacgatccgagcgtcatatctgcctagttatgtttatgtaagcattctgccatgatattacattgttggcaagatattttatcaggtcagagcaaaattttgcatagcggccgtgttcggctttgggcacaactcgatcttccatttaccacgagactacaaccattcctcgttgtcagatttttgcgattgctagtgttctgttgcgtaggggactcattgtgaaaaaaaaaacccgtatgtggtcggtgtaaaaacggattggttttagcctattttttcgtacggagttggcttgtagtagttgcatttttttaccagttttcgtttagttttccgcaaaagtggggagtggttttgacttccaaaaacaggataataaactcttattaccacaagcatctcttagaaaaaacaaatatgtatatcatttcatcgagcgaaacagcttggatatcgatttttgttgtcgctggcaaaagaaaccgcccaaattcatattgaggaaaaaggagtaaattcacatgaacagggggtctttctgcaaaaagaaaaaaaacttgggccggcccatgcacaccctgcccaaggagagtcgctgcctcacctaaacgccaattagggttttcaggggggcggagatataatgacataaaagcccctctccttcctcctcccttctccttcgcgccgccactctctccgagctctcgcctctcctcctcccccgtcttcccttcgcgcgcgccacccccacacacgcgaccatggcggcagtggcaggaggcgcagcgcgggcgctgtcgcaggcggagcaggacgtgcagatgatgctcgccgccgacgtccacctcggcaccaagaactgcgacttccagatggagcgctacgtctacaagcgccgctccgatggtacgcatgcacccacccccacctacaggcatctcacccggctctgcttgttcgtcgatgctcacagctagccattacaatgttcttgccatgagatttcctacgtaggataggtttaccatgttcttgccactagatttcctaggttggattggtgtggattgtgcacttgtatcatagtgctcgcctttgttcatgctttgttagtatcctagctttagctaagtatccaacttgttgtgagctagaattattacggcatggtgctcaacttgatctgatttcgtgtcatatcgtgtgtggcatagttgcattgcaacctgttgcaaggtatgctgctgttcttttgggagggtatcttgaatatgaatacgtgaacatcgttgctgcaattcataggtatctacatcatcaacctcggcaagacatgggagaagctgcagctcgcggcgagggtgattgttgccattgagaacccccaggacatcattgtccagtcggcccgcccctacggccagcgcgccgtcctcaagttcgcgcagtacactggcgcgcacgccattgctggaaggcatacgcctggtacatttaccaatcagctccagacctccttcagcgagccccgtctgctcatcctcactgacccaaggaccgatcaccaggtgaaaatgatcaccatgtcacggtagtgcgttggtgaattgggtacagtattgtttactgatcgtgttatcctgaattatgtctgcagccaatcaaggagtctgctctgggaaacatcccgaccattgccttctgtgacaccgattccccaatgcggtatgtcgatatcggcatcccggccaacaacaaggggaggaacagcattgggtgcctgttctggctcttggctaggatggttctgcagatgaggggtactatcctccctggccacaagtgggatgttatggtatgcggtgttattacttcaagaacacgttgacattggaagtgcattcatgaagataatttcatatcctttgtatgcttatacactgagtactgagagatcccctcataatttccccaaagcgtaaccatgtgtgaataaattttgagctagtagggttgcagccacgagtaagtcttcccttgttattgtgtagccagaatgccgcaaaacttccatgcctaagcgaactgttgagagtacgtttcgatttctgactgtgttagcctggaagtgcttgtcccaaccttgtttctgagcatgaacgcccgcaagccaacatgttagttgaagcatcagggcgattagcagcatgatatcaaaacgctctgagctgctcgttcggctatggcgtaggcctagtccgtaggcaggacttttcaagtctcggaaggtttcttcaatctgcattcgcttcgaatagatattaacaagttgtttgggtgttcgaatttcaacaggtaagttagttgctagaatccatggctcctttgccgacgctgagtagattttaggtgacgggtggtgacaatgagtccgtgtcgagcgctgattttttcggcctttagagcgagatttatacaatagaatttggcatgagattggattgcttttagtcagcctcttatagcctaaagtctttgagtgactagatgacatatcatgtaagttgctgataggtttccagttttccgctcctaggtctgcatattgtacttttcctcttactcgacttaaccagtaccaacccagcttctcaacggatttataccatggcactttaaagccagcatcactgacaatgagcggtgtggtgttactcggtagaatgctcgcaaggtcggctagaaattggtcatgagctttctttgaacattgctctgaaagcgggaacgctttctcataaagagtaacagaacgaccgtgtagtgcgactgaagctcgcaataccataagccgtttttgctcacggatatcagaccagtcaacaagtacaatgggcatcgtattgcccgaacagataaagctagcatgccaacggtatacagcgagtcgctctttgtggaggtgacgattacctaacaatcggtcgattcgtttgatgttatgttttgttctcgctttggttggcaggttacggccaagttcggtaagagtgagagttttacagtcaagtaaggcgtggcaagccaacgttaagctgttgagtcgttttaagtgtaattcggggcagaattggtaaagagagtcgtgtaaaatatcgagttcgcacattttgttgtctgattattgatttttggcgaaaccatttgatcatatgacaagatgtgtatctaccttaacttaatgattttgataaaaatcattaggggattcatcagcactgagtatgtcttttgcaggttgatctgtttttctacagagaccctgaggaggccaaggagcaggaggaggaagctccagcacaagactttgctgccatcactgattacaccgcacctgaacaatggtctgctgaccagtggacctctgatgtggctgctcccccagctgctactgttggtgattggggcgcagctccaggtttgtggtttatccccttctaatatatttatatttttaaccaggtatataactgttgtggacctctgaattttgttcttgtgatgctaaaaatttcatatcattggaatattcttgaaaaaaactgttgtgctgattgctgctcatactgttagcaattgtctcttcgttttcctgcataggctgtaaaatttacatgccttaagcgcttgtactaacttggaactgatcattctccctttctgtggcagctccagttgctgctgccgaaggatgggatcaagcaggagcacccgtagccactgaagccgccgtcgttccaccggttgcgcctactggatgggacccggcagctcaaccagctgctcaaggctgggattaggctaggcaatcactttgagatgtcttccgcagcttaagttaaatatttcccgaggcatgaatgaacacccaaaatccaatgtgatcatctatagctacaccatgaactcaactgtttttaggaatttctagctgaacctgtgttgtttgtccgtccctatttcgaacaacaatgctgtgagggtgagctcggcaagatgtgtggtatatgttaagctttctacttttgtcctaagtttattctgtagcgtttatatcaatcttttcctcggtgcaatggcatggttctatacgctcagtttgttattcaaatctggtacttgtacagtttgagaaatgttgtgcggaaacaaaaacaatttcccaagacgtgaatgcattttatcccttctaatctccacctaaacagacgtgctgcctcactgaaacttagttctaagggctctactctactgatgtacgtgtaaaacagatttaccatgcatttcaaaacctgaaaaatcctaggaaagagcaattttttttggggggggggggtgtatttctattggttcaaaatcatataaactcaaggcgtgcaaaggtttccttgggctaatggacattggtcctcaagtacaaaggcagaaaggagcttgactgcaagactcatctgtcgagcaaagacgaaagtcggccttggtgatccgacgatgctgagtggaaaggctgtcgctcaatggataaaaaagtttaaattatgtttctctttcaaattaaaggggccctagcgaccaaacgattttcctaaaaatcaaaagatacaaccaaagtattgcagcagttgcacaaacctgtatcttgattcgttaatatagtaatttcccatcatgttgcaacagcactcccattcatcatggagttcagggttcatgcaagacaatactggtaacatgaatcagcaggaccccagaagaaaattagttcatgcatcaggtgcaatttcatacatctctggaaaggaaaaaaaaaaacacacaaccaggctgactgaaacattggcttgacaactcatttcctcctgtaccgtgtggcctgttagattgtctcgcaatcattaccgtgttgccaacgattagtgtattttgtacagtgaagactgaaaaggcaagttccatacagagagcaagtaaagtaaaaattggtaaatatgtataatactataacatatttacaacagggattagcatttccatttttttttcatttttgtttgagaagttcttttttctgttttatccttttcctataacatattgccaaagattctaactaagctaacccttgcaaagaatgtgatatatgtttctcctatttattgtcttcagtatggtcaattcttcttcaccatagaaattcaatcgtgtacctcaaccgaaccgagtcagaatggtttcatattccccaatggattgtcatctttgagcactttctctgggcaaaccaagttgatgtttcttccatttgttgtgatgatctcttcgatcacgagaccgttgcagtttgcagcagatgtagcttgacttcgagtgtttcctttaatgtagctgcgatagcttctgctgttgaatccttttgctgagatgtcaccaagacaattttatagctctagtagcaaagcatgcctccgccatccacccaatgcgtgaagcggtcagagtagtcacggatgtctgacatttggctgcttgagcgtgacagatctgtgtcatctcttccctgctaaggaggaaaagtttcaatatcaataaatgtacagagtaaatgcctgatggcagaaagaacgcgtcgatagattacatttgaaaaatgtaaaatctgggttggaacaaaacaaatgtacagcaagcttgagtggcatatatctctactattataaaaattgaagatgtttttgccggtattttggtacgtcatccgcgtatgagtcggttttcaagtccgttcgcttttggaaatacaaatccgtatttgagacagttttgagtcagtttgtaagttcgttcgcttttagaaatacagaagaaatcgtataagaaatctctttaaaaactcacatactaacttgagacgatcggacacctaattacagctcatgattttctaacaaaatatatatccaagcgaatttaacacagtgaatttcatcttaactcgatataataataataataataataatattaatattaaaatagcctttacccgttgcaatgcacgggcattttttctagtaattttaaaaagaaaagaggggaaaagactgacctcatcattgtgtccctgttcactgtatgatgtagttgattcaatactgacaacatccatgggtgaattgatgagtgatgacctgtaaatgagtttgaaacatcttattaccgttaaccattacagcagttccctccaaaaaaatgaaataaaatactatagtgtgagtaatataacatctcagcctagaattcactcctttagttgccagatcaaggggatagaatttgtgcagttggatatacaaataaatcacagatgtgttacctctcataaatttcctcctcacaagaatttcctgaagatgataacagatcaagatcaagaaagtttgaagagtgcaattcaggataacccaatcttctcaaataattctgccgctcttctgaaattgagtgtctcccagacaatgtgctatagtttgtactgaacatgagaaaaatgcagttagttcatagtatggacaatctgaagttctccaacaaccaccaattcgttttcaaacaaggatagagcacctggagcacgggttaggttctatagagatctctggtgcagaatcagaaggttctctaatatcctccagtggttgcattgggagcaattctgagcttgtgttgttttttccaacattacagtcagatacaggtccaccagtgttgtcacataaaatattaccgtccgataacgacctctttatgaatgatctgctgatatgaaatatggatgttactaaactagacatggaaattccaaaattcaataaaataatataacaaaaacaaagtacaattggcagaaccactaattgaccagattctagatagcttgggtaacccaacacatcattatatcagcaattaataccaagataggttctaccttaagctaatcaacatattatattctagatcattgattatcattactaggtggaacatccaaatataagttctctgtgtgaatgaaaggctctcacacccttattaatttgcagttccaagacaaagttttagtattgttcaatccaaacgagcaaacaggcagctagagcaaaataaaatggtgacaccttttgaatttataacatggattgagaagtgaacagtgtcagatttacttggaatctttcatattccatatgattgtctggtaaactgtctaaatataagctgaagttgtactgcatattacagctttctgaacaacatttcttaatggaaattgacttcagtacctcccagtttcttcagttaaagttccttgcctgccaatgttgtaatgctgatctgagtccaatttccaaagcgcaggttttccttcttgtggttggaaatgacccaagaacctgcaattctaaagtcagacagacccgtttgtggtaatatactagagcgataccaacagctcccatggttctgtcatataattttctccgagaattctgcctattgtacatgtatagagtaatacagacatgagaagcttacacatttatagaatcctgcttctcaggatcagtgtaggcattactgtagtagcgctgaagggtccggaggaactcctgagattgtgttgctgccttccattggcctctttgctcacagaagatctgtaacatatatcagcagtatggagtactcagacagtcagactaataactcaaaagagaagtttggacttttggggtgtaaagaaaaaaaaatctttagaagaaaaataatattatgactattgacttcaccgccaattaagaagaaaaatcgctttgaaagaaacaaaaataggacaattgaataagaatatgaagaagggtttaatgaaagatgcatttgtttgagaattgtattacacagtagaggaagcacaaattatgctccaacgagtcagtaaatagaattaagcaagtaccttgttgtgagcagcagagccaccatattgaatagctagcgtatcacccatccgttcatagaaatccataagatcatcggccaaaggagcatgcaattcaattgtaggggtttcattgagctggagcacatgaagttgacgccctaaagcagctaagccatacgcaaactgtgcaacatttgtgcggtccaagcagtctatgcagttagtcctgaggacacccttttgcagtaaaagaggtactagcttagttgcacataaattttgatcctggatgttttcgatgtcacctgagttggcaacagctccttgtccactgatgcatttaaaaagaaaaaaaatgcattagtactgttatgtgagctcataagataagaccaaataggagagcagctactcccaattgttccaaaagctgccttatttgtgtgttctactgttctccaaggcacagctttgactaatccaaagaatgaatatgttacagggtaacatcatgaaggaacattttttgacaaacaacatcaggtagtttctggtggccaggcaaaattttaatataactcttataactcttaagtaggccaaatgttaccttgatgcatcctcatactttgatgtagttatctcacagtggaggaagtcagttagatccaacacatctgatgctaccttgttcaacagcgaaagcacattggtacctttcctgtaaatagcacttagtacttaacatcgaaggcaatttacaagtaatta

SEQ ID NO: 5530 - DNA, 31870 bp, Oryza sativa
cggtgtggtggtgcaagatgctgccgacgacaaggccaccgcacctgtaccggacgagcttcacctgcagcagcgcggcgccgacgttgtcctccggcaacgcggggtagaggtcggcgacgtcggtggccatggcgcggccgctgttggcgagcacgtcgtctaggtcggcgccgtcgacggtggcctcgacgacgagcacgccctggtcgttcacgtggaggaagcggcggccgtggtggtcgacggcgaggcggccggcgaggtgagggtacgccgcgacggccctgaggaggccctccttgatcgcctcgttcgacggcgccggcgcccggtacgcgagcacgctgggtacgtacaggtcgaacgccgcccggtcgaacacggtgagctggacctccgcgccggcgagcgggtgcggcgtgccgtacaccggcgccagcatcgccgtgcttgtaatcttcatcttaattacacctcgtcacctcgtcttaattactttggagtggcatgcatacaaccgcttatatagagctccgaactatatgtagaacagtgtgtgatcaaccacccccagtacatttattttgggctatttatttgtacacgtcaagaccaaaacgagagtaggtatcaaccactccgcttataaaaatgactaaattcaaatcaatttgggaaataattccatgttctaaatggggaaagtattctaaactcttgagaagacaccaattcttgtttgcatgccactcaaatagttatgcaaaaatttgaaaaaaagatcaacatgatagtttaatatgtgcttgatcattacacaagcatgcaaaaataaaatttaacttcaacatgttgcaacgaaaaatacactaaaattcaaatcggtttaggaaataattccatgttccaaatgggtttagagaagaggagaacagaaaaaaaggaaaaagtacaccgaaggtccctcaacttctcatcgagttacaaaatcgtcccttaaccgcaaaaccagatatatcacatctttcaacttacaaaaccgttcactttacatccttttgtggttttgatcccggttttatctaacgtggcggatgagtcagcgtgagacccacgtgtcaggtaccacgtcatcactctttctctttcccctcttctatcccttccttctctctctaatttctccttcgtctgggcaagccggcgggcggggcgaggtgggagaagaggtcgggcggccggcgaccggcgacgggcgatgcggcagcggcggccgcggcggcggtggcgatgacgacgacgtgggaataggagggccgccccctatgccgccagcctccgtcgcctctccaccagctcccatggatgatgacggcggcctcctcgctctccccgttgcgctccccatcggctcctcatccttcgtgctccgtgaggacggcgtctcgcgcgccgctgacgaggctgccgccccgcgctgcttgccgctgctgttcgatctgaacctgccggcctcgtccccgtcggctgctgccgccgccgaagtcgacgagatggattggtgttgcgacacgctgctccacctctagcctgcacatcaccaaacaatggcagcaatcgccggcgaactctagcctacgacgacgacgacgacgaccaaccagcaagcaacaagaattggaaatttgttactgggttgctgcgctccaatccaaccatcaccattgttgctgctgctactgcgaagaagctctaccatctcctccatagacacggataattttctttttattttcgttttcctccatctctttttcaccactcaagatttcgtttccgccgcctctcttgtgcatctctgtatccaaaggggatgctgctgctttcagctgtaccaatagctagaaaatggtagagaagatgataaaatttggttcaaaatttgtaacgtaaatgttatcggaagacgacggggacgaggcgggcaggttcagatcgagtagcagcggcgagcagcgcggggcggcggcctcgtcggcggcgcccgagacgccgtcctcgcagagcacggaggaagaagagccgacgggaggcgcaacggggagagcgaggagaccgccgtcgtcatccatggcagctggtggagtggcgacggaggccggcggcgtgggggcggccctcctgctcccacgtcgtcgccgccgccgccacgtcgcccgtcgaggtcagctcagccacgagagagagaacgaacagaggggcgggcgtcgattgctcacagtgtatcagaagcgtgcgcgcggaggatacggtgaggaggtcgacgagcgacgaccggaagtcgaacacccgcgcctgcacgacgatggcctccacgaatgacgcgtcccctgcgcgcgacgacggcctccacggtcgcgcccacaccctctcccctcctccatgcttctacgtcatcgtcagcgccaccggcagcagtagcctcttctccgccggaagcggtggtggtggtcaatcaccgaagcaagttagctagagtcgatcggctcggtatttgatttggcttcgattgcttcgccgcgtcgaggccgacggatgagggggacggccgccgcggccatccgcgcgacggcatccatcggcggagccgcccgtcgcatcggccctcctctctgccgcgctccttccccgccagccgccggccacgccggctctcctccccgccgcgtcgaagacgccgccaccatccacgcccagggaaaaatgagagaggaagggagagaagagggaaagagagagcggtgacatggacactctgacacgtggggcctaggtgggtcccacgctgactcagctgccacatgagacgaaaccggggtcaaaaccacctaataccttgaggttttgtaagttgagggatgtgatatatctggttttgcggttgaagaatgattcggtaactcgataacaagttgaggaaccttcggtgtacttttcccaagaaaaaaaagaagatgaaggcccgattcaaatacggcccaatataagcagcccaatgttcaaactgggctgtacgatcagcgctcgtcggcccagatctaggcggagggggaacgtgcggggggcccacaggccgaagcagcgtcttctccacaagctcaggctcgcctcgccacgccatggccttgtcctcctcttcgcacctcctccccttctcccggcctcccgcgaccttcccacgagcacgccacgccggcggcgggaggggccgagccggcgccacggggaggttcatagcgtgctcctcgccccctcctcccgacgtcgtggtcacccgcgagcgcgggaagaacgccaagctcatcgccgcgctggtttggttcccaaatcgacactcctgcattgttcacttgtacctaacgcatagtttttttttgggtggggggtgaggggaagcgtaggggattaggggattagcaatagagatggagaatacgcatcttccatttttgttttgtgataccctgtgagatcgtcgcgtattttagtgttgtgattttaggtggcctggccgactgtatagagggaaatttacgggctaattatactgtttaggacccgggaggctcactaattggtgcgagatttcagttaatgtactgatttccatctaggaaaaggttggcgtgtgctggatatgagatatttggtgctaactcgttgaacatggtgccgcgtgctaatggaactcaccattcatgtcttcaactggtcggagcttggagtttagagttagttgttttgcaatacagttcagttttatctgattacaaatgcaatgcaatgctatgttatggaaaccatttgtcattttgttagtatcagtctttcatgtaagaacatatcccttctttcatccatttcatatgatacaagttgggcatatgatctgcattgcctattttattccattagcttagagaagttttgtggatggtatgacttcctctctttttttttatgatcattgacctaataactttaatctactattagtttattatcttggatcacagtatatgagatctttacctttattctcagctgttgtttagcgtctcatgaatcacgatacatcattaatacggagtgtgaagtctgaatttttctgatcatatctagccatattctaactgctatacgtattcaactgggccatagatggttgttactccaatggatttgagaacattcctacattgtaatacttgtgaaaaggtccaattgacattagagtaatgcaattgttaccgcgtgccttgtcgaacagtgtgctaggttactagacttgattgatctctgaagggcccttggagggagtctaatgattttactcaatgttctgataaaattagagtctttgcctgttgattgtgtaatggaagtaatcttttgtgtgttgggtggtggggtcttcatccatcttaaaatgttgtaagcatgcagagtacatgttaaagtaatcatgaatgtgctgctgcagccacctattattttctcagaagaagattcaatttgtgttcaaaaataagcagtccttttgtatcatccagcttattgctatctagttttcacatcagttttctaattgaattttgtaggaaaaacataatgtacaaagtcttgagcttcctcttattaaacatgttgaagggccagatacagataggctttctgctgtcctgcgcggtaagtagttcagtctttatttttctagtaatataactttatgtgtttctgtcttgcgttgtatatccattgctccacatatagtatattctcattacacttgctttgcaaaatcataataaaagtattccatagtttagtcacttaatattttgtattttcagatgaaaagtttgactggatcactataacatctcctgaggcagctgctgtgttccttgagggatggaagtaagattcaaacatatttcaattatcgtgcgcaattgctacagaaatataaattgtgcatcatttcacacttcattcgtcctaagttctgggctttgtggcataggtttgtgcactctgtgatttgcttgttgtctaacccaatatatgatatgttcttcaatcaatccattattctgtgatgcaccagaacaatccaaaaccaccatattaacacaagttacataacgacctatcagggctgctggaaatcctaaggtacgaatagcggttgttggagcaggtactgaaagagtttttgacgaagtaattcaatacaatgatggatcccttgaggttgcattttctccttctaaaggtatcttgcctcataggatgtaattttcattgcatgtcaactaattcgtatggtgctctcatatattgaagacttggaactgttttcagtcagtaaggtatttctttttcattttttttatttcatcagctatgggtaaatttttggcctcagagcttccaaggaccactgaaactacttgtaaagtgttatatcctgcatctgcaaaggctggccatgaaatccgtgagtcagatttggttttatccttctggttacatgcttgcacctgcatttccacaatgaccacatctgcatcatatcttcagctgttatgttaactaattatgcggattgcagagaatgggctatcaaatcgaggatttgaggtgacaagactgaacacatatacaactgtatgtttttcttttaaattaaattattacatttgccttattaattcttatttgcttactttatatgagtaatgtgaaattttggccccttgtcttgtgcactttggacctcgttctatttatctgcattcagacatcccttacctgatagtatcatattttagcttgatatggttgactgtgacatatgttaccgtagtagaggttttgtatttcaagaaacagtagtaattttcatggattacattttatcttttcaaagtttgtgtgcacgtgaatcttggatttttgttttgacctatgaaatggttgtatatacatgcaggtatctgtacaggatgtcgatccgctaatattaaagcctgctctttcagctccagttgttgcagtagcttctccttctgctctccggtaatatataatgtgtctatggctgcctcggaacaaatttaaaaccgtgttcatataataataatggtatgctagtactccctaattagatggttcaggtaaagtacgtatgtgggagagatcacaaattctgcattgaaacattttttttttggaatacgcaagagatttgtgtaccatttcattaacacggggctttgacaaggttggggctgatttctatttggacgtgtttctttatgatccataaaggggtataccgattcaaaggcacacaaacagctttatttgccatctcagttatttgcaaagctagattatttgcgaactgtctccctgggctgactttatgttacatattaccatcacaattttccttttccacagtgcttactttattcagttttggggttatcatgatgatgcagagcttggctaaatcttgcttcacaagttgacaactggggcaacgccattgcctgcataggcgagacgactgcctcagcagctaagaaatttggcctgaagagcatatattatcctaccaccccgggacttgacgggtaagcacacatcacgaaccttttgaataccattatccaattgtcaaggacacgtctgaatggtggacattcagaactggtatcaacacagcgtcacatcatatgttgtgaagcaaaattgactactgtatcatccatatgcacaattttcatattgtttttcacaggtgggttgaaagcatccttgaagcgctcagagcccatgggcaatcgaaagaggtcctctctcgtcctcgtggatactttccttgaatttctcagcttctttcgtcacacttttttctgtttctactgtaggccccagggtgttgaacttgaagacgggcaatttacttgtaccagatgctggaggttggtggacatttgtggcggctgcatattgaactctgtgcttccttgactaaccgatcacacactttttgttgtttttctaatataattgagaggagaaaccaagtcggcaactactgtagtagaactacttgtaaattgtgagctgtttattgtagctactgaacacggtgcggtatattaccagtgttgtaccaattgttgcttagtttataccagtttggcacaaaaaatgagccctcctccaaaaatatggaaatcaatgaatgcaagaggctcttgtactgggctttactaaaccgcaggtgtttctcaggtcagaaggcccaaagctgcactaggccattattaaggccctgtttagttcgcgaaaaaaaaaattttgggtgtcatatcggatgtttgactgaatgttggaaggggctttcggatacgaatgaaaaaactaatttcatagcttgcctggaaaccgcgagacgactcttttgagcttaattaagccatcattagcatatgcaggttactgtagcacttatggctaatcatggattaattaggctgaaaagattcatctcgcgatttccatgcaaagtgtgcaattattttttatttttatctatatttaatgctttatgcacgtgtcaaagatttagaaagtaaaccaggcctaatatcaatatatgtcttctcataaatgtgcatagatttatcagtcaacctgagccgtccttgtcctcactccgagagagcatgcaacgcttcgcagccgcatcataattgtggccttcttttttttttttttgacacggtcagtgccgtctactgcagaatctccagttaagttgccgcggtgatccgaatgaactgaaattgattgccacgacgacttggcaatgccacggaatctccgtcctcttcacctccaccaaacctcttaagagattccagcgtttgtgtccaccacgcaagaatcttcttcctctcggagacatgactgactgcccacggacaagtgcactaatgatcaatcaaattatgaaatgaatgaatgatactctccttcgattgcgttaatatctcgctaatctccgtggctgtcagcatcctaaacactgcaaaaacagaacgtaacaaaggtcgacatggacaatttcttttagtttcttttgttactcggttagcacttacgtacggttagtcgtccaccccctcctggacggaaacacgtccatgtccagctaacgtcgacgtctctattgcagatttgtaggtctaaccctcctgcttaactaaccaagcgccgtaacgaaaaccggcgagcttcttcctccaccgccgccggcctctgcaccggcggcgacgagccggagagagccagcgtctctcataaaaggagattaaaagttactacctccgttttaaattataagactttttaacattgctcacattcatataaatgttaataaatatctggattcattgacatatataaatgctagaaagttttataatataaaacggaggaagtactatataagacaacgatagtagcagctttaggttcgcgaatatttatatcaaaatctatggagaatttggcttctctagctatcctgttggatagattcgaggccgacttcacctcacaagagaaggaattaatcaactagacaggaattaattattaaagatggagttgtttaaccagcaacactgtgtcaactccctgtacaattaagtactaatcagtaatcacctgtactagttgttactgattacagtattactagctacgtggcacatactgtcactgagatgctgggagcctgacaaaaaaaacagagcaatcgctgaaaaaaaaacaatctccagtgcatcgtttttgtctgtaatatcctagtggtaacttggcaagagtgatcagtgagtgagtagattctccttatcgcctcgtagctcacggtggttggagcgttcagatcaacgtcaactgtctgtttctctgaatttgttggagtaaaccggagatatatatatcccctcctaaacctaaatgtggtcgttgcgaatgaaaggattattagcataggatgagttgttggagaaagactgcattggaatcaaaagccaaagtacagcagttgtgccctccatttcttcgcaatactgcagtgtaggacagaaacggagttcttttttttttctttttgaaagttcagtttcatcaagtgattacttaagtagtagtactagcatactgtatatattaggttttattgagtgggattaatttgatttgacagtgtgacagctaaaagtacgtatccctccgtcccaaaaaaaaaaatcaatcccaaaatacgtgtccagatttatagctagagtttacctttttttaatagagtagtactccctccatcccaaaatgtttgacgccgttgacttttttaaaaatgtttgatcgttcgtcttattaaaaaaacttaagtaattattaattctttttctatcatttgatttattgttaaatatacttttatgtatacatatagttttacacatttcacaaaagtttttgaataaaacgaacggtcaaacatatttaaaaaagtcaacggtgtcaaacatttagggaaggagggagtagtatattgtacaataagagtcatctcaaaattagacggatacattatatataaattttgaaatatatatacaagtgttgtgaaaatataatgttatctaaaaataaaaattgaatactaatattaaagagtgtgtaatttcattgccaaatttttaaatggacagattttaaaactaaaggacagcaaattttctcggccgacaaacaccggacactaaaaaggggagggagtacgatggacatggacatctgagaaccggaaagatcatatttactctcatttgttcaaatttgtcatgaacagtaggttggccgtgctactgaaataattgattcggccatgatttcgcaatcaatcttgaacggcagccaggagctaagccatgagagttgagacccactgactactgtagcttaaagctactccctccgtccaaaaaaaagactcaattcctgggttttcgtgtcctacgtttgactgtccgtcttatatgaatttttttcatgattagtatttttattgttgttagatgataaaacatgaataatactttatgtgtgatttatctttttaaatttttttattttttttaaataagacggacgattaaacgttagacacggaaactcaagaattgagttattttgggacggagggagtagtaagctactgctcttctgccaatcaaaatggcacacatttatgcaggcaggcaaagtatccatccatccgaggaccacaggggaaacattggaaatgtttcgaaggacaggaaagattgctacggatatcactagcagatgaatgagagatggaggggaaatatttggtagcgagcatgttcttggtttatcgcttcactgcgcaataagtttggtatcgtttggaacgcatgaatttcatagggattatcctgaaaacgtcgtcacttgaaagtggctatgattgagacatttttataaaaattatgtgttctaaattagtagcagttgtgcgagtgagtgatttatgactgatcggatatactccctgaatttcataattaaagatgttttgtttttgttttcatcatttgtttaagtctaattaagcttattacaaaatatagtagggatgtgcttctatgctctgcaaaaaaaaaaattgcacgaaagttaaagctaatcagcggctatgattaaaagggagattagcacttaattatcattagcgaggggtaatttcgtccaaagatttttgagcccatatccagcccagtccatctgaagcgatccccacattctaccagtccaccacggcaccgctcctcaaccgcaccgccgcgccgattttcgccttgccgtcgttgctctgccctcttcttcagttaaaaggatacccgagcaggtatggcctgagtgacagtaaattcagtttcagccttaacttgtctcctcaaagatttgccttcaagttacagaacagagtcaatgccttattgctgcaacccgacttgcaaatttggttgtacatatacacatctggcacaagcttcatatttacaagtaccataaaaacctcatatgcagtctaagcgctgccacttttcaatagaatcgagagaatggcattcgtaataggtgacgatggttgggcagcgcagccgacgcgcgggttgtggaggagtgatggcagcgccgacggtggcggagggaggcaggaagcggcgtggggagggaaccgggcggcaaggcggcgttgcgaggggaaaaagaaggcagagcagcggcggcaaggcgaaaatcggcgcggcggtgcggttgaggagcggcgccgtgatagactggtaggggtggggatcggactgggctggatatgggctcgaaaatctttggacgaaattactcctcgctaatgataattaagtgctaatctcccttttaatcacagccactgattagctttaactttcgtgcaagtttttttttgcggagcaacaaattaatttcattaaaaccataactgaatttttagagcatactatttgtttagtgttaaatttttgtctattttttctataaatttaatcaaacctttaaaagaagtttaacttaagttaaaatcaaaacattatatatctatactccttttaaagaagacaatgatggtgacggtgaatctgtccccaccaactgttgtatggagttttttttaaccaactaccccttcatggtttttaccatctactacttcatgtgctctaatattacaaaatttcttttatatataattctatctatttcattcctgtaatacaaggttatgatacaaagacatcagcaaggacaaaattattaaaaaacatcacaattaatttgttctaaacaatattaacgcagagataatttatttttaatccctagcaaagcatgggtatttagctagtattcaaaaatagagggagtatgtgggaaatgtggcacatgccgacatgcggtacaatccaatgatatgattgataaaactaaattgcaattgctataggatgaacatgcatatctcttgcacaaatacgtcgctacaaattcttagtagcatgtgcttataactatcctataacctttatctgcttttggaagttcctatcacccatatctagatttataagtactttttggtgacagattccctaatagttctttctcatcctgtctggacaaaaactggttgagaaaaagtatgctacatctctgcactttcgccgtgtactgactggttttgatttttcctggctctgaactctgaagtttagagacgacggtcgtcacatatcagaaactgttgctttcccaactgctgccgttccaaacaggaaatgatagatcacttgccacattgtctgtagtcttaaagaaacaattaaaagttgtagataattaattaggcttgtgactgcaatttttctaagcttatgaatgctctcggttgtagtcgtcctcctctgtcggcaaagcatggcataaattcgccattatcttgtggcatgacatgacagcagcttatcaattctgaaaaaatggcatgacatgactgtatactgatattagaaaacattatggccatgattagttaaaaaaaatcacgctatcacatcaaatggttggacacatgtatagagtattaaatataggaaaaaaaaccaattacacagattgcgtgtaaattacgagacgaatcttttaagcttaattgcgcaatgatttaacaatgtggtgttacagtaaacatttactaatgacggattaattaggcttaataaatttgtctcgtagtttcctggcggaatctgtaatttattttgttattagactatgtttaatacttcaaatatgtgtccgtatatccgatgtgacaactaaatctaaaaattttccctagctaagcaaggcctatgttggtaattgctactacctccttcaaaaacagttttacttttctacacaaatatggatggtcacatccaggttttttagaacaataaagatttatttagagggaggtagtacttaccagccgcgtccatgtattaggtagtatgattgtgagaaataaacaaaagaacatttcttttttttttacaaagtatgatattccttctattcctataaatattatgtacatatagttgttatatcaataataagttaataagatcaaagagttatcgttggtctatgttctttaaacgtttgttaggaccatattcacaggtacatgagcgtgcgtgtgtatctttcgtgtaatgaatatggatgctttaaaataggtgtactctacagtatagtttgtacgtgcgtgaaggtgcaaaccggcatcagctttggagtgcaggtggtgttaatcgtccacggtcggtaactaacgcctcgattagtcaaaaagtttgcacggacaatccgttcactgtagctaaacacttagcgctttgttgtcattgatgacatccaaaatcacctaatcaattttttatatatatatcccgaaaaaaaatttgtatataaaaaaatactccctccgtcccataatataagggattttgagtttctatttgcactgtttgaccactcgtcttattcaaaaaattttagaattattattttttttgacttactttattatccaaagtactttaagtataacttttcattttttatatttgcacaaattttttaaataagatgagtgattaaacagtgcaagcaaaaacttaaaatcctttatattatgggacgaaggggtactatcaacccatgtagtaccaatcaccatgtgagaccgtgcaactgtgcaaaaattatttttgtttttttcaaacacaaatgtaatgtaatggcaaaggctcgtaattagagggtgtttccaggggcaaaagcgggagggcgctcacccaagcggaaagcgacacggcaccacttgagaggaggacaccggccgtgcgagcgaggggccccaccgtcagattccgcggggccccgcatctcgatgtccacgtagcgcaagcagccgcccccggcgcgggtgttattatatgttcaccggaatctctagccacccggggtgggacccaccggtggggcccggtggaagtggacgccaggcgggtaaggaaggggagccggtgaggaatccgcgggaacagcgacagcgccgccaggcgcgaggagattccaccgttcgatcgacgtttggtggacacgtgtcgaccaccgagacgagctgaggctgctcaagcttgacacgatcactaatttgataaaaaaaaatgtgtcacgtagtacacgtatagtgtgaacgtgtggtaagctttgattaggaattgagtgtaatgacacatgattagcaggaaattagtgtttttttgtgctgaagggttaaacagtggaatgattaatttgtggtaattacgatagtataaacaaatgacttgaatattataaatacacttaggttagcaaattatggcatgcttaaaagatttgtaaattgtttattaaactgatgctaacgcttaaactatgtgtataggggggtaaaaaagccgtggcgatggttcgtgttaagcaaagtagcttttgactatgcatatctgcacctaaattattttcctattctgccgtttgagtcgtcatgctgcctcttggaacgggagatagtatcatgcaaaacttcggaatgggaattcagctcattgttcaatgccttattttaaattttgttttgagaggttttccttcgatattaattaatcacggttaatggggaaaagttaataatttttaacacgccgctaaagtatgattccaccattttaggaggacttgccctacctcttacatgtaggtccaccaaaactacgacctttggattgaaatggcttataactcaaagagcctgttcagtagttctatttggcagccagctgctacagtgaaatacatagaagatcaatagtagcagctgcagctgcaacggatgtgcagctgctgtatagggctaccgaacaggcccaaagtttttaatgtataaggtcctccaaacctacaatatttatttgaaatctatatggtccatcaaaccattgttatcattcaaaatggttacaacttagcaactttatgcttaggatccgtcaaacttagcaactccgtatgttcatgatttatgaaacctatagcatcaattcaaaacagttacaaactcaactacccttatgtaccgtaggatcaccgaaccaatggagtatgtttgaaatagctacaaatcaaaccccttacctgtggagttcaccaaacctccatcttcagttggaaacaactctaacgtacttaatacctcttatatatacctcttatatgtgtaaggtccaccaataacacattcaaaataatatacagcttaccactctccttacatgtaagatctacgaagtctacggcgtcgattcgaacacaactacagttttagtgggatcaccaaaccttccacggtgttggtataaaacaactacaactcagcgcccctacctgtcacgtgttccatgtcatgtgggatccaccaaacctacagtgttggttcgaaacagctacaactcaatgccaattttgtagggtccaccaaaactacgacatcagtttaacatttttttatataaatgttaatgctctaaactcatggtgggagacctcccctaacttatattgagtttcacttttttttttgcgaggagagttttgtgcatatcttttcacatatatatacttatttaagatgtgaaggaaagatggacaactcaatttatcaatgtggttacgatttgacatattgtggtatgcctagtcccagaaagtggacaaacaataattgcaaaatgtttttatagcaaacatatattgttctgaggagaaaaaagggggtcctgcggaggtatattacaaacagtacaaacctctatggggaaagcacatgtgcatgattggtcatgtctcatgtgggtagtttcttaaagcgattttgcatgacagaaaacagcttgaagtagggttcatgccacacacacaaaaaaaaagacacataatattcttttgttttgagccaatgtcgtatgacataaaccggcttccaatgaaagttgacgtgaaaattaaattaatagaacagccagaagaagcatggttttgcttggctaatgctgatcagggaatctgtcctgaccaattgtaatccttggaactcttaatatggtagtattctaaccaaggccagatcaatgatgcttaaacaaattaggaagaagattaaactttaaagcaagcagcagcgattagtggcgagcacgatgcatatggccatcggtatacagtggcatatcacaaaaagctcaataatactgtgtgtcggatcgtgatgcaaatgcttcttgggcccaaaaaagggggaaattaatcaatcgtggtttgacaaaatgatttaaatttctaacctgaaggccttaagcattattggtcttctacctgatgaccatgaacatgcatgacgattaattcttcgccgttgaaaaggccctaattaagcatatattgacgatttcaatataatcaggaacatgtattgaatatacatgtacacggccaattatttctgtataattatgttggataaatatttccaatcagaaaacatctctagttgttacaaagtactgcctctattgtttcacaaacaatttgtctattgtttcagacattgactactacattttttatacgattggacaaaccaaaacacctatggctttgcagcaataattggccttatatgtatacatggagaagacgatggagaaagtagtagtagagagtacgtttacatccaactacatggttctgggtcctgccagaatggacgcattggtccctgggctatatatctctctttcaaaggcatccaaatctatcaatttggatgatatgctgcatggagctaattaagctagcatgcaaacctgataagctagctatatatgcttctgctttgaggagagtgcatgaaatgcaactcatgctactgtttttttttttgtttctttggtttttttttaacagcattgctatacgaatgatagctactgtcgatggaatataggtctttagctagagtagatggttaattaggacaatatagtgtgattatatgtagttctagctactagcgtgggataatttattgtcaactagggacaagattaatgctcaatctattttgggcaccacattcagattccattaagaaaaaaaaaactacctgtattcaagcagaaactttttttttttacggtaagttccttttctagaaaacgtgtccatgacacatttaggcgtaatggctaacaaaaagtgtacagcaaatcaacaaaacactaagctaacaatagatggtcaaacttgtgtatgtaacatatttagtatataatcattttttccaactatatacaaattaaagtcctagggcttacgggaaaaaagtgcctgagatatatgtatgtatctctataagaaaaattgtgctcagttatgtttcaaattatactactaatatttctaaactccaaaatgtgtctcatatgaaaaaaaatgtgattccaacaacatccatatttctaaaaatcacataaaaatgtgatttcctatggaaaagaaaaatgtgattcctaacccgcatcacccgaatggtagaataataattttttaattatataaaaacccctcagatttctttcccacataaaaacaaccgaaatgtaacatatttttcttttttagaaaaagaaactggtttataccttcttttaggaaaaaaatgaatatcttgtcgatgttttctaatatggtttgttgggtatatttgaagtaaaccaaaccattgagacgaatgattccaagtttttatggattaaagcctttatttgcccataaaagtttacatgttctcttatttgcccctgattgtattaatggtgtgcgggttcagccatgtgtaagagataccaggggcaagtaaggaatcccaagaatttgccaatagcaactaaggaatcatccaattttttttgtaactatggttgtaacgttttgtcatgctatccatagcattaggcatctaatttgacattagagctgaagtttttgtttgctactactccttacttcttatttttgctagacagcgctttatgccatttttttttgctaagctatgtttttactttcgtgatgttcttattctcgccaaactataatctaccatcgtgatgcgtatatcaattaaaatgcaacttcacatgttgcttgtccaataatacgtaagttgaggggttcttgttttcttaattggttgcaagcgtattctcttcatcagatttataccaagataaaatttgccctccttctttagtgaccgacaatgccatagaggtgctgttggtgaatgtagccagaggaagcatgccgtagtagtctagtagagggaggcacacgaaagtgtgcatgaggcggcgtcaaggatgggaaggtggtgtatataaggggggagaattaggatcgatgaatgggtatctagcggtccaaaagttggcttcttaatgaaaaaaggtgctcaagatatatattatatccctataagaaaaggttgtgttaatttgtattttaattactccattcaaaatgtattatgctatgaagaaaatgtgatccccaacccatattcatacttctagactcatacaaaaatgtgacttcctattaaaagaatttcttgtagaaaagaaaaatgtgattaccaatgttagcaccggagggtagaccaacatatttttgaacatatatacaaagccctagaatttcttttccgcactaaaaccaaccaacactcatcacattttgtttttcccctttcaaaaccattcatttttccaatttggtttccttgagaactttgaagggaagtgagccattgaggttgttgatttcaattttcatggccaaatgatgatggttgcaacgttttgtcatgctatatgtatataattatacatctaatttgacattgaatgttgtccaggaagtggtgttttcaatggtgcacgggtgagtaacacgtacgaatctgccctaactttgttttgttcttacttttagtaggtggtagcatgagcggtgcggtgagaggaaacgaatggtaggacaggaaggtgtagggggtgcgcgatgctaacgtaggaaattgagtttagccgtgtatagaaagggagaaaaacataaaactttagctaaagatcaaatcacaaaatcagcttttaaatataaaaaaattatcagacacctattattccattcttcttttagcaaagtttatactattcttatttgtgggctcactcaaaaatgttgatttcaagttgggaaaaagaacatgtgattcccaacagcagcagcagcagcacatgggcataagggtaatttttttcccaaacctcaatatgtccttgggaatttcttttcaacaccaaaaccaaccaacacccaacgcatcattttccttaccttttcttttctcccctccctcccttctttttcttgcctctcccctcctctcctttttatgttttttttcccattttttcttccgtggattcccatggccaccacagtgaagtctcggccgccgccaccgccaccgccgccgccgccgcatgccctccccgccgtgaccacccgccgccgcggctcctcctcctcttcgccggcggcggcgaaggcttcggtgttcttgtccgctcctcggttagtctacccactctatccttgtttcttgcttctggttatccccggagcaaataatgaaaccgttttacccccatcttgtttgatgttgctcttcacctcgagcttgatccatggtgagagcgcggagagataggaaagctttgaattatttttttggggttttgttttttttttttttgttttttggttcttgtggttgtttttgtggaggtttattgggtgctttagtggtgagtagtaaccacttttggctatttggcgatcaacctggagttgttcctgattcttttctgtgtttttttttcttctttctttggatttcttgcagggagttgctgcttgttctttgcagcctcttggtggttgctgtgctgttcgtctcgtcgtcggcggcggcggcggcggaggatggtgcggaggggagtgatggcgacctcggcggctgcctcggtttccgggatggctgcgcggaccggagcgccctgtgcttctcgccctcggcagttgagtccatgcttgcaagcgaggatgatggagtcaaggagatggatttggtggtgtcgagagactggggaccaccaccaccaccgtcgttgggcttccggttgcccggccaccgcggcgtggtgacgtgctcgtcggcggcggacgcgctgatcacctcccggaatggggtgggacgggaggatggtggtgagaggtggtataatgtggcgtcgtgccaggcgccccttgtgcctgacaattggatgcgggcgatggccggcgcgacgccggagctggatgccgcggatgccagcaccgatggcattttcggttcgtcgtcgttggatgttgagattagcccgccggtgttggattgggggaagagtagcttgtatgtggcttccatggccaccctgaccgtggtgaatttgaacaatgacagtgccttgcgcgtgtacgagccgttcagtaccgacccgcagttttatgtgtatggttatgatgatctggtgctgcagcctagagagaatgcatcagtcaccttcatattcttgccgaagttgctaggctcttcatcggcgcatttggttttgcagacgaatttcggtgggttcattatacaggctaagggcatggctgtcagatcaccttatcagttggagccactagctgggatggatgtcataacaggtggacggctggagaggaacttgtcgatattcaacccttttgatgattctctctatgtcgaggaagtggctgtttggatgtcttcattccagggcacaaaacaatcttctcatatagtttgtcagttaggcccttttgacgagtcgttggagtttacttctttgagtagcaactggtatacagcaagtagtactgaatttggattgccgatgatccatatcaggcctagtgagcaatgggaggtgcttcctacacaaagcagcactgttgtagagttaaaactgcaacctctttcagaaggaatggtgttcggtgctatctgcatgaaattacgcaattgcacatctgatagagtagacactgttgttatacctatggagttagaggtgcgtgcacgtacctaccatgaacccactaacttagtttcggtcacatttgagcgtgtatcatcttgtgctggagttgggtcaattatttccctttctttaaggaatgagggaacaaagttactgaggattgtaagggtaactgaggataacagggatggatcaaataattttgaggttaagtacctgaatggactgatactctttcctgatactgtaacagatatagcgctgataaaatatacttcagttccaacggataactcatttgacaactgcaatatagtggtagaaacgaacagttctgttggtagttcaatcctgataccctgccgagatgtgatatctgcaactctttcttatacggctagcgctgttactgaatctgatgggccattttctgaagatgagttatctgctaactcaaggacaggatctttgggcagcattgtagaagtaaaaggcctgcaacacatgaaggtattcccttttgcattgttgagtttgccaataagtagcctatgttgtctaagttgatcttatattgttgttctatcagcattggacttcgagttttgttttcccttgtttaacataacttctccaaattatgtactcagtgcatatgaatatgatataggaagctgataatggtagcacctttcatgcttcggcgctgtttcgttatattttcagtcccacaaagctcatcctttgtcgatttgttgttcctatgatatcttaatcagcaggaagcggcatcatttagaatctcctgggcattattttttagaaaagaatctttttttcattaatgggaataagcttattgttttctattgtgtgctggttacatcattaaggaaaatatttctgatgcattgattcaagttaccaatggtcctatatttgcattatggcctaaattggtatgatcttgagatagatacctgtatctggataatatcttcgtgatcacttcgatgcacttatacaatgaattgatcatataactatgttgtgcatatcaaaatggaacactaagacggtattcttaaacatttctccacttgaatttcttgttgtgcttatataattaaaaagaattgatttcttatctcaagcaccttttcacttacaaaattttccctgttagtcttctcatgttcttttttttttaattgcagccaacaattacaagggcatataaagctgatgatacagtacttagaagatggagatctcatggtacaagaactgggatttctgttctcacagatcaaaaaatgctgtttcctattgtccaagttggatcacagttttctaaatggataaccgtccataacccaagcctagagcatgcatccatgcaactggttctgaattctgaggaaattattggtcagtgcaaaactataaatgatgcatgtgaacatacattctcgagcaggtcccctgaagttgactcaacagagactagatttggcttctcattaagtgatgcagcaatcactgaggccattgttggtcctttggagagtgctttacttggtcctatcatcttccgtccatcaaatcagtgcatgtggtcaagcatggtgttgatcagaagcaatatttcaggcatggagtggctgcctcttcaagcacatggcggacggcaatctattgtccttctggaggaatctgaacctgtttggaagctagagtttaacctcatttccgatattcagaataagtcagcattgtctaaatcagagttcaccagccctttgtgcggtcaacatttgtcgaaagaaatacatgtcaaaaatagcggtgaccttcctcttcaagtgacaaaggttaaaatctctggagctgattgtgctgtggatggattttcagtagataactgcaagggatttagcttagcgccaagtgaatcaataagaatgcttgtttcttttaaagctgacttctcttcagctatggttcagagagatcttgaattggctatgactaccgggattttcataatccctatgactgcaaacattcctgtttgtatgcttgaccagtgcagaaagtcgtacctcagatccatccattggaaaacattgatattcctttttggaactgtatccgtgtttgttctggtgttcgcgagaggtgtcccaacttctttgtcagggggctctcaagattgctatatcaagattcatgatgggaaaggtaccatcgacaagcctgttaagccctctttccttcagtgtagcagcaaaacttccaggtaaaatttagactaatgctggccgctctcgctttctttgaattttacatggtttataattcggtatggttatgcctatgtaaacaggtcaacaagggagcacaaaagagacaaagaaactcataaataccctgcggatattcataatagccccaagaggacagaagacaagaacaatgcagatgaacaactgaatacaacttcaactatgtctctgccccctagtaatactgtggaagacaaggtatcaattgaagctccagaaactagtggaaatctaaccatcagagttgctagagacaaagggaagagaagaaagaggaaagtcggtggcgcaggactcgcagcaaagtttgaggtttctagcagccacagtgggaattcgacaccgtcttcgccattgtcacctagttcaaccccaaaacaaagctggtctttctctggcacaccatcagaactgaagcacagcagtaaacttgagaatggatctgacattgaggcaaggccaccatctgctaggaataaccatgagaagagttcttggttgcaaactgctaaagagcaacctgctccaccaccttcagtaacatcaggaaatccatcgccgtcgccatcgccttcacctactgcaccaaccaatgcatggcgctcgccattgttgtcctcgccttccccgatcgcgcctcgttctcgcgctcctggatccaacctgatgaaagataaggctgtgaagagaaccgagggcgccgcgacgacgacaacaacgaggaagaaagacttcacatatgacatctggggggaccatttctccggccatctgctggggaaggcaagggaggtggcgccgccatgctacaagatgtttgctgcttctgaaggcgcctccaatagcttcttcgcgagggagccccaggccctggtgacgaagccgccatctccatctccatcttcatcttcatcttcttcgcctccggtgacccgcggtcgcgggtcgctgccgtccgatgtagcatctggttatggaataaattaagaagtttgaaacatttcggccctggctctcctctgcatcatcctgcattcatctgctctgctctgccgttctgctaaccatgcatgccctaacttcttcagtagcttaaaacttgcaaaggctaaagaaaatcgaagcaggctaaagctaacttttttacctcagtactgatggctacatgtttaatctgatagtcacattcaacaaaactgaattttttactgaatttccgctctactagaacattcctctgctctgccattctgctaacctacactaacttcttcagaaagattaaaatttgaaaaggccaaagaaaatcgaagcagggctaaagttaactttttttttcatctcagtactacttgcattgtttaatctgacagccagaatcaacaaaactgaaagctttactgattttccgatccagtgcacgctaaaggcttgtgcatcattgccctaaactaaaagtactttactagtgctaacttttaaccctggggataatttcgcaatctgaaatttttatgtacatgagcgagatctggacgcattttatcgtcttcccggtggacgagatgagtttgctccaacctttgcacattcaactgtcagataatgcgtttccagctcaagattctaaagctgacatctcacttttagtccaatccatatgacgcaatggaacatatcttgcccgcccaaagcatgcaggcctctattttaatggacgatgcatgtcaattcattagttcccaaaaaaatcgctctttgtataatgcatgcagattagcctgaaagttagatgcgatatgcttcgcttgtggattttcctcccttggtgacattcatcgtagtcttattttgcagactttgctttcaaaccggtaagaatggagatataaaagctttacctaaaaatgacttttgatatattgtcctatttgcctttgtttttctacggcttatgaactgtaccaagctagctagaactttaagaaaaaatagcttatttccctgtaatcggttgctttcagctggaattgcagacactcgattacagagccattgacaacatgtatgggagtagaattcaggtaacatccaagaacagaagaacttgttcgttctattgttattatgtgtacgataatagccagtgactctcagcacacacacatcatcatctggcaatctaaaactgtgttatttgttgcagtcttgcagtgcatgcactgatcatttggcgatgcaggcatgccatccagctgtttcctctcagttttagtttccagccatcacttggagctgaagagtgacaacctgccacatgcaaaatcaatcagtaaacaactcatcatctgaacctgaatgttcatcatcgaactaacctctgttgtttcttgacacataaattcaggtaggagttggaactgaaagtatgggagaactcacccgagcctgagagatgtatcagagctgtagtcgttgtcgggtggaggtcgcgggtaagaagcattggtgacagattcagacgactgcccttcctcgtacacgatttctgaatcaggcccaggctgcatctcctccattcttgacatcctggacacctgcagcttcagatcgtcgtttaatcaaatgaacgagcagagcaagcatagagagaaagttttctttttagataatggaaaatggttcacatctccgagcctctgtcgagtttcgacagggcagataaaattaagggtacttacttgctccttcagccttaaattctcctctatcaattgcatcctctgtttgatcacacaaatggagcagttttgtgatgagaaagagaaatcaagatctaacagaagataattaatttcagctgcatttcagtttcgctctgtagctgtgtactgaagctggagattggccaaaatatcatgctcttacctttcgttccagtccatcgatctcatccagaattttcttgctctgaagaagaacatgatcaaagatcacggtgtgcaacattgcaactacgtacgtccaatggacagtctcatgttgctgcgcgtaccttggtcttgagaacagagcctagaccggactcgaggctcttctctagctcctgcagctgttccacattcagcctgtgcagctcctctcctttcatctgcctgcaggaacacacaagggaattaatggccacatatactagctgaaccatcctgtgaatccacagaattagacagtacctacaactcttgaaatagtgtaatcttatgtagcatttaatttctctctgaaaagtaatagtactcagtaactgtatataggtcctgtatggggagtttttacagctgtatatatatagttttcacgtaatctccacctccccaagcagttcatttcagattctcagattctctaagaatatgtagttataggaagtccagttttctcagcagctcgctactagccgcttctcagaatctccagctcccgaacaaagtctatatatagttataagtatgtacctcagcctaaggctagtttctgcaagctcctcctttagtctggcacaagtactgctgtcctccccctaccagatgacatgaataaatgcagttagggatacatgtactatttcttgcttgtatgatgataaacgatatgaaatgttcagagaagtaccactagcaacagtttcttaagaactgactaattaattaaggtccacactaattctttctagaaagttgagtgatatgagagggtatatcgatcatcaacatcacatatagctgttgcatttctcttttgtaatacaagtgaaagtattttcagcttacttgtaagtcgagttgagaaggttctgctctctgaagtgtcttggaatgcgagttgtaccggtcaataatctgttccatgcttcatcaatgtatatatagaaaacaaagttagacagagttggatgtttgtagagctagctaaggtttgtaatgttgaatccaaacgttttcatcaagatgctagtagtaccaaatattgttaggtagttcttctaggcccttcaaaatacaattgcttctgaactaccatattggaaggatatgaatgttctgaactaccatattgattgtttcagagaacgagaagaagaaaatacaattgcttctgtgaagaggtaagccacgcgtagcttgttctgtggccatcaatatttcatgcatggaccatgcatgcatgacatggcacaggcagcaggaatagtagaagtctagaagacgaagacacatgactatatcttatggttcttgttatgtattatgacatgatgaactagtactatatcttatggctcttttcaaacaaaggaaatttaaataaattttataaagttgagaaaaccctatatatatgtctaatcggaacgaaggaatagtcattccaaattcctatgaaattccttatggttggctcgaatcatagggatattagagaacttttaacttgaggtccaatcttttagaaaatattctttgcatctatctatcttccaataattatattatgttttttctatatatgctccatttaagcagtcatttctgttgttttcttgttttttttcttttatctctctgtgtgtgtgattaatggtttcatgtttatacatgtagactagtagtagtgctagccaagtttaataatagagatgtctaccgcctttaattttatccctcatatctcctcatcgattcgatcaggaggtgtatatatatatataaaacatgtgtactaccttcatcttaagagattttgcccatatatatatctacataagcaaaatcttttgtatttagagacaaaggtagtacaatatatctcatccataatacacaaactctaatgttatttatttgtttactatcacactagtatttgcactttttaaattatgtagaggctgctttttatactgagagattgttcgttctctctctcctcacttaccccacactcatcaccaaatgcaacataacactgttaaaagacaacacttgagtcttataagcacgatcttgagttttattatacttgctcttatgtacgtactccttctaattccataattatcatgtttgactagaactttaacaattttaaatatttagcttaaaaaaacactggaacatagattagttttaaaaagtactttaataaaattaaatatctacttatatttttatatattataattgaaaatatatttggacaaactctgatagcggtacgtaagctcagggatccatttgattggattggtcaatctttttctagctaccaggccaattggtatgcacactctatatccatgcatgctgatagatcatgtcatgcactggcaaatagtgtaagtgatgtacatgaaaagaatagatcgactagctagttttctgtcgtcgcttgtggagaaaaaaaaaacaaacaattaacagtcgcaaacctatcactttggagaatcccatatatgtgtgctactatcagaggtcgtttcgtttgacagctctagcttaattagttaccccgaatacaaagattgaacaattaacaagtttagattggttgtatttttgcttgattttgccatgtgttaattaacactgtaaacattctggtatatatatgtggggtatcagttaacaacactcttgacattagatatatatatgcacttctttccatgtgattagttcataacacaaaacgatcaacacagtacgtaccctcatgttacgacatataattaggactaaatttgtttgcatatatgtatacacaatggttagaaccatcagtaacccaagttcagttgacaaattaattagactgtataccgatatataccatatccattaaaaataatttgaattaaatagttgttagttttcattgagttgcctagctatgtttgaccaacaatatttttaagaaatctagttagtatttagcatcaaagttataccattagatttgtaataaaaaaataatttatgaatgagttggacttaaacctttttattttgaagttgcttaaaaataatggtcagtttaagcacgctcggttaaaactaacaactattcgtgacaaaagcaacagaattgaatatatatatatatatatatatatatatatattactcatgcatgaagaatatgtaattgtcatgacaaatctgctgctgatctctgaaagctgtaataattaatttcagtatatatatgcatgtacaaactacatgccttcttattcctgctttaatgaagaaaataatatcgatgagattaactaaaaccagatggtttttacgagttaaaatttcaacaaaaaactttgaacgatatatagtctgtttcctgataagcgtccagggtgttgtctacaagatctaattaattaaaatagtgatgtcaaaagcaataatgtaacaaacgtggaaagaacggcagtgtcaagaaattagcagagaagatacttggaagtccactgagcttgtagaaaaagatggagaaagatgcagttttatgagaagatccaaccagaagcaataatgtagatatggttatctatatgtataacaactacacatcaaatcatgcgagaacagggtaagttttccacgagtgctttcacacatgcatgcaaaacctgtcctactttagtttttttttcccaagaaaatctgctatttatctctggtcatccagtccaaaagagagaaaacacccctctctgccgagtctcttccatacggtcttaaattaactgaataagattgctgacttcaagagtgaaaaaaaaaactatatatgcttatatatatatagccgtgtgcctatcggtgtaaattaaccattttcattataaaaaatgggtcgagtgaaagatagaagagaacacgacataagtgctaaacaatatttcaaattaagcgcactatggagctataattaataacatcatatacagagagctctatttaagaagctgggacatttttttcctgggaattaaagaacattccctagaagaacatattacattactcatctagaagaaaatgaatcaaagcgccgaacaatcaaaagcattttgtagaatcagagaaagcaaaagacaaagacaaaactgttgtaggattgaaagaattttacacagtacacacactagcgaattctatataaaccaaagacaaaactgttttaagattgaaagagccgatgatgagaaaaaatatacacatctatcactgttgtgtatatggagtatatccaagaaaaaagagctgaccgaaaatccgaaattggaaagccatgacctcaatctcaactcctcaactgaacaactcaattagaagcacgataaactagaattttatgtttattatgataaattttatactaattaaacacgccaaaatgaagaaacgtacttaccggcaaaatcaattagggaaatttcagaagaaaaaagaaaccctgatcgatcgacaaagagccctaacaatagtacgatattccaagaaccgacagagagatcatcacccagatccgagatttaattgcaagcaaattaaacagaaataactgcgagcgagcgaaggagacccctgcgaggaagaaagaagcatatatgtgttggtgtgtgtataactgtatatacatgcatacctggtgctggcgaattggaagagcttgccggtggcggagaaaacgacgagcccgacctcggtgttgcataggatggagagctcctctgcctttttgaacagccccctcctcctttttgaagggtcacctgcctcgccgccaggttggcgaaccccccaatgggtatcctctcctttttcccggggg

SEQ ID NO: 5531 - DNA, 26699 bp, Oryza sativa
gatttcccccccttcctcctcctcctcctcctcctcctctccctactcgatttgctgcggctttgcgaggctggagaagaagggtttaagcgagggagagagagagaagaggcagagaggaatggggttttgggtccttttcaacgtcgtggtcctcgtgggtcaagtaaagcagagggcaggcagagggaatcgaccgttggaacggggaggggtaaaacggtgaattcaggtcagtgggacgtgtgtccctgacaggtggggcccgcacattcatccgagatgtttcgtgcttcgtgcgatgcggagtacgtgtgcgcccgtattttcgggagaaaggaaagggcacgaaaagaatagctgggccggaaaagtagttagatttttttttatccgagttctgggccggcccagaaacttggtccacggggctaaatgtgatacgattttgctatatatttgtcgacaaattttctcctaaaaatttgacagatgtaattacagtacaatcgtagtgtaattacactgtaacttgcatgtaatcacactgtaactatagtgtaacttatatgtaactttcaaaaatctctttgtaatatgttatttcggtaaaatggaggttgtgggaacaaatccttacacatatgtttgtgctgtgatttttttttcttccttaccaaaacaaatcttgtaatagatttaacgattcaaaattacgtgaaacttatatacaagttacactgtagttacatgcaagttacaatgtaattacatataagttacagtgtaattacactacgattgtactataattacatctgtcaaatttttaggagaaaatttgtcgacaaatgtataggtggtcccatgtgatatatttggtccgatataaagtgtggtcgcgtacggtaacagtgagaagggaatttttctactacgtactacatccgtcccaaaataagtacagccgtagatatccgtgcccaacatttaaccgtccgtcttatttaaaaaatttgtgaaaaatttaaaaatatttaatcacacataaaatactattcatgttttatcatctagtaacaataaaatactaatcataaaatttttttaaataagacgaacggttaaacgttgaacgtgaataatgtaaaactacacttattttaggacggaggtagtaaaaagatgggtatgcaacttgagtacgtgcttgacataactgtgatgcagtccaagaacttgatcgcgaaggaccgagatcctctgagaagaccgtgactttgatccattatcagtcgtccgatctacagtatctggtgaatagtaaatcaaagcagtagtttttacttttttactgtgtctacagtaaaaaaactgcagagcaatgttttgcactgtaacaccagattcattttactatgtttatcttccgttcgcttccaaagtcagaggagccggatccgattggcgaatgctgccaacgatcctgacgttgttgacctgacctggcacgacaatgcaaatccagtacagctgctgtttcagatgattgacgacaagccgattgcctttcccttatctgaaaaaatttggtcagatcagatgagtcatgaaatggatggatgcatagaggtcggaactgttggatttgtctgacgctgaacgcgatcgatcgatcgatcgagtgatctctcgaaaatgatgccccgtacacgtaggacttgtttactttgctactattttcaacattaacaagttttggcattgccaaattttagtaaggttgtcaaaattttagcaaggctaccaaattttagcaatattttatacgtacttactaaaatttgacaacaaactaaatgtagccactttttttaactttgccaaaaaaaaagtaaagttgaaaatggtagcaaagtgaacgagcccgtaaattactcatacgtaatattgtcaacctaggccttgtttagttacaaacttttaacttttcaatcacatcaaaacttttctacacacgtaaactttcattttttccatcacattgtttcaatttcaaccaaacttccaattttgacgtgaaaacacacccctagaatggcgatgaggacgaagctgatgtggagtttgatggcgacggagccatcgccgtcaagcacgcaaacttatctagctgcgactcctgatgttcctggccgtgatcgagctcctgcgttcttgcttaatttgagtggtcggatcggctactgagctggtgcggcggcggcggctaatcggcggcatgaggatcgcggtgacgggcgcgacggggtacctcggcagccgcctgtgcggtgcgctggccgacgccggccacgccgtgcgcgcgttcgcgctccgctcggcgggcggcggcggcggcggcggcgacgtcgaggccggcctgctcccggcgtccgtcgagctggcgtacggcgacgtcgccgacgtggagtccctcgccgccgccttcgacaggtgcgacgccgtcttccacgtcgccgccgccgtcgaggcgtggctgcccgatccctccatcttcatcacggtacgtgtacaatcttttaaaaagaaaagaggattttaaaaaagaaactcgcgaaagttttcaagcaattccgaaaaatatatgctctataaaattgatttggtcatttggtgttaaaaaaatgggcatttaatcatatcctcggacgtgttatgattatcaggtcaatgtgggagggctcgagaatgttttgaaagctgccaggaggacaccaacagtaaagaaaatagtttatacgtcatcattctttgccattggcccaactgatggatatgttgcagatgagacacaggtaccatatttatattggagttctccttaattagctccctcagttttcaaatccttcggtctagaaaatctgccatttcttgtgtgagatgtccagactgagcatgctaaaaaaaattgtgcaaaatatgatgatatgtatacttcaaattcctttcgtgaaagaaaaacatttttgcagagtaaacaataagttgctgatattgcagatgcatcaaggaaaaacattttgcacggagtatgagaaatcaaaggttcttgcagaccagatcgcattgcaggcagcagcagaggggatgccaatcaccatcgtctatccaggattcatgtatggtcctggaaaacttacagcaggaaatcttgtttctcgcatcgtaagacaatttctctactcctagttattcatcctgcatatatggtatatctgaatgacccaaaaaaaaagaacttgttcctgaaataattaacagccatgaatcatgatcagaaacttgaacatcactggctcttaatttgcagttgatcgagaggttcaatgggcgtttacctggttacgtcgggcatggccatgatcgagaatcattctgccatgtcgacgatgttgttgctggacatgtagcagcaatggagaaaggcagagaaggtgaaagatacctcctcaccggagagaacacgtcgctggttcagatcttcgacatggcctccaggatcacgaacacaaaggcgcccagattccacgtacccctctggttgcttgaaatttacgggtggatttcagttcttgtttcaagaatcaccgggaagctcccgttcatcagctaccctgtatgtctctttctgtgctccttttatttccagtacttacttaggttcagagtttgtttttgcagggtctagttagattcagagtttgcacattggtgatgatgatgatgtattgatgtggttacttagatttcagttcttgtttgggttttgcaggcagtgcgtgttcttaggcatcaatgggcatactcatgtgagaaggccaagaaggagctagggtacagtcctaggagcttgactgaaggtctatcagagacgctcttatggctcaaggacagcgaaatgatcagattttagtgttctacatttcactcatgtaaacatatcagcattgctgtaactgcataaatagttaaatcaaagaaaacatgtggtttgaaatttgaagatgaatgcgtgcaccaaacagggccaaatttcttcttagatggtcaaatttgttcctgctgatcactgatcagacttgagactcgagaggcaaaagcagatcatatttgggcccggcccacaagtgacttgggcccgcttgcttgtgggttgactaggggtactactggacaggctggtggctggcctcgccggaaggcttggaagcccgcgttgactagtggcggttggattggcggcggcggcggcgactcgacgatgggcggcggcatgagggtggtggtgacgggcgcgacggggtacctcggcggccgcctgtgcgcggcgctggcggccgccggccacgccgtgcgcgcgttcgcccgccgctccagcgacgcctccgggctcccggcatccgtcgagctggcctacggggacgtcaccgacgaggggtccctcgccaccgccttcgacgggtgcgacgcggtcttccacgtcgccgccgccgtcgagccgtggctccccgacccctcggttttcaccaccgtacgcgtgctgattcatttctgatgttttcctgtggcaagtagagggtaactatattcattcaaatcaaagtggggagtactatagaacgctagatgaacctagacattctgcctattgtgcgatgctgtttagggtctttgaaaattatggctccaagtccaacaataattgattttccgtttgctgttctgttcatgaaactaaaatgcatgcaaattcggtttggcttggtgtaagaaatggcacttgagcatgcgcgttctgtgctatgattacaggtcaatgtgagaggactcgagaatgtgttgaaggctgctaagagaacaccgaccgtaaagaagataatttacacatcttcattctttgcaattggcccaactgatggttatgttgcagatgagacacaggtaaaacatgactttgaactgtgtaagctttttaccatttcatgtttgaaaagcttgaatagtaaataaaaggattgtattatgattgtctttagtagttctgcccataggttctgttctaagctcattccttgatatgtactccctccgtcccaaaatataagggattttgaacggatgggacatttcctattactacgaatctaggcatactctctttgtactttcgtagtactacaaaatgtctcattcatccaaaataccttatattttggtatggagggagtagtatagatagcacttggctgacccgacattcatgttaataggagcacataaggtgtccattagtagtatagatagtagatagtcgtttttcttgatttccattgaacttttaatgataaatttctataatgggcaactcactcttgaaacctagctgttcaatttaccccattccaaagtattttgatttacccctgacactctcttatttctaccacttgtataattctttttgataccgacttttagtaacaattatccaacttatgcatgtcctgttgaaatggagtaaccatttcatcaaattatcctctaattacaaaaaggccttttacaaattaaagtaattctataagctataaacagagttcaattgttctaaatttcagagacatcaagagaaaacattttgctcagagtacgagaaatccaaggttcttgcagaccgaattgcattgcaggcagcagcagaaggggtgccaatcaccattctctaccctggagttatctacgggcctggaaaactaactactggaaatattgtttcccgtattgtgagagaatttcttactcatggctatgtcaaatatgtagttatttattatcgtatatttgtttcaattttaaaatataacatttcctgaaagatagccatgaccagaagaaattaaactgttgtgattcttgcagttaattgaacggtttaattggcgcctacctggttacataggagatgggtatgatagggaatcgttttgccatgttgacgacgttgttaatgggcacatagcagcaatggagaagggcagaccgggggaaagatatctccttactggagaaaacttatcattcaaacagattttcgatatggctgctaacattacaaatacgaaggcacccctattccatgtacctctctggttgattgaaatatatgggtggatttcagtttttatttctcacatcactggaaatctcccacttatcagttaccctgtatgtccagtattcttccttatttaagtttaccatctccagataggtcatgctgttgtgcttactagattctcaatgtggattgcagacagtacgtgttcttagacatcaatgggcatattcatgtgataaagccaagagggagctgggctacagtccaagaaacttaactgaaggtctatcagagatgctcttatggctcaaggatgaaaaattgatcaagttttagcactcaccccttgtgctaacttgtgctgcattccacaccatgtaaactgagatctgatttaaacctattaactgtaagatgtacatgtttggtgtggtgttaatgttgtatcatatcagtaataacttgagatgtaacatggtagtactggttccatggaagaaaggaaaaacatgttcttcgattgaatattggttgatttgattctttacaggctgcagttgcataagtagttacagtaaaaaccacgcaatttcaaatttgagaacacgtttaaatggaattttatcgctacctaatgctgggaaggtatatgcagaaatccttacactcgcattgcaatttcaaaacaatacagaatgttttgaaattgcgagatgccgaacacagctcacgatcaaaatgttgagcagaagaaaatcagaacatgtagcacaacaattcatgacacaagcagctatttgataaactgaaatggtgaataatccatatacaactacagattggaatacacaactgagctgtttccatggtgatcactgaccgctcgatcaattaaaaaaaaattccaaacccagctggtcaggtcaattcctgaagcaatttctccagcgcatcagaaacaagaggaatgtggaggcaatcttggccatcagagtgctttctgatcttcaccagatcatggtctttaaactccgtcaggtgggagttcagcgtcacttgactgcttacaagaaaacgctcacggcatttggtatacaagctactgaaatgcatacctggcaaacaatgtagcaaggtttagtttgtaaacaacaggaagtcataagaaaataagtctgcaacaaacttgccttcctccttctcgtgtgccaactgatattcagcaagaactctgaagacactttgcgcatttggtgtcaggctttgcagaacaacgagggcggttttcatggtttgggcatgaccgccgctggcaagaatcaaggggtagaacacaccttcaactttgtaaggtgcaaacgttgggacgtgataccagctccacttgaactgtgtgtgcaccatcttcttgtcccatactacagttatttgacaggttaggaatcttaaacagtgaaggcattacaggaggttaaagctagccaggaacttacacaaaggtgcattaacatgatctactgatgcgacaacatggacttgcgggcagcacgaaacttgagctaggtactgctgtgattcagcgtcacgcaaggcaggtccgtcgatgttgtgaataagaaggcatacattgtcatccccattgtcagatgtctggttatttagaaaggagataatatcatctattgattgggatgcaaatggctgcaactgggaccttgttgctgtctggcgttttctcttaagttttgtttgttcccaaaatatttcagctattgtcactatgacctgaaatggcaacaaggcagaaaatttggcagaattaagagctttgatgtagaaatcaatagtcctccacaatataacaagaacttcctgattaatgatagtaaggaattacatgcacatgaatttacttgaggtgccgaatttgacaatattggaatggttgaacaaatagaaggtacagatgtttcaatatgttaagttacaggtgtttgggatcatgatcctaataggcaaacaaggatctccatatgactgcaagcaacaccaagataaaggaattgcgcgcagttttcatgaatcatctatttcagcttcacaactagtcaactattagagagcaatgtttgaagccactttgagcatgaatcagtggaaattaagattgcacaatcaactttggataccaaattgatgcctttggtccttatagtatttcatttgtcctaaaccttaaccccttaaggactgtaggctcaatgcttttttttcccttttcaacaacaatgcgataaagtaatccatactgcaggcaacaaaggtcaatatcggtcaggaggaggtcatacttgcttcaagttgatggaagggagatagccattaaccacaatgacggtgaaatcgctcaaggtcgtggacgcaaaatcctcaagcaacatcttcttagatccaaatccatacatcaggagcccaaatccgcacctgcagaagaacatcacatcgatcttttggcttcatccacatcaacatcaacactgggaggattttgggtagcagacgaacctgagctcgaacagccagttgcggtactgctccttgtagcttctcgtcagagcctccacctctctctcgtgcttcggggggatctcagcgagggatgctcgcagcacctgcaccaaatctcgaatcagggcattcgccatggcctcgggaacacgaatcggagggtttccaggaggggcgggttatgcagacctgctcgtcgacgaggttgaggtcggagagcttgccggcggcgcgggcgcgcttcttgccagaggagggctccttctccttggccaggaagtagctcctggagaagccggcctcctcgtcgtcatcctcggacccagagcttaccccagcagccgccgccgcgtggccgcctctcagtgccatcggggttcgcttccgccgccgccgccgccgcgaggatggaggacgagaaaggggaaggacgcactcgtgcacagcctgccggtatataactgtaaatggttcaatacaagtagaaaataacaaataagtagaaaataacaaatagtaaacgatacggtatataactgtaaatggttcaatacaagtagaaaataacaaataagattgaatcttacctaaatgacaatgtaaattgttcaaaaggtcttagataaatccacgggtgggattggtacatcacaagatgcaactcctttttgcttcatgcttttgaataagtaacgcaatgcttgacttctccatgcctcaatctccaaccatcataccatgcaaaaatgtcatatgaggttcattgttgcacacaattttgtggtaatttatacaaatcaatatctccttaattggctaatcacagatattattgaagaaattgatttattactaagtactggtctagtagaactctatagaagggggagagggacggccggactgagggagagccagagaggtagttcactagcgctcaccggagtccggagtccggagggggagggccgctggggccggcgcagagggcgggaggccggagtgccggacgcggcggggcggcgtcgggcgagaccacgggaggccgcgcgaggcggggccgcgggaaggcggcgccaaggcgggcaggcccaggccggggggcagccgcgcggggtgtcctccggcgtgcggcgtcggaccgtcggtggctcggtgcgtgcgggagtgcgccgtgtgggcggtgcggcgtgggactgggagaatagccagctagggttttttttttttttgttgcctgttgggccaagcttttttgataggccaagaaaactgaatacctgctcttctctgggtctctgggtcaaattctagggtagtcttaggccgagtacctcttggggctcttggggcgcgtagggtaggtggtttatgcggtttatcggggaaaaccggttttcccgcgcttttgctacctcttttcgtggcaaatggctcgatcatggtcgggcccatccagcagtttcagttgggcattgtcaattttgttagcctcgaggatcaatttttcgtgaagcgcctacaaatcgggcatccgatttgtttgtcaaaaatcgggtgttgtttcactaatgaggaaaaaaatgtttcaccaagtagattgaaaatgtttcgatcttttaaaatgctgaaacacaatcaaattacaccatgaaacattttttttacaacgtatgaaacaatgatttcgaatatattaaaatatgaaacaaatccgagtacatcgagaataagaataaaacaccatcgaattgaaaatgtttcagtgctgaaaatggtgaaacagaatcaagtcacacaatgaaacattttactacaacgtatgaagcaacagtttcaaatgtattgaaacatgagacaaatccgagcacatcgagaaaaaaatggaacaccatcgaaaaccacattgcaacattttgatctaactgatgaaacatcatggtacatggactaaaacatcacaatattcaagaggaaaacctaaatctgcctcttcctccactttggtggttagcaaccacaaccgcatcgacgccgcaccgagctccaccgcacccgcatagccactgtcgttgacgtcgcacggagctcggctgcgcagagctccatcgccaacagtggcgggggcgctgccgtagcggctgcttgctcagggaggtggcggcgttcgacggtgtcgccgtcatggaggagaagcgtcgccgtcgcggaggaggagcgattggcagtagccactggctcggggaggtggcagcgtttggtgtcatcgccatcacagcgaagaaacggggaggagaagcatagctgtcgcagaggaggagcgattggcggcggccgtcggctcggggaaggaggcacggcgccgccgctatgcaacgtgtgggagagagatgagcgagataaaggagaaaaaatagggaggggaaaagtcacgggtgtggaaataggtggttgagagcccccgatattttttgctcacgttgggcgcccaagactgagcatatccaaccttttcacctcttggtattactccatcggcttgttagccgatcggctttctggtgatctacgtgtttatctatcttgtcagttgcaggatcaaactgattggcacgcctgtacctcatcaatattttagacctgcactggagctaaaatgatctcctaggccgttatgttcatcgacttagtcagcgccaacatagttctggcaccatcggccaagcgcggatttttcatcaacacactgccacccagatccccgcacgccccacgtggccacgcccgatgatgtcccctctcgctatgctgggctagcctggacaagtggacaggtggtgagctccgccgaatgcatcaaaatgatcactgatcattactgtcactttgccgcatgcaatgtagcctgcagtacttagtttgttcctgttaattaccatgcttagttacacgtgctatctttgaatcataggttcgccctagaatattcttgcacaaataatcgagtcgaatatgatgctttgttattcgtcttacaagtattagaagttatatgagcaacacatatagatatagatggccaaatgggccacctggcccgacacgccacgtcaaacggtcaggccgggccgggcctgcccacggcctccacctacggcctaataagagtcaggccgtgctagccagcctaaaggcatgacgtgctcatccttggaataattctattttacctccctcattttttggccgcgccttatattccctccctcctctttggcagtgccttatatatgactcaataagtctatattgtgcccctcatgtttcgtgccaggccggcccactatgccaaggcagcggcctagacatggcccaactgtcgggctgggctggtgtcacgcccagaaatttagcccaaatttccagactattttgtgtattaaatccctgtctaggaccagccagggtacacaaaacgacaagtaatatacagttccaaacgtaaataaagcgtaaaatacttacaaaagaggcacttagtcctcgcaccgaaacgaaagcagcagcagcggaaaaaggcgatcctagcggggcttcagctccactccacaggcaaaactcaactggggtctgagccttggtcttctaacttcgtctttagcttagaagcactacacttctgaatagggggaataatagcaaggctgagtacaaccaccgtactcagcaagccacaccaacgatgcagatgtgcaaggggatacaaggatggtttgtggctatttgcataaaggcggttgtaaaacattttattgagcaaaacagtaaaactgttgagtaattagagtaacattaaatctccactgatcaacgctacaccacgttgaacaggcccaaccaacccacctgaactacagcgtattgggtcgacttattaagtgtgagactaatcacggtgaatctggtcgaccgcccataaccgcgggcacggctattcgaatagctttactctgatcagaggtgtacaactgtacccacaagacacagccccacgacacatttccgtgcgccgacatgccaccacgacataccggaaagaggccgtgacaggacccttcgcataaccccctctaaccaagcacaccacacctcaggtttcaccccccgtccccagcgggcaacgggcagtcccctctcgtgcctaggtgaatccggaagcgacagaggccgtcgcagggcccgccccgctctatcacgcccacccttgcctggatgcgtcggctagaggaaagctacactacaagcccagccgttgcccacgctggcttgtggtaagtacgataagttcttccagggcatcccgcgaatcggtccttaactgccatgggtgcgaccagcaaaaccatgcacccacagcccaccattcagtcgcattttagttggataattacgaccatgaagcatggccagatgtctcgagcacgcagctcactctgatactaaaaaggtctaatactgtaattatcccatcaactgagctagtggtaattaagcatggctaagcatatagttctagctaggtcatcaaagtaacacaagctaggcgatttattacccatggttgataaaggacagatatcaagtaaacatggcacaagcgagcagataggtaaaaccctgaccccatgtaattagcaaaacatgcatatttatttgtaaacggtaaaacatttataaattgggatcaatatgctcaaggggaatgtgtgacttgccttgcttcttcaaacaatcttccgaactcttatccttgcgaccgtgatcttctgaaacgacggattctacacgcaggcacgcaaaacgaggaaaaactctaataaaaaccaaggaaacagaacataaaaagtaaacaaacatgtagagctcaattttagatgaattttgcaatttgaatggcccaatttggagttcgaatgaattagatatgaattttagaagttttgagccactaaatgaatttctataattattaatgatttattgcgcatttattaaatattttcacaaaggaaaaggactgccgctgacgtcagcaagagagtgggccggcgccgacaggcggggcccgcatgtcagcgagacgaggtggcggtccaccgtggaccgggaccacaaggacggtccaccgccggtccacgggttggacggcccagatcggccaaggccgatcggacggctggggacggccgggcggcgcgcagacggccagtcaaccggcggcggcggcggtgcaacgcggcgctggcacgggaggcggctggcgaagaggaaaaggaggagggaggcggcccaccgagaggcgcggcgacggagggagcggccgcggagggaggcggcggcgctccacggggcgaagacgacggtggcgattcggcggtctccaacgaaggtggaggagcggccggggtacgggggagcgcggctaacgcagtagaggcggtggtgtggcgcgaggtggcaaggaacagcggtaagaggcggccgaaggcggcaaacgcggcgatgtcctcggcttcgcggtggagatggtgttgctgcggtggaacgggaaaacgaagcagaggccggggtgctacgcgatgcggcgaagccgacggtggcggtggcgtggcttggtggtggctagggcggcggtggcgcgctaccggagtcggcaaagtggcggtggagctcgggttcacggtggaatcggtgcccgggtggtttattgcggaagcggagcggtggatgggatgcggcaaagcgcggcgaggccggcgatgcaagcggcgcggcacggggacggcggtagcggcggcagcgcccggctggagtccgccgacgagcggcggcgcttgggctcacggggaggagggggttccgggcatgggggagcttgggagagaggggaaaacggaggaggggagcacgagggtgctttatatagggctcggggatggagatcgtggccgggagaggcgggatcggccggtgacgtggggaggtgaagtggagctcgtggggaggtcaaaccggcgccgtttcttgcggggtgagtgggggaaaaggtggaggacgtggagggggtcgtgtccacgtggttagatgcgagctcgggtgcgggagggcgctggattttgcggcgacatgggcggaaatggcggctggggttggctggcgagaggtaggaggaggagctgacaggtgggaccgtcggccggatggagagagaggagggaaaccgggggacataaagtagactttcgcaaggcgcgggccggccgagagagagagaggaggcgcgcggcccgcgggagaggaggggaaggcttgggccaagcccaaaagggaaggaaggagaattaaatttgttttctttttatttaattgtttaaatgatctttgtgactttaaaattatttcttgagctccgaaaatttgcggaaaaatccggagagtattttagggcacaaagaatattacaaaatattctcagccaatgatttttaaaggaaattttaatttcctctataatttcacttgattaaattgatttaacttttaatataatttcttgaaatgcattattaattgatttttaatcccaaacgaaaatcggggcgttacagctgggccggcacgggctgacaccagtcggggcttgggccttttggccatctatacacatagaagattttggttactcgaattgatagtgaaacaagttttcagggtgtataaccgttttgacgggccagaaaatagatattatttagatatatgtttaaacattttcgtcaattttgatgactttcttattaggcatattgtgttaattttgatgattttcttattaaacatattgctagagagaaaaactttagggcaaatgatttggctcatgttaaaaaaaagagtgtcccggtgtttcaaaagtttggacgaaattgatgaagtttcagatgcagggtggtttgaccggcgcaccgaggcctgtttcactggagaagccgacggtctggtatgaggccccaaagttattagtctctctttgcataccacaattcaaagtatgcaatagaattttaatggacactataactaccaaatttactcaatatctatgcaacatagtgctgataacgcataacatgtgcacgagtatgtttgtcttgtgtatcatgatcctgataggcaaaccaattttgtataaggaagttttaattacccgatatagatacaacaataaacttgtcttgtaaatacacattgggtgcaacagagtgaggatagtaaaattcttatatcttatgcagtcaaatggagaaaataaatactaataatataaaattaataaattatggtatcaaaagataccacttaaatatatttcaaaatttaaaagttcatttacgatcatactattaaataatattaatacttctatctgtgttcttcccagcactccttttccactcgcatgctttccgaactactaaatgataaacgatgagttttttgaaaaaaaaatatatagaaaagttggtataaaaatcatactaatttattttttttaagtattttagctaatacttaattaattatacgttgatatgtcgtttcgtttgtgtgtaagagaaggggttctcaacccttcaaaataacataacctagatttgagttaataaaatcgatgtattttataaaagctcttttattagtttgcaagtgtcatgtttattgcaaagatataaaacaatattttgctagtttataaaagtttataatagagtgggtcttacatattataaaagtattctttatagtagtctttaggctctgctacctaacatatggatcatttataagaaataaacaatattattgtggatgtgtatgtagatacaggacttatttagtttattgctactattaagattaccatattttagcattgtcaaattttagcaaacacatttatcatattctaccaaaacttggtaattgttgtcgattgacaaacaaatctgctgaagggcaagttatcacttaactatgtgggatgtatattgatttattaaaaacaaaattggatgccctgatacaaaccacttgggttctatttatagttttaaagccccatgtttgcaactctatggtttttgtttactcgggaattgacctaatcgcccttatgacaaggacatttacatgggctaaaaaatgttttggcccaactagtgggtcacgggctctaaaggttcagtcctaggttgtttattggaccttcatgggtggtaggtctgtttagagcccaactggctaagtgatctcggcgtgcatttgaccggtcggtgatgtgttctgcttctgccatccatcatccatccatgatccacgatctgtctgacacgatttctacgtccctctatttcagcctgaccggtagccatgtacactttaacactataccgcaatgtaacatgagcatgactgccatgacataacaaatgtgccagtaaatcaacgaggggtgaagtttgcacttcctttgatgcatcatgtatattagtgtgtttatcatatcaccaggttagccatcagcattttcgacctttctaggtggttcctaactacatatatgcatgatgcataaacacaacatatactatgttagtttataaaagtttaagtgctatccatagcaataggagtgggtattaagtaccttatagcctacttatatattataaacgtagtctttaggctatgctacccaacatatggactactcacaatcataagaaataaacaatattattgtggatgtgtatgtagatatagggcttgtttagtttgttgctactatcaacattaccagattttgcattatcaaattttagcaacaacacatttatcatattgtaccaaaacttgtaagtgttatcgattgacaaacacatctgctaaagggcaagttgttacttaattatgtggaaatgtaaagtggaatgtatattgatttcttaaaaaaaatagatgccctgttacatactacttaggttctatttatagttgtaaaaccctatgtttgcaactctaggtttctccttactcgggaattgacttaatcgcccttatgacaaggatatttacaagggctacaataatcttttggcccaactagtgggtccatgggctcttaaggtccagtcctagattgattattgggccttcctgcgtggtaggtctgtttagagcccaattggctttgtcatgctgcttcacctcctgttagtgaagggtcttcgcttcgccgcttggtaggtggttcgccacttggtactcgccttcgccgcttgcaagtgcttcgcctcgtaactaagtggttgtttcggcacgttcggttgaaagtcctcatggtatgcctccaacaacaatgttgtcaatttgtcaaaattttggtattgactaatttggaaatattgattttggtagtaatgtgaccacccccaaagtgaacaaactcgtattcaccagtgtattgctggagaaataaaaaaaaggaaaattgtacacttacatcgtttttgttgatgtcgaaaatgctcttgcacttagaagcccagtcaacaattaagagcaattcatgcgcatcagcgatgaacacaactaggtccgcacccgatggggcatccggtttatggccatgagtaatgaggtgttcgggaaggatgaatcgacgaaggagatagcttcgtctttgcggatgatcagtggctcaatcgattggaaaacaacactgctatacacacgaagaaactattacgaagtgcgtatgaaaagatccctacgtacgacacttcggggacacagaacgctaaaagcccatgaaaagtcacagccccatagcccactctatcaataagcagtctggattcttctagtacagggaaaaacagatcccctatctcagattgacagatttagtacccctcttactccttcagtgcttggcttgagcggagatgcagagagcaaggagagaatcaactcaatcaaacatatgagctacaagaatatcgattgcactagcagccgacgcggaggacgctcacctacggccacagcccacaatacgagcagtgagctataggtagctggttggcttcatgcacaggtacggatctacaaaactaaccacttatgctgcaaattaaggataacaattcgttgtgtaggagtcaatagtgcactgctattagcatgcagtaatttcctggtatgatttgaacacgatttactcatctggagtttggacagatgttgcctgtggtagtatggtagatcttctccagtatatatagatttgcagaaaataaaaatatacctcttattcttttggtttgcatcatatatgctacttcaggctgaattcttttaactaaattagaatccatacgtagtaccaaacttcaaagcttccatgcttctatgcacataaattcttctatgcttcttcagatttcgtagaatagaacagtagaagaggacatcaaaggcttcttttctacctgtaatatttccagctataagaacgaaatctaacatacacaataaacatcttttcttgtgaaattggtttactatgaaattaatgaaaccaacacgacgagttaattgaattgccgacaatgaaagggttcttaatgtgcatttttagtcctaaaatgcaatttcagtttatgaaggttgaagcatcaaggaatgtgcaatgcatttgatctacggcataagaaatactcaatctagatggcaaaacatagacagggacatacctggtcaggatgctcatcaagggatacttggagattgagtttttttttttttttttgttgaaccttacagatcgaattctgttacccaaagattgtgaaaagataaggagaggaggttagctttggagggaatcactggaaaatggcgggaccacgtcacgacgttctgcacatgggcctttattagttatgggcttaagtactaatgagaagattacaacatgtaggctaaagaagcagcccatggtggctgttcgaacatgttccgtaacaaaattattcgtacgcatagagttttccattggaaaacacctagaggtcttccagcttgctccacaaagtgatgggctagccggtctgggttcgaagctcacttgttctatttatttgatattaggtcattcactaatattagtttttttcatggcggcgacggcggcccaaccgttggcagagacaaccgcgctgagatctgtgcaggcggtgaccgcacgcgctgcgtcgtttttttagagagaggagcggagttgggaatggggaagaggactttggtgctttcgctctgggctccgcaacgatggtcgtttcttcagcctacggcccagataagttggccggagtaacggctaggagaagtgtcgagaagttgaattttggcaagaaattcagaaccttctgaacattgaaaataaactgcattccaaagacgagcacaacatatatcaacaccgaaacacatgcaacgatgacttcccagccaaacattgtattttcacagctaagtaatctcggcgtgcatttgaccggtcggtgatgtgttctgcttctgccatccatcatccatccatgatccacgatctttctgacacgatttctacgtccctcgatttcagcctgatcagtagccatgtacactttaacactataccgcaatgtaacatgagcatgactgccatgacataacaaatgtgccagtaaatcaacgaggggtaaagtttgcactttctttgatgcatcatgtatattagtgtgtttatcatatcaccaggttagccatcagcattttcgacctttctaggtggtgtctaactgcatatatgcatgatgcatacacacagcataaaacggagccattgcatgatactggtatcgatcaatatgctaaattgccaatatgccaaattgccaatatagagttacattaaatggaccgcaaaagctgtgcagtataattgctcaattaatccttttttccaggatcattgatcaatttaattttatgtatggctatgtaacatgaaattaagaagcacgactttaggcgcgcttcgcggcgccctgccattcattaaagagttatgtagcttacagatgattataggatagcattgaatagtactcaaagaaaagcaaataatatgactatgcaagagctgctgagagcatctaaagcaaagcatacttctgaccagtttgagtaatattaagtacaaagatagtcatgcatggaagtcaatcgatagattttataatcactttatagtacatgtcggtaagaagtgtcaacattatcacttaaactatatatagaaaaaaagagtaaacaaaaaatgaactcccggctttggtttcttcctcttacccattaatttagaaatggaaaaactaatatcaaacaaaatagaaagatgagataataatttgtgcagcaagttctattgtcagtttgtttgttctatatttggaaccggcccattgggaggaagcctactcggtgcagcagcggtgggagaacatggcaaacacgcccgacattctgaagaagggacttatatccctcaccgtgttagttgtctgggagatctggaaagagaggaatcggaggatctttgaccataaagagatggcaacgagctccctgctaacgaaaatcaaagaggaggttagcctttgggctctggcaggggccaaacgtttacgtgagttcatcccgcaccctgtatagtgtatattttacgtgtaacaccttttctctctttacccttaggggttgtattttctcctgctttattcaatgaaaaggcactatcttgtgttgttttccgttcaaaaaaaagtttgtttattcttgtctttggtaactaagcggtgataccgctgtatttaaagaacatgcttaagagaaacttaagattagtggcaattctcacatttccaaatattgtgtataaaataatacatcttgaactgcaatgcagctgcttagcacattataacatgagaaagcagagccacaaggttgagaaacgctcctggaattttgacaaactttagcaccttctatggtagtagccaatccattttacatgaacagaacaaaaggagtcatcagatttgatattcccatttataatcagattgcacttatttctctctcaaaaaaaaaggattccactgtctattaacaaccatttcacactaccaattagagtagaaggcaaaccggaaaggaagataaatattagtaatttttatccttttttaacactgaaacacaactgtattatagatccaaatctggtaatatgctttttcattagtcaatgaggatgataattttaacagagctagcttgatacaaagacatgactcaggaaaagagtaagttgcatctcctaggcaaggtggtgggtgctcaacctcatggcacactaatggcacaacctcaaactgacctgaaatctaaagtggacatgaaccttcaaattttgcattgattcacttgggtgctacatagaggacaccaaaaaacttcaaagctctgtcctgaccagggtgctaccatgatagaaattagttggtgatgccagcatgttgtcggctagttctaaaatacatattgtgggcagttttctccacatatatttagtcaatctagcctcactggctcacagctccaaagtatattagtttgcccaccacagcttctgtggctcctagcagtcacttccttttatgtaattaacacataacagatgaagcttcagcgcataaaaactcagaaattttcttttcaaataagcatttagttgattcactttctgctgatatcatccgattactgtaccaaaatgtagaatgcctcatagcactggtgaatcctggtgtaatatggatgcaaaatcatatcattagagctagcaatttgagattatgtctgagatggtggcgagcaatcagaaccagggtaatatggatgaaaaatcctatcattagatgtagtaatttgagatagtgactgagatggttggcaagcaatcagaaccagggataccatggcaagtataactgacaaagacgttactcacatgagaaaatagagcgccatcgacctcaagcgcttgaggtgccgttgccaaaggcacggctgcgtatgatgtcttggggaaagtagagtgtgtgcacccagtatcagagctaggcgccgccacctcagatctatgctttgctgcctcgctgcgctgggacagcagaacgacgacctcgctaagccaaaccgccggttccctccgaatcaagtgctagcaggccagttcaagcgatacgccgatacgctgtctcttgaacgacgacctcaccatcttccatcgcgccatcgccagcaacgaagggacaagagaacggtgggggtcgatggcagcgtgaggaatgaggatgtaaggggagaaagggagctggcgcgacctaggaaggaggaaggcggtcgcgatgggctagcgtttcccaaggggatgggaacagagagagagagagaggagaagggcggcggcgggctagggtttgctcaggctccttgcgaagctgcgatcagggttcactctatcggttgaggcatttgtatcgggggtcaccgaaatcccgaaatttcggtccaaaatttctgaaaatttgagcaaaatttagttgaatttgaacaaatattacccaaattcatgaaaaaattgaaaaattgaaaattttcggccaaaataatatcgtatctggggtgaccgaaaatttcggtctgaaatttccaacactggttgcgattggagagacagagaggagggtgtgggtgcggggaaatcgtgtgctgctgagctaacgatcccgacggtcagatatcaatcggatggccaagccagacgattaaagagagcgctccaaattcaccagccttccagcgcgggcggaccgacatgtggacccacatgaaagtatggcccagcgaacagagaaagaacggtaaattttttttgtgtaaaaatcccacgcgccatggcaaagccaccgtgcggggcgatgtggatagcttggggagcgagcacgtcgtgctgaaatccctccgaacgccctggtccgagcagatcgcccttacttttagggccccatcgtttcgctttttttctaataagccaaaacggcttattagaaaataaaaataaatttgtaggtaaaacttttatatatgtgttcttggtgacttaaaagtcaatactgaaatagaaactacgttgaaaatatctcaaaatcaatctcataattaagtttgaaaatttaaaatttagcttttttttctgcttaatgggcaatccgatgggagccttaattaccccgactagacccctatcaaggatccaaagaacttttaccaataaaggagctcgagcaccagccgctggtgtcaccattctcctcttgcaatttcaccaccaccgccacggcctctgcctctcgctctctctctctaggcggcgcaaatggcagcctgcgtcgataagtggccggcggcgtacccgtgccgcctgccggataagttctactgcgccttgccggactgcaccaccacggaccgtccggtggcgccggcgccggcggctagcgggagcagcggcgactacgtgtgggacgcgctgcgcgccgaggcgcaggacgacgcggacgacgagccgctcctccgcaagttctaccacgacctcgtcctgtcgcggccgtcgctggagtccgcgctcgcctcgctgctggcggccaagctctgcatccccggcgcgctgccgcaggaccagctccgggacctcctcgccggcgcgctcgccgcgcacccggaggccgggcgcgccgcgcgcgccgacctcgccgcggcgcgcgaccgcgacccggcctgcgccaagatggtccactgcttcctctactacaggggcttcctggcactgcaggcccaccgcgcggcgcacgcgctctggtccgacaaccgcagggcgccggccctccttctccagagccgcgcctccgaggtgttcggcgtcgacatccaccccggggcgcgcattggcggcggcatcctgctcgaccacgccacgggcgtcgtcatcggcgagacggccgtcgtcggctacggcgtgtccatcctgcacgccgtgacgctgggcggcacggggaaggagtccggcgaccggcaccccaaggtcggggacggtgtgctgatcggcgccggggcgagcgtgctcggcaatgtgcacattggcgacggagcggagatcggagccggtgcaatcgtgctacgggacgtggcggacggaaccacggccaagccgatcatcggcaagaaggcggagccgcaacgagagcttcccggggtaaccatggagcagagatggtcggattgaatggtttgagtagcgtgcagtgtgaacgcgaactggttagtacaatagagtttccctccaaaagttattttctggtgatgactactcttgtaaacctatatacggagtactctctagagattagacaagtactcaattagcattgagccatttcaaatctttttttctttttttttctttttctaaggaataacgaaaaacgtttctgatcatctgttgcctccttgtaagtatagtaggagttcatcctctcatatgtgtttttttagagaaggatattttttacctggcctttatatccaaccggatatatgcagccattttaattaggaatttagcctattgaatagggaatttagtcttatcctcttgtatgttcttctgctgaagatcatagtatttttcttcttacaatgtgaagtacggatgctttcttaaatacttgagtagtacagattgatagtacataccgagtactacagtttctgattctgaccaagtataatggtttgacgaaaccctacgtgaaggtggtcaactagccagtagatgagtagtggataagtttattaacttgactagagcacaaagtatagtagcccaaacgaaaacatgaccactaaactgtgaacgagttgcataaatatagccgcagagaacacttccttcaagacttcgtccaaacaaatcggctaaatctacagcctttttcgtgtttacatcgcagacgcaaataattgacgatattggtatcctgcgaactgaaggacgtcaggatagatacaagtggatgcgaactgtggttacccgacgaaagggacttttgtgataagctaactcgatgaggctctctgtcagcaaagtcaactttgatatccagtaatctattgctggcggaaactgcccttgtgtccgtgttctccaatatgaagtcccaaggaatcgaatatcgagtgcttctaccatgattttccgtgcttaattttgatcatctgtcttaattaaaaaaattaaaaaaaagattaaaaacataagtcacaggtactattcatatttcatcatctcataataataaaaatactaattataaaatatttttaaataagatggacgactaaagttagatgaaaaactcattgttgcttaaaataagacagagggagtaagatattgcttgcggaaactgcccttgtatctgggctcaccaatataaagtcacaaggaatcaaatgcctccagataacggtacagtccactataaacttatatagctcatattagttaatactccgaccgcccctaaatataagggattttggttggatattatacatcctagtacaataaatctggacagggattttg

SEQ ID NO: 5532 - DNA, 28261 bp, Oryza sativa
taacactgttaaaagacaacacttgagtcttataagcacgatcttgagttttattatacttgctcttatgtacgtactccttctaattccataattatcatgtttgactagaactttaacaattttaaatatttagcttaaaaaaacactggaacatagattagttttaaaaagtactttaataaaattaaatatctacttatatttttatatattataattgaaaatatatttggacaaactctgatagcggtacgtaagctcagggatccatttgattggattggtcaatctttttctagctaccaggccaattggtatgcacactctatatccatgcatgctgatagatcatgtcatgcactggcaaatagtgtaagtgatgtacatgaaaagaatagatcgactagctagttttctgtcgtcgcttgtggagaaaaaaaaaacaaacaattaacagtcgcaaacctatcactttggagaatcccatatatgtgtgctactatcagaggtcgtttcgtttgacagctctagcttaattagttaccccgaatacaaagattgaacaattaacaagtttagattggttgtatttttgcttgattttgccatgtgttaattaacactgtaaacattctggtatatatatgtggggtatcagttaacaacactcttgacattagatatatatatgcacttctttccatgtgattagttcataacacaaaacgatcaacacagtacgtaccctcatgttacgacatataattaggactaaatttgtttgcatatatgtatacacaatggttagaaccatcagtaacccaagttcagttgacaaattaattagactgtataccgatatataccatatccattaaaaataatttgaattaaatagttgttagttttcattgagttgcctagctatgtttgaccaacaatatttttaagaaatctagttagtatttagcatcaaagttataccattagatttgtaataaaaaaataatttatgaatgagttggacttaaacctttttattttgaagttgcttaaaaataatggtcagtttaagcacgctcggttaaaactaacaactattcgtgacaaaagcaacagaattgaatatatatatatatatatatattactcatgcatgaagaatatgtaattgtcatgacaaatctgctgctgatctctgaaagctgtaataattaatttcagtatatatatgcatgtacaaactacatgccttcttattcctgctttaatgaagaaaataatatcgatgagattaactaaaaccagatggtttttacgagttaaaatttcaacaaaacactttgaacgatatatagtctgttatgcatgataagcgtccaaccaaaatcccttatatttagggacggagggagtatgtatagtagatgagctataaggttatctttatttttcttctcttctttatattcctcatctatgtatttaatgtatttatcttgaagtgtgtgaatagctaacttttgcataaaaatcgaccgcttcattttttagattctctcttctttacataagtggtttataacctactaatagtattaatcttgttctaacatgtaaaatgtaacctctacacaatcttaaaaaaaatggaaagagaaagtaaaatatatagtgtgagagtgagttagttaaagaagattttggagtttgtgtgctaattaagcggtaacatattatacaagttgccttttattgatttagagcaggtttaataatgtcgtaaacttgctaaccgtaaaacatccacatcatctatagcacattagtatagattgctcatataacaatggtctttattactatcatttacggtaacaactgatatattttttaattgatacatgtcccactaattactgcattcttcactattgttccaagcatgaaccaatctccaccaggtttacttctctttcttcattgtacagtgtgctgcagctgggtgataattgtatcgtcggctcgcgttctctctctaccattttctcctccagcacagcagtggggctgacttggttacgctatcactgatccaggttgacctattagacatgctcttatagatagcatagttaaaagaaaaaagtacgaattacaccccccgacccgaactatcgcgcttgaccgaattaccttcttgaacccgaaaaccatgcattgctcaccctgaactttcaataccggatgaattaccaatctagagcggttttatcctacgtggcatacgcgtggcagtccagtcagcattttttttaaaaaatggtggggtccacctgtcatgcctccacttcacctcttcctaatatctctctctctcttgcgcgcgggcgcaagtgcgcacggcggcgtggagccgcgaacgatggcggcgtacatgggcgggtggtgggcggcagccgcgaggcaaggaggtagcattgcccgcagtagggatggcgacggggagaacgggccgagcgcggccgtcgaggtggaggctgcggcggaggggggcagcgaggaggtggctcgatgatgaacctgaggagaaggacacctcctgcatgacgaccggcgatggaggcggtgagttcgggcggtcggtggtggaggcggaggcagagcgtgtcatttgcgccaactgcccgcatcgtccttccagatccgcgcggcctccgcccccgtccgctaatgtccggtctcggggaggatggaagggaggtggcgccatcgtgagatacaaccacggaggaggcggggacgacgtcaacgtgagaggcggagacagcagtgccgcgatgaaggtgggagagcggaggaggacgaggaggaaacgatagcgagagcgaggaggagacggcggcggtgacaaggagaaggggcaacgatggaatttcacggtcgcacggaggaagaattggactacggcgtcaaataaaaaaccgattcaggattgaactacaacgtcaaacaaaaaaataatatggagggagtaattgacaacagagaagacattactcacgtgagaaaatagagcgccattgacctcaagcgcttgaggtgccgttgccaaaggcacggttgcgtacgatgtcttggggaaagtggagtgcgtgcgcccagtatcagagcttggcgccaccacctcagatctatgcttcgctgcctcgctgcactggaacaacagaacgacaacctcgctaagccaaactgccggttccctccgaatcaagtgctagcaggccagttcaagcgatatgccgatacgttgtctcctgtctacagtctccacgcagcccctcaccatctttcatcgcgccaacgccagcaacgaagggacaagagaggaatgaggatggtcgatggcagcatgaggaatgaggatgcaaggggagaaagggagctagcgtgacctaggaaggaggaagacggttatgatgggctagcgtttcccaaggggatgggaagggagagagagaggagaagggcggcggtaggctagggtttgcccgagctccttgtgaagttgagattggagagagagagagaggagggtgtgggtgcggggatatcgtgtgctactgagctaacgatcccgacgatcggatatcaatcggatggccaagccaggcgattgaagagagcgctccaaattcaccagccttccagcgcgggcggaccgacatgtggacccacgagaaagtatggcccagcgaacagagaaagaacggtatttttttttgcgtaaaaatcccatgcgccatggcaaagccacgtcgtgctgaaatccctccgaacgccatggtgcaagcagatcgcccttacttttaattaccccgactagacattttgcgcgcgttgcgcgccctatcaagggtccaatgaacttttaccaataagaatattgtgagaataaaattaaagatctataatctctctgatagagacaaaaatcatgaatttctatggtaaatagagtgagcatcgtgttgtagttatgctaacaaatttttttcctaaaacacagagttggtatatctagacaaaattaacatgaacaccatataacagcttaaaccatcacgtaggctaaatataaatcacatagtgcatagcataattcatcaattcagcttgttttcttcacatcctattgaagagggtataagtcatttaataacatgtaagtacataatatacatcgatacttaggaagtgtaatatttctgcatgtcatagtcagacaatcatatcttaacaatccattttgaccaaaagtttaaccaccaaactgtccgcacagaagaagcatatgttagacaacaaagtaaaccatactggggttaaaaaatatagagtaaatttcataaaactacatatattttgcacattctatcacaaaactacagatttaagaacttatttcacaaaactacagatttagtgtctacgtttatcacaaaactacaggtactttgcacaatacatcacaaaactacagatttaagaacttgtttcacaaaactacagatttaatatcttcatttatcacaaaactacaagttcagtgtcttcattatcacaaaactacatgttttagcattgttaaaacctgtagttttgtgataatgaagacactaaacatgtagttttgtgataaaagaagacactaaatgtgtagttatgggataaacgaatacactaaatctatagttttatgaaacaagtttttaaatatgtagttttgtgatagattatacaaagtacctgtagttctgtagttttgtgataaaagtagacactaaatatgtagttttgtgaagcaagctcttaaatctgtagttttgtgataaattgtgcaaaatacctgtagttttgtgaaatttactcaaaaatatatctcacgaatttaagctagataacatttctcaagtacctgaagaccatgtgtacaataaatgatttattcatgtgcattagatatgctcagcagcagccagcaagctatacaaagaaaatatcacattgttcatacttctttgaatggcataactacgatatttgtaacagatagcagatgtttcactcactaaatcaacagtacatagaaaaaaaaaacatagctaactaactacttgaaacaactgtttccgaaggaaaactacaactaagcactgacatgatagctactaaacacaaaaggcaaaaactcaagttaaaatcatggaatacttatcacacatccataatgtattttttaatagtgccactgctaatttccttcctatttcattcgacctgagaactcaataaactaatgctgaaatagttaaccttccacaaatcaggcattcaaattcatgcaaaatggaaattgctcaagacaaatgatggaaactgctatgttattttacgaatatccagacaacgtgttgcagtgagacattaaaatgctatgcagattcagggttgccataattaacttcttctccctggtaagacctcgtcaagcaaaagccaatcaacatgagctgcatctgaattcaatcaacaatgttagaagcagttgtgttcgcctaatttttctgaagatcaatcttgttatctgttagagagtaacaatagacccccactaatttaagtagcagttaagaacaaaaataataaattcagagagaaatgacaactcccatctaactctgcttaccttgcagaagcacaatccaattattcattgaatcctaaacctacagcaggacactactattaatatgtagtttaaatcattagtactttgttcactggaaattatgcaaaatcatagatggattattgatatttattgaactaaaagcatgatacataacattcttgaacttgggtccacattcaacatgaattgctgtcacagaaaaaggagaaaaaacagagtatgcattctgatgtggctgccttgccttgccatctaatgtattctgatctggctaccttgcattgcgcctgacaccaatcaatggaaaccatgacactaagacagagagggccatctcttaccgacaagaaggaaccatatcggggattgcaatttctctgttcatctcgaattgcaacggaggagttgcaggtgaatatggcagcgactgtgccatttccgtggtccatccaagatctcatcgaacctagtatttgtgcttctacacctgccatccctaatcggcggaggagatagagctcagctgctcaggaggcatcagcaacggtgaggaggcagccgacagggggacagacgccagcgatggtccactgatccggcgaagcggccgaccgctcgaggggacgtaatgtcggcgcggggcttgctggtggtgacggagctgagcgtggtgctcggcaccgtggtcacgctccttggacccgtcaaccttccctccaccagcgggcggcgctcagccagacattggtgagccgctcgagttagaggcgggcctcttcgtcacgggcgacagcgccggtgcgaacatctctagccctagccatctttgacgaccccctccaccatcggcctcgctgtggaacgtcttttctagatctggacaccatgtctcctcccgatctgctcttcctcgacctcgcggcttcggaccggtgccatcgtcgtcacctccaccgccgtcaacctgggggaccacgccggcactccatctccgactcctcgccggcgatcgatctcctgacagaaggggatgtgcaggccggctgcaagagcggaagagaggcggctagggtttgggagggtggggtgaggggtgggcgccggccgccaggtggtagggttgttcgtttttacaaaaaaggccactcacttgttgttatttaaagtgcggcctatttttcgttttttttctcttcttagcataagatatttcaggtcttggagggccttaaagtaagaatacagaacacataaacgaagacaagggacttatcacagattatcaataatagcaagggctttttttgtaaaacgaccagagtcaacgcgggcctcccgctcgctcgtgaaattcggctgcctggagtttcggggccgacgtggatagcacgggaaacggccacgcctatgcaaaacgctatggaggcgccaatccagggcaggtttaaatttaaccgctgtctctaactctatcatattaaatatcacgatcaaggacaaggtcacaagggccatcaagattctaaaattttatacacgtatactagggcctatttgaaggaaatctacagcaattagttgcagtcttgtatttctagacaaactttatgtcaaaaatcatttcaagaccggaagcacaccagaaataaaactagtgatcattggatcagacacacagtttgccaactacaaacagctatcctcaccacaacaatcatggagattcactctaatgtagacatgtattgcagttcactgctgaaatgaattgagacaaaaatatcaatgtatcatgaagcactatattcccccatagaacatcatacccccccaaaaaataccatgtgcattcaatgagaacatacctggaaagctcaaagcaaggctagtgcaacaaccagctattccagcattaacaactgcaaatgaagaattcataattagtgctatatattcaactaccaagatgttacatctaaaaaactagcacgatgttaacagaaaatagggaactaaaacaatgcacatactgtcatctttgccacgcagccttctcaacaggcacacaactagacaatggacgccagagagaactgcaaaactttgatccgataaatttatgttatgagcaaggtgtctggatgattttcatgtacagaagaactgaattcacattatcaatagttaaccttggcagaggaccctgggtgctgaacaagcccttaaatcccctcttagtgaacaaaccttgtcctgaataaagaatccagtacagaacataaagattttacacgaggaaaataactagttgctacaaatggccttaactaattcacatgtctggtacttaacaagattaatagcatcttcattgacataaatatcaaaattcagatgaaggaaccaaagattcctcacaagatgtgctattatctacacattctagatttattacaaattcttacagccatactaggtgagtttgaggagaaggggattgagaagattgggaagatacgcaaaacgaggtgagccattaccgtatgattaattgagtattaactattttaaatttaaaaaatggattaatctgattttttaaagcaactttcctatagaaaatttttgcaaaaaacgcaccgtttagtagtttgggaagcgtgcgcgcggaaaacaaaacaaactatctctctttctccagctgccgaacacagcgtaagaataggttaggaatgaacttcctttgcatgacatggaaaggaacaaaatctaaaactagaaaaagttcgtgattacaacaacatagacaacatgggcagcaccggaaacacataaacactgaaacacaagggggcaacggagaaattgggataataccatatccaatggtagacaccaaatgaactgttggtagtggatgcatgagtgttgctgcactctgaagcacggtagacaaatcatgatgactaaaagcaactgcgcacattgaaagttttattagcatgcaatttgtttattacccagttagaagagatgcaaatagaaagattgcgttgttatctttttaaaatgaagcgtagagaaaaaaatcacagtaactaaagaatgctgggcattcataacccattctgtgcagttacaaaacagaaggtaggttattggtcatagtctctgccatcttcgtaggaagaaataccagtacgaacaaaaggtacattattgtgaagaacaaaaacaacagaggccacagaggtggtgcatcttttgtagctatacaattacttgaaggatggtgcaacaagaaatcaagcttacagaaaagggtaggtcttacttaggcctaacagtctagcagccaggtatttacttgctgtcactgtacaatatatggacatagcaaatagagcataattaggcataattactgaaacaggggataaaaacatttaaacataaaagggggaaaggtctatacatccatggtggcaaaacctgggaggtaattagaaattctcacacggtacaggggaagtattaggtggatttgtagtgcaattgataaagtaggcaacccggctgttcagggggtgaaatggattttttttttctgtgacagtctaaaactgacgctctgtatagattgttcatggtgtaaagtaataactattctctactaacgagcatgtccaaattgatgatgggttagaaataagaaatattacactgcccagcacaaacaataagctatcattgatgatgagttataatgcaggcaagaatagccaaaatatataccttcttacatagcttgaacacgactttgtccagaaggcttcactaactcctccctgtcaatcatcatcctaactctctttgcatcctcaaccattccggcctttgcatatatatttgacatagtcacaaaatttccagggttatctggctccaattgaaccagtttctcaaaagcgatctgtgcatgatccacatcatggtgcatcctacttccagataacaaagcaccccatacaactgcatttggtctgattggcatctgatcaataaatccagcagcctctctgaacctcccagctcgtgaaagcaaatccacaatacaagcacactgctccatagtagggatgagggcagaattttccacaaaccgctcaaaaagcgcaagaccttcatcaaccaagccacagtggcagcatgccatgagcagagttgtgaatgtcactgaatctggctgcatcccacaacgcaacattgcatccacaagttcaagtgccctctctccatgcccattctttgcgaaagcacctatcatcacattccatgacacaacatccttccgttcaatctcgaagaacacatgttctgcattgtcgacacatccaacacgtgaatacatgttcatcaacgcattccacagaattgcgtttgaaccactatcaccatggtttctcaccatgtgcccatggacctgtcttccagactccaaatcacaagcccccagcacagcaaccgcggtacgggcattccctcgaacacctcttgcgcgcatctcccggaagcaatcccacgcctcgccattcatcccggcaccagcgaaccccccaatcatcgcgttccaggacaccacgtcctcgccgtccatacgatcaaagatcctcttggccgcgctcaccctcccacacatcgcatacagcgcgacgagcgccgggccggccgaggcgtagaaggccagcagtggcgcggtctttaccccgtaggcgtgcgcggcgcgagcggggagggaggcggatgcgcggcggcagcaggagacgacgcaggagaggagctcggcgtcggggcgggcgaccgcggcggcggagaagagggagagggcctcccgggggcggccgtggcgggagagcgcggaaaggatggcggtgtaggatccggtggaagggtgggggatgagggagaaggcgcggagcgcgcaggggaggaggccggaaagggagtaggcggagacgagggcgttggaggccgggagcgaggaggggaggacccccagcttgagagcggcggcgtgtagggtggagacggccggggcggcggccccgggggtggtggcggcggagacgagtaggcgagggagggagagagggtcgacgggaagagcgcgccgctcgccggcggcgggggccgaggtcgagcacctggcgcgtccgaacattgcgcgctctgtaaatcccgtagattaccattccatggctttccacgttaatcgaacggcttacaatcaccatggaaatgccttcgagtgtttgacgatctttctctcttttgattttctgttttaacaaacatcatgatcaatacatgaaaattcgtatacgtaggaatcacaaattgaaatcggttcctatcaaagaaaaaaaggaatcaacgattgaaattttcatattggtgtagttttgcattgtatcggatagcggggttgatgcgacaactgcacggaaatatattggttgtattatagtaatgttagtttcattttaaattaaaaaaatgttattgataattaagacttcaatcctaaccgatgaaatgggatgcaatatccttttctcgaatgcacgtgcacgtagtcgtaccaactctatcactataaacacattcaaaaatttaggttagaagtcaccgcaggtactacttaccacgaaaaaaataggctagaagatatacccgtctaataaaataatcactggccaccgcaaagcattgtttaccgagaaagacatgaccaatttattattgcgccatttcccaaaaactagtacagaaatcaccacacattaccatatgccgaattcatatcctctactcagcattatgccaaagttatgttgagtagaggagactcaaacattgtcagacatgttgcaccataagtaacctagctaattaattgatacttaattcattcgtagaaagtaatccatgatagacacaaagtaatctatgatagacacactacatgtaaagaacacgtaggccaaaatctcatatttctaattaacattttccccatatatatatatatatatatatatatatatatatatagtaaatttgtttggtgctccatggtgcccgggcaccattgttgaaattgagtatatacccaattcaaatgagcatgaaactttttcaattatttaggtattaatattaactactttactaactagttgaaagcaagtttgaactgaatttgaacttgtttttgttagattttgattctaggtatatagcatccatacatataattagttaggtatgtaatcatggattgtgaaataaagttaaatttgagttgttttgttgataggtataggtatgaatcgaattcttataactaggtatatactcacaatttgaaaattttgaaaaatttaagtgattttgtgcatttgaaaccatggtgcccgggcaccatggtgccccatatgagtgtcctatatatatatatatatatatatatatatatatatatatatatatatatatattataacacggccgggaggaggaaatgaaaaaggagccatgatgagaggaatagacagattacttacatctatctaccctaaagttcaacaaatactttcactcattctttcattcatcactcaatggttcagattatccctgtgaaatccaatgctccagattcaccctccccacaaacgagcgctcccttcccaccccaaccgcgcccaaacctcaccatcacaccgccccgccacgattgacgtcgccgctgaccccagcttctcgtagaacgctaaaccctaacctcccctctctccccaccgctcgaggtcgcgccctcatcgctgctgctcgtcgcccggagcgagcgatgcggtcaccggagatgagcacaaccgctggggcaccacgctttctcgatcggaggccagcaggatggaggaggttgcgggagagacgccgacgccgtcacacgctgttgatccgattccttgctactagatcaggatgcagtcccttttttttcgtaatctgcatgtaatcctagggttggaggaaaggcactgtggagaggagaaagtggagacggggtgccggcgtgccgatgcagacgagtggccaagaataggtaaatagctctgttctattgctagctagcttttttttttacttactatgacaaattgatcgatctccctgttggatttttattaattctgattgaggaatgacgttttgttttgaacttttgtgccgtttgatttgcaagattactttgctagatttagcaattgtataatattcaaaacagaggctttcactatcactaattagagagcagaaacagaaagaatatagagtcagagttggtgtaccctgcaagtctgacgattggattgtacatgaactgcaatttgcatttcatgctactatggcattatgctcagtgaatcttgctgacttcctttattcaggcacaagtaatttgtgtcggatgatcaattctaagcagtgtctatgtgaataccgtttgaacaaggagctgtgtgggtttttaggattcaattctaatgaagccaaagaaaatatcttgaagatatttttcaggttattgttgtcttttgtgtccttcagagatggggattttgtactaatttagtcactatcttgatatacctgtgctgctgctacccataatactaaagtctgcctagataatgattttcaaactgcattgcatgaccagaaatattatcagttaggattagattgttctcaaggttttaatgattgtcacatggatagttctttctactactttcactatgtaggtgcatatctatgggagtaatatatgttccatgtgtgtctgcatcaactaaaatacctgatggatgtacatgttcattaggaaattagagctgcaacaaataaatttcatgatttttgttcccaccatcatagtaaatttcatgtgatatagaggaatagcaagctaacacacgttcttgagattctttaaacaatcaattatttacttgttggtaaatcatgcatctacagttagatttgtggtttccgtgattacattacatcacctgaagtaatcaacagatttgagcattttgtgtatgcaagtagttgaagaatttcaccatgttctgcatgatatgaagtatgaacattatgctagagttactgtagatcctggcatcacagtcccttaggtttggtaaattcaaatttaccatgttactaagacatgtacgataatttacaggaatatgaaattatttttagaccaaatatattacaacaatatatataccgttgtttggttttgagacatttgaacttattttgctaaaatatgtatcttttagcatatgattgtttaattcacattactaaatatcgccgtagcgttagtacgggcatattaccagttccaacaattggccatgttttttcaatggaattttcgttaaccaaatgaaggcatcaaattcctgtgtctggggtagacgtactaggacaacacgaacaggaaaatacgcacagaacatacttcctccatctcaaaatagataaatcaactcttgtacactagaattcattcatgtatatgtatatgtaaaattattttgcttgaccctagtatgaaggtgaaatatatttaattaaatccgatccagagcacaaaatgagaagtgtttttattcataaatttctatttaaaacacacgagagtcacataccctatcgagaaggctgtaccgtctggacctatgattaaccatctggagcgttgtgctgctgttcttattacaaccacgccgaacctcgacgccggtgaacaccgcgaatttctcgtcgaaatcaaagttggacctccaccctttgtacatgaatctgacaatgcagaacctgccggcgccgagagggacgaggtgcggcgtcaccggtgagccgctgggcgacacggggctcaccttccacacattgcgccgcggcggcgaggtcggacgcgcacagctcgttgccgtcggaggagagcgcgaaccagagcttgtgctcgggcgcatactcggcgcggcctctgaacggaagcaaccagtcgccgagcttggtccatgtggcggtggacgtgtcaaaggagtaagtccccgcggcggcggcgacggtgctctgcactgtcatccagatgcatgagccgccgacggccgtgtaggcggtgaggaagtcatcatcatcttggaaaaagttgcggatgctatcaagggcatcatcggcggtgaaggcgaagggcggcgaagggaggaggcgccagtgccagtgcggcgtggcgaaggggtggtttgggtggcgatcgtggacgagaacctcgaagcaagaggagggggattgggaggaggccgggtacctttccatgacgtagatgttgcctccgatggtgagcgacaccgggaaggccttgggtgtgttcatcgggggaaggatggtgacggcgcgcgaggcggcgccgtacagcaccccgctgccgctgtagtcgacggcgaccacgtcgttcttttcgccgcctctgccgctgccgctgccgctgccgagaggcatgaaatccacggaggagggccaactcggaagcccgtatgatgggcaagggtggaagatcatggcggcgcgaggcagctgagcgtcctcgacttccatagcgccgccgcgccgcccttcttcatcctcatcggcggcgagcggacggaacagcgtcgagacgtcgacgcggtgcaggccgtaggacggctgccgccgggcgatgccgtcgagcaccagattcacaaatcgccgggggctgttcattctcgccgccgccgccgccaccgccgccgagagatccgatcccccggatctaatctaaaacgggacgagaaagagcctggatgaaatcgtaaaaggacgaagggaaagtagtactactccccttgccttggtgacggcccaagaggaggccggagagggagtaggcggagacgagggcgttggaggccgggagcgaggagggaggacccccagcttgagggcggcggcgtgtagggtggagacggccggggcggcggcgccgggggtggtggcggcggagacgagtaggcgagggagggagagagggtcgacggggagagcgcgccgctcgccggcggcgggggccgaggtcgagcacctggcgcgtccgaacattgcgcgctctgtaaatcccgtagattaccattccatggctttccacgttaatcgaacggcttacaatcaccatggaaatgccttcgagtgtttgacgatctttctctcttttgattttctgttttaacaaacatcatgatccacacatgaaaattcgtatacgtagggatcacaaattgaaatcggttcctatcaaagaaaaaaaaggtgtagttttgcattgtatcggatagcggggttgatgcgacaactgcatggaaatatattggttatattacagtaatgttagtttcattttaaattaaaaaatgttattgataatcaagacttcaatcctaaccgatgaaatgggatgcaatattcttttctcgaatgcacatacacgtagtcgtaccaactctatcactataaacacattcaaaaatttaggttagaagtcaccgcagatacttcttaccacaaaacttacctcgaattaaggcacctttgaaaaatacctgtctaataaaataatcacaggtcaccacaagcattgtttacccagaaagacatgaccaatttaccatatgcgccatattaaaaaactagtctagaaatcaccacacgttaccatatgccaaattcatatcctctactcagcattatgccaaagttatattgagtagaggagactcaaacattgtcggacatgttgcactataagtagcctagctaattaatttatacttaattcatccgtataaagtaatttatgatagacacactacgtgtaaagaacacgtaggccaaaatcttatatttctaattaacatttttgcatatatatatatatatatatatattaaaatcaaatagctatatcaaccatgcgaactaatgagcaccctcccccccccccttccccgtaatggaacttcaaacaactgccagcaaactctccccagcttgatcattgagaacactcaaccgccatatatcaagcaaaccatatcatatatctagctcagaagatatttggtaatttaacactccttaatattggtttcgattatttgacatattagtccactttcattcatcttagatggttctacatgttatcctcaaaagtatcaattgaagcaacaggacaacgaaaaaagtgttaaattatcatttttttccaagtttggtaggtaaattgttctaaaaaaaatgtttgctaggtaaacattatgttttagagtacaacgcagagcagcatgcgactatgtcctcgctcacaacgtccattttgcaagtagaatcgtatcaatttgacagtgttgtaatttgaactcaagaggattaatttcaaaacaacgtgccaatctccacgtgctcccagcaatgacacacgggtttgtcacgtttcccaaacttagcccatcaaagaaaggaatagaccggaagaaagcccatcacgactcgccttcctccctccgcccgttcgccgcagccaccgaaccaccaccgcctctctctctctctctctctctctcctctctctccggcgaatattccctcccccctcgccttcctctccacgccaaagccggcaaccgcgccgcctccgccgcgcccaacagctcagacgctaccggagtccggcgactcgacgcgacgcggcgcgacgctcctccgccccggcgatgctgcggcgcgggctcctcgtcgtcaatcgcctccgcaatgtccacctccagcgtctcccccggcatcgcacgcactgctcgagcggtcccgcctcggcgccgtcgacctcgacgacgtcctcgtcggcgccgctccccgtggccgcgcctcccccgccccaccacctcgcgccccgcggcggcggcggcggcggggggccccgacgccgcctgaccccgctcctcgccctatccacgctctccctcgtcacggccgcggggacgatctaccacatctccgcgtgggacctggaggggacggtggagaggtccagggcgtccgcggcacgcgtggtggagcggatgcagcacacctgcgcggcggggaaggtgctgtgcaggtcgctcatgtccgtgctgtcgtccgccaaccacgaggtgaggtccgggttcgagctccgcgtcgccgcgctgctcgccgacatcgcggccgccagcgccgcgcgccgcgcggccatcgtgtcggcggggggcggcgccgtcgtcgactggctgctcgagagcgtcgtgcggcgggccacgcaggcggaggccgcgcgggcgctcgcgcacctgctggccgatccctgggttgcgcctgctgtgctcggtcgaccacgagcggttccctgcctcctccaattcatcttctcttaccagccaaaacgcggcaagaaggtaatgtcctgtcaggtgctactcttgaattatttgctttgcttggctgccgtaattgtagctttaacagaataaattttgcaatcagtttaaattattcgagcatgccaatgtagctggctctaatctactaggtgattgttgttgtaaattctgtccaatctgcaagataaagagagaaaactctgaatgtttatattgaattgttagtttctttctttttagttgagaattaatgatttggtgtagcttgatttgttcttgtgttaggaatttcagtattgatatgctatgttataggaatcagatgttgagatgtgcatcagtacagcctgattataggtggaaaacaaaatttgcatcctcgtgtgctctgaggtttctggcatttttatgttttcatcccatgtctttgtgagcatggaacctttggcccttcaggttttcagattgcaaactcttaatatatgctattgatgttaagataaaagatctcatgggggaatgagttatgttatgcacctgcatgccagttatgcaataatgcagttatgtctaatggattatcaagaccttggagttggtaaatataatttattttccttgatggcttggtgatctcagctctcctataggcaatttctttttttgcttgctggcagtgctttttcttcagcttatctcttctttttttcccctatacatgtagtattatgtttcatgcgcatcttaatctagcaatgtaggtctattaaaccatttagattttccagttctggtttccttggactttaacacaatatgagttgtttgtacctaatatattgccctcctgttaatacagaactcggaatactcttcattcaatgtctcagaccattctaaaggaaggagcatgcttgttgctgcacttatggacatcatcacttccaactgcgataatgcggattattcatcatttcagcctttattgccttcagatgctgatacaagagatattgcggcagccatcgaagtcattgagcaaggggggatgcattttgatgaccatgatgataataacagtgatgatggtgacagtggattaaaaggaatagggattaaggtacttggtgggactactgtcttgggattctctagagaaataaactcattggaggtgggcaactcggatgatggtattgttggagcttcgaatagtagaatattgatgcaagaaactgctactgattctccactagtggagaagctaagttctgctgctgctccaggcctctgggatgatttgcagagggagcatgtagctgtaccttttgctacttgggctcttgctaattgggctattgcatctgatttaaaccgttctcgtattcaagaacttgacagtgatggacatactgtcacaactgcactgaaagcacctgaaagaactgtcaagtggcatggagccatggtggcgcgagctcttttggaagaccagagcttgactttggctccttctgtccctgactggtgctcaagtcttcttttgacagcttctcgggctgctgagaatggtgacatggcattggctcaaatgtcactatcaactttcctattatccatgataaggtgtaatgagtcaaaatttgtgatcagacagaagggtcttcatcttcttcgtagtatcgcaaaaaagatagaaaatgagaatgctcagagcaggatgaaggaatcattagcagtggcactgagtttgctctatgctggtgaagttccgttgtcacttgaagaaactcaaagatggtccggcattcttcttcgttggctctttgataaatctgtttcagaaactacaaatctcacagctattaaaatcctttcatgcattcttgaagactatggaccagcttccgtaccaatttctcagggatggttggctctcgtgctttctgagattcttggagataacaagacacagaatttgaaaggaaccacccagcctcaaccagagagagtgaaggtaagaatcttgttattgtttttaataaatatatatttgaatgcgtgtgccgccaactgttcttagtagttaagttggttgataaatgagttttagataaataaacatgacgataatcagactgaaaatactagaacgtcaagaacttaagatcaccagtataatatagtatgtcacatgttcagatttatgacaagtattaaccatggaggaacaatgttctaaacattccatatataaaatttgctttgttatttggcgactctataaagtgcttcatgccagatgctgtttaggttttttttttttgggagctatcttcttgtctttcgaaacatttctatgaaatacacatgttttgatatttttattttaattgtgttatattgtttgaaacaaaatttgaatatttggttgctactagcctgctacttttcttgtgcagagtttcacattttctatcatctgccattttcagtttagtgctgctctttttggatgttacagtataacttattttgtgttataaagctttagcttaactcctgatagtactcctgatagtactaatttcacaatcttgttcttcctccttttttgtcctgaatcctgatactaaccttttttatggacagaatcaagttgatcaccataatgcttcctctgcgactcagatcttgaatcaattagctactgctgttgtgaaattggcaatagttcaatcacactatgatcctgcttctggtgacaaagtaccccttttcgattttctctctcttgaaccatttgctacagctctgaagaacttgaataaaaagaacccacctaagtttgatgctgctgactcagcatccgctacgctgaagggaataaaagcactggcagagctttgttctgaggatggtgcatgccaaaagagaattgctgatttaggagttctttccctgttgaggcgcatcctccttggtgatgattatgagaaactcgctgcgatcgaagcatatgatgcatcacgaattcgagaagtgcaagacaagaatgtgtctacctctaatgactcctctaatgacactacttctgatccctccagtgtacgggttcctccagcagctcatattcgaaggcatgctggccggctggttaccattctctctcttctacccaattcaaagaaggaaattatttctgatgatgtatggtgcaagtggcttgaggaatgcgcaagtggacgagttccttgcaatgatttaaaattaaaaagttactgcaggttaactttgttaaatgtattctgttctgaggatccaaatacaggaagcacttctgatgaataccctgattcaaaaagtgagtataaaagaaaatgtcctcagtttggagatgctttgttcttgttaaatccagagttgcctcttgaggttcatttggacaacaatggtcatgaaatttcaagaaagaaatttaaggatgactgttgcactgaagaaggtggtgactctgaaactggagatgctccaagcaacagagccaaatatacaccccctttaatggatgtcgtgttcgtccatggtcttcgtggtgggccattcaactcatggcggatagctgatgacaagtcatcaaccaccaaagcaggtctggtggaaagtatagatgaagatgctggcaaagagggaacatgttggccaagagaatggctttcagcagattttcctcaagctcgttttttgacagtcaagtacaaggttagtttggtgctctgatgttctttatgtggggagggttatactggtctcttttaaaacttttgttattctggtaatattcgatgcttccctgctgatggaattattgttgcttttatatgtttggaggtcttactggtttcaaatgatttatgcagaccaatctgacacaatggaccggagccagcttgccacttcaggttagttttttctttttctttttcttgttccattgctgatctcgcgaaaacattccataattttgtgatactcagatctgatatgttctgtagttggataggagatgctcagagtttaactttaggcttatttgtttcttcttactgaaatttattcagttgaaataatatttgtatataggaggtgagctctatgctgttaaggaagttaattgctgctggcattggcagtcgtcctgttgtttttgtaactcataggtaatgatggtcgcttggttcatgatgtagtgctggaaattgttgaaaagtctgtgacagatgaaaaggcttacttattcccatttacatatatgcagcatgggaggactggtggttaagcagatgctgtatcaagcgaagctgaacaattatgacaagttcctgaacaatacgaatgggctagtatgtatttgtttgtcaattctttcaaacatctgtgagatctaaccatgttcatatcacaggttttctatagctgtccacattttggtagtaggctcgcagacatgccatggcgtatgggtttggtgtttcgtccagctccatcggtttgtccttcacaaaaaacttgcagcttatcttttttgttcaccccattctatatttatgacacttgcagcttatctttctttagattggcgagttaagaagcggatccccaagacttgttgagttaaatgattttgtgcggcaacgccatagtaaaggattgctcaatgttcttagttttagtgaggtaaaggaagatattgttattcaattacacattatgctttcattgttataatactaatatacctatgtcaactggcttcacaccttaatagactcaagtcacaccgatcgttgaaggttacggtggttgggcacttcggatggagatagtaccgattgaatctgcatacccaggatacggggaacttgttgtaagtaaccacgttataacgttcgcaccattgcgtagttaattgtgatctgctagccttgcactataacggacttgatagatcatgcatccacatctagtactctgcacagttttaacatgcttaatgatgtcaacaatatatgattatacatgttagagacacaaaacccaagctagtgtggtaaagacacaatgttgattttgtaggtatcccattgtatttttcttcttgtatgccccccaaatttcgcccatattatggggttgttcagattgatgacatttttaatcataccaatttttttgataaagttgctaaaaaaatgtctatatttagtttgttgctaaactttagtaaatacataagaaatcccgccaaaatttttggcaagttggctttggtaaggtttattttagctataatttgaaccacccttataattttcgtaaggtagtagcagtttatgcaacttgtaactggtggtttacttattattattaaaattttgcaggtcctggcgtccactgatcatataaattcgtgtaagccggtcaataagaacgacccgtcgtacgcagacaccttggcatttttggagaaaatattgaaatcgcgtctcaaagaatcagaatcctagttttttttttccttttaacttctcaaatatgggcggcctatggtatacaacacttcgggtggaaacgctggataggatttccttcggcattatgggggagattctgtttcttctgcatcagagattctcgtctgtttagttgatctgatctgacaatttgggcgggctgtgttttatgaagccttagcccaatcatacagtacacgaacgaattacatctacaaatagaggatagctgtaaatagttgcccctcttgtaagaagaaaaaaggaaatatatgtatgctctctgaatgacatgtattatttttctctcgaaattcataagcatgtaaccacacaccccgttgattatgaaattttgtgtcaatgctctatgattattagcaagcattaccattcaagcctgatgaatattttggtttgaaacccaatattgaaatgggctgttgagttcatgggcttacagtttgtagactgagtcaacttttagcccatttacttccaactaatgaacttggagtggaagaagaagaagcgacacgccgacacccatctcttcgtcttcctcgcctaaaaccctcgccttcctcctccgccgcttcccccctccacgccgacgagcaacggagcaagcgggcagcccacaccacacccaaggtgcccctccaaattctcccctaatcctctccataatttcccctaattgatacttgcgtcaagatttcgtcgtagatccccgtggcccgtgagggatttcaggatttgggcgaaatctgataatcgcgggccctcgattttgtctgtattcccccaggatggtggacgcgtggtggccgctgctcgccgcggcgatcccggcggtggtggccggtcaggccttccgcgtgaagcggcggcgggacgaggagcagcgcctcaaggcggcgcgcgggcgcgagaagagctccgacgaggtgttcgtctgcgagcgcgtgtgcacctccaagcggatgctcaagaaggtgggggccttctccaaggaccccatcccggagacctgcgtcaccgtctgcggcgtctccgagctcgacgcctgcgccgacgcatgcgcccggaccgtctgcgtcaaccagcaccaggtccccaactggaacgacgtctgcctcaagaggtgccagagcgagtgcctcaagctctcctccaccctcatgtagcatcccccactgtaagccatcgttgtttgtaccttgtttttggtacaaaccatcaagctcttcttgttcctaatgcaatccttattactacctaagaggagagcttcagacatccatagctatcgtttataaatcatgaggaatggaataggtgaatgactgcttcctgattgttttgtgcttcacatttgatcttcaacaaacaattgtgattgctaggtaccataccatgtcttttgtgaggcgtatccgaggttgagtttttcagctgggccgacgaataacaccagccaaatttatttagtatcagaggttgaatcaccccttttggatgaaatgcttatcgtgtttaatatgtgcttacctgagtgtgctgattctgatatgaaatcccgtctactatttatccgagtaggaaatgtaggacggctctattgcccatttacctccagaattgtagttttgtgcattagtattgggagtttcacaacttgctcaggtgatttatgttgcacagatgagttatctacagttcagaccaattgtgacagctaggttgtaggtatcatgtcttttgcggggggtatctgatgttgagtttatagcttggccggttttggccaaatttatcatgtatctaaggttcagttatcccatttggatgaaaattcttatcgtgtaggaattgtggttgcctctgcctgagggtgctaattctaatattaaatctcttctgctatctgtctgagaaggaaatgtaggatggctattacctattttacctccagatgtagtttggtgtactggtatcgggagcttcagaacttgccgaggtgatttatattgcacaattgcaatgattttcagagtttagagttgagagcattgcttgctggagtttctacctagtgctagcatgcgaagtagtgaaagatttgcagtttcttgctatgctcttattattagtcagacacaatgcttcctgcttcagttactttgctgtttacgagcttcagaagcttgttttctgctccagttagcttcttgttttaatgtttagtaacaactccctccgtctcaaatgtactaggtttgtttattttgagacggagggagtacaaccttccatggctgtcatttatctctaggaatgagccatggaatgacctatcctggttgtcatgttttgtccattccattaccctttgtgcatatgatcctcgagaaaattatcctaaggttaacagagaaggccttcctttatctgcattcagattacaagacagtgatggtctgaaatacatgtatcttttgcaaggcaacaatgccacatctttccggtcctccatttcccctaccgtctgctcagtgtgtgcacatgttgctatcagctccctgggtgtgaagctttaatcaccattgtgatgatccagtctgtagcctgaaactctgaatcaggcgtcagacaagcatcaggtagacgtcaaattctcctcttggattaggttaaccaagataataggatcaaaatcgtcactgttgatcggtgatcgcacacccaggccaccatggaaacgggcacctaacgcactgatcgtaaaactaagaggacatggagatgatcttgaacagaaaagacgcgcgacaactcccgctctagcttacgcatgcatatcgttctgtttcgtatagcatatggagtagctggttcagataataaaactatttagaaatccccctgaaaatgctccaaatgttcaaacacttcaaaacgcctctatactttaattctttgggtaatgcgtttgtcataagcaatgctgaacagtcataatcatccagcacaaaatacaagatattcgttttatatctcttacatactccactgtacataaacttgctgttctccccatcaagccatcaatcttatatatatttacagaacaaatttgcacattagactgtggctaatcacgcttaacatcaacacaagctcgagaaaacagcatcgtggaaagacaagtggctaatcacatcagtttgccacccgcacgccatagttttatactacttccatcccagaagactgcagttttgcattggttgtgttcaacatttaccatctgtcttatttgtaaaaacttttatgattagtatttttattgttattatatgataaaacatgaatattactttatgtgaaactatttttttaataagatgggcgatcaaacttgaacacgaaaaaccacgactacacttaaattggggcagaggtagtagagtttagagtgatctaatgcattatgcatcgttgtctagaggtgacacgggccgacatgatgcccatgtccttcctccaaggagtagatgatgcgctcgaacgcctcgacgtggtgctccgccacggccatgaacacgtcgacgccgcccttcgccgcgcgcgacgggacgaacaccatcagcccctccacgggcaggtccggcggcaggaacgccgccggcgagccggtgccgaggtccatctggtggaacctgaacccgagccagctatccacctccaggtccgggcacaacatcgtgcccgccgccgccgccgtcgccacgagatccccgccgccgccgccgcccgccgccgccgcgccgccgaagtcgacgaacgactggatgtactcgccgtcgaccctcgccacggcgtcgcggatggcgcccacgacggcgccgtaggtggcgcggaggagctcgcgcgcccgcatcctcgggaacgcccagagcaccatgttgccgaagaagtccatgggcacgggcgggttggctctgccccggcagttcaccgccaccctcacctgcgtgaactcctccgggctcaggtccctcgccgccgtgatcttcttccacacgtgcgcgagcaggcactggaacgtgctgcaccggccgccggcgcgggccttgagctcgccgacgaactccgccgtgaagtgcacggtcaggtccttgatcttgtccagggacacggcggcgtaggacgacctgccgccaccggcggcggcggcttctcctccgtcgaactcgatggaacggtggtcgaacgccggcaccggcggggtgcgg

SEQ ID NO: 5533 - DNA, 44455 bp, Oryza sativa
gtcgcccccaagaccccctcccccatggtgaccaactcatgctgccaccgcgctctacattctaatcggttgctcttgctcgctcgctgctcgatccgttcattaatttgatctttctttttttggttttatttcttttttcggcggagcagaagcagaagaggcgtaggatcatcgaggcggcggtcgtggctccctcgcctccgaggaggtctcggcgcctcgctaatctccctgaggtcaagtatgcagaggtaactgctttgctttggtgttccatttacacagtaataaatgtcaaggagaaaaaaagattcagtaatattcagtcatagaaaaaaaaaagaagttcagatacacctgcttcttgttctgatgcatctggttctaagtttaaggttacaaattattgagcgtgattttcatacgttctagccgtggctgtcaatccagctagtgcaagctgtaaaaacggcctattgcacagtgaagaagctgtatttcacgttttctgaccaactgaattgataaaaaaatgtgcaaatttggtaggaactactgagcattaaataagtctctgaaacaaaccattcttagcagaacttaacaattttcagtaaatggcattttaaattgtgccattgttcctagcatccacatatgtaagtatgtaaccatcataagaaacatcttttctgtactaagaagtagcatttgtcggcaggtagcaccagatggcgcagagaggatgaaaaggtatgtcattatgtgataacaataacattaccacatgagcgtatgaagcctgtattgcctcccactaagtagcaaaaggtgcaaaactacatcccgttgtccgatttcttctgcaggtctccacgaaaagcaattgacagtatctacctggcaacccgtggatcaatttccatggaagctaggctcgaggcagcaagaaaagcagaggaactggaatcacaacttgaccctgaatttccctccttcgtgaagccaatgctacattcacatgtggtccgaggattttggttggtgagtactgcactatcacattcccatccctgcaacccttctttaaggggaactgttgtcatgtggtactaatacttgtttggtggcatgatcaaaagggcttaccgaggcatttctgcgagacttacctgccaaaacatgatgccattgtcactttgttggatgagaaagacgagcaatttgataccaattaccttgcctacaagaatggcctaagtggtggctgggctggctttgctttggaccatggattgttggatggagatgcgacagtatttcagttggtcaagcctacaaccttcaaggtattaatttttactgaactgaacaatatgtctgaataaatttgtacctgtaacttaagcatgttttatatatgaataatgtgaataatccttgaaaattgatttttgtccaggtgcatattatccgagctactgttgatgatggaaatgaggtaaccaagtgacatcaacaaagacggcactactaacacatcggcagacgaaaaattgcattttgggtaggtttaggcctcatctgttagtattaccattaggcacttaatctgttactctgctagtttgcagagcatctatcatgtagcccatatctatgttgggagaaggaacaatttgccactcttatgttgtttgtaattggtgtgtccacaattactgccaattcgacactcgggagtttattagctgacagatttggagtatctgctgtttatgtgtctggctactgcatgtttctgtcctaattaagttttgatggaacatggtacaacttttggcgtttagattggttagattatgaactgcttctttgacctaacaattatcctacactaatgccatctaatgcagcatgtacaacaaatactaataacacaaaatggatcaaaaggatgatgctaaatatcacatcaatctttcaactcacatacagcatcatacatgaatatcatcctacagtttctgaagccttcgctcttctcccttcatcatcaaactgtatctttctgtacataaatgtaacattagattggaaatgatcatctcagatattccttcctttccagcctcaattaagtttgttcccctcagtcctgtatatatatatatatatattttttttttatgcaaaagcaataccatcagcatataaaatggatccaaaatgtgaagactttgttccccaatcatacctcatgtcaagttcaggtttgtttttcaggctctctggtatctggccggtgagattgttgttgttcaggtatctgtctttcgcaggagcaaatgcatgaggcaagtactaagagttatcagctgtttggacatgcaacaaaaagagggttaggatacttacagctccttgagattggtgagtgttcccagcgatgggctgattggtccacttaactgattgccctcaaaatgcctttccaaattcagaaaagttagtatgatggaaatgagtctcctagctaggatgagtagtaatcaatctcctactgcctatccattgagcttacaattcttccaagatgtgcatgctgctcaaatcaggtatggagcctgtgagtttgttgccaccgaaatagctgcatacaatttcaacaggaaaattagacccaagtgcttatcccatttgatcattcggattcactctatatgatcgtgtcaatcttacatatttttcatcccagtcaaatttccaatactgtcagggagcgatcctgaaagaccatgattttttagatccctgtagtatacagaaaatggatcatatcatcacagcaacaaccaacatctcggtagcttattcactgtcaacaccatatgagttcataggtgccaaaccatgtcaatctgaacacttacagtgatacgacgcgcacgggtgatccctcggagcagataaccccggtccacgaattctgccgcggcaggcaaggatcgccggcccagtccggcggcgggttcttgatgctcctggcaagttcctccattgcaaccactgcacaagcgaagatcctaaaccttctcatcacccaaaaattaatctcacatactgaatctagctagcacaatgatgaacttttaaaattttgctttgctcaaattttgcagaaagaaactgcttgacatttggagatcagcctgtctatcgatctggagcagggtttttattttcgaaattgctttttctttgggggttgggttggagggggggggggggcgaaatttcagaaagttcgattttttttggccgaaattatttgaaattttgactgatttttaataaaatttgaccaaattcacacaaaaaaaaaagcaaaaaaccgaaaattttcggactgagatataagattgccggtggggggcgaatttcggaaattttgaaacgaaatttcaaaccctgatctggaggcgcataccatctctggtggccgtccggccaccgagcggcacaatctggtagatctcgccggcgttgatcagcgggccgaccggcgacgtctcgttgggcgtgagcacgatctccatcttgccggagagaggcatcatggtggagtacaccatgacgccggcggccgaggcgttgagctcccggaagaactccttgccgttgacggcgacgtcgaagacgcgccagctgtaggggctcgccgtgcgggagtcctggaagtagagcgccacgtagtaggtcgccgccggcagctccaccggcggccactgcaccgacagcttcttcccccggctcgtcgtcacgccggcccggagcgccttcgccggcggcacgttccagaactcctccggcgtgatcgccgagtggctctccaccgtcgggttcgcgtccgtgaacggcgcccagtaccggttgtactggtcatctggatagctagaaattccagccatgtcaggttaatcaggacacaacaacgcgccgtcgtggcggcggcgagcggcggaacgcgcgtacctcacgatctcgcccttggcgccgaaccggctgcgcgccaccgtgctcatgacgtacttgtcgaagtcggtggtgttgtacatggagtcgtcgaggctgacgagctcgagcgcggagatgaaggggctggaccgggtgtcggcgcggcgcgccaggcacacgctcatcgtcttcccctgcgcctccgccaccatctcgaagtaggtcgacatgccccgccggaagttgtcggtggtgttcacggcgctccaccgcgtcccgtcgacgatctggtcgaacaccggcggaacgtcgccgccgtcgaacccgccgtagaagtaggtcgtccggacgaggtaccgcgaccccttgacgacggggagctggtagcagtacttcctcgccgtcgcgtcggggaagtagcgcacggtggcgagcagcggcaggatgttcggcttgtcgacggcggacatgttgccgacggcgatgaacccctcatcctgtatccacttgatgctccctatctgctcctccttctccgatccacagtttatatagaaccctataataacatttcgatcacccaccattacacgtcccatttcttgcatgcaagaatcaattactccgtgtttgtgatataattagtggcttaaacttttttttctgatcagttagatataatcaagtttacataaacaattagcaacatatacaacaacaacaacattagatatactatgattatatatgtttgttttgtagaaaatatttttatattcttttataagtttaacaaaattgattatttaataaaaaagataaaatttattataatataaaatggagggagtaccatgaattacctcgaggttgtgggacgacggaggcggtggcatgggaggaggcggtggcatgggaggaggcggcgaggaggagggggaggaggaagaggaaggcaatggggataggcatcgtaatgtcataataggattgggtgggaggggagagagcaatggagcgcgcccacgaaggggaggctccgcgaaggggacgacgcgaggaaagggggctcacgaagggaggccactactgtttatggatcaccgcgcgccacaaacgggtggtttttgcttccttggcttttcaacggcttccgcttaaatttagcaaacgttagttgaactggtcaatcttaggtgtgcgtcatgggccttgaaacctctttcacggcccatgagagaaatgaggcccaagtgatcactggatcaaattattgcgagtggattgtgatttgggcctaagttttactttggaccaccctcaaatcaatcttttcactttagaatcagatagttttgtatattttttagtttggatgatcagaaaattttatcaattttttttaagtttggatcatccttaacttcttcaaacacccataaataacctcaatcaaatcggtttcggtataatggtgaacttccccttttatatgctgctcatatctatacatgaatagtaaagagagtggggtgatccaagccaaatactataggcaaagttatccggtctaaaatgaaaagattggtttaagtgtgatccaaagtaaaactttgacaataaaaaggtgacttcattttactcaattatttacttgtgattgaattattcaccgagggcttagtaaatctatagtccctgtgcgtgtatatatgaacagaggttaaagaagagagaattaacggaggcccaaaattctaaatgcggccagccagcccatcccagcccagcccagctaagctagcaagctgccacgtcgtacggggacgggacggcggcgatcgccggcgaggcaatctactcccacttgcgggggtcggtgatgttgatcttccagtggtggtcggagaagccggcctcctcggcgaggtgtcggtcccaggcgatctcgatcttcctccgctccgacaggcggcacggcgagcgcatggcctcccccatgtcgtcgtacacctgccaccaccgcgcgtgcgcggcgtcgctggcgtacacccgctggtcgccgatgttccagttgcagtcgtagtcgcggtagcacgtccacggcttcagccccaggtagtggatcgaccacacctccgcgggatccgcccggaacagccgctccttgagcgcccgctccgccgtagtgttcgcccagaagttcttgaggtagttcacccgccgcggcagccggtgccaccagacgaacacctcgttcaggaacccctgatcgccgccgttgtaggaccggatggtccgccgctgccggatcagcgactggaacgtgcactgcgacggctcgatcaccatcaccccggagttgaagagcgagccgtcgttgcccaccgccgtcagctgcgggaagccgaagagggcgtcgaggtcgcggaggacgaggatgtcggcgtcgacgaacaccacgcggtcgtagtcggtgagctgccacagccggaacttgctgtagttgtactcgttgtaggtgccgcgctccgcgcgcgggttgcggatgcgcttgatcttgcgcggggtccagccggcggcgaccagcgccgccagcgccggcttcgacacggtgtggtcgtggaggaggacgaggtcgcgcgtcgacccggcgcgccggatgctctgcgccagcacgatcgcgccgcacaggtacgtgtccgacgagtggagcaccgtcgcgtacgcctcccgccgcggccgccccgccgttgccgccgccgccgtcagctccgacacgttgaacacttcctggatacctgcgttaattcattaattaattgcttgattagttgactgcagcttacgccagagaagaacacgtgctagattcttgcgaaactgcactgtgcctgatctgacaatttacctatccatgaaaacaaatttactccaagtccaaggtgatcagttctaaaaaaaaagaaaaaagtccaaggtgatctgaactcaaaaactagtgcgtacgacgaagaatttttcctaatcttttagcagatcaataaatctatttcttaactatatagtatatgtactcgatccgtagtgcgtggcacatgcatcattcatgcacttcttgaactattccaactaagctaaaaaaaaagaactattccaactgaatagtatgaatatactgtataatcttagcttaaaacaaactagaagtgtcagacaagtcaaaaccaccaaagaatcaaatcgaattgcacaaggtaagatcaagcaataaacttaatttgcgacgatattgcgtacggttggtatagatatctggtcatccgccatggagacgaatgtagtagcatgcaatgcaagtattaattggttcatgcacaagctatctctatctatccatctagagtagtatccatttagctacacgcagctgtccggccggctggccaccaaccgaatctagtttaatcagccctgtcgaccgatcgatgtagtatgcatttgttgccatcatagtgttcgactgatcggacggttggaggtgaaaggcttccaaccagcttagctgcatgcctatcacaagttaggtgaaagaggccccagtctctgcccatttatcatcttcttctaattaatctatgagtggtcgtcatcctcttctaattaattaatcttttcttgattaatctgtcaatgctcatccatcgatctccatgtgcatcctgatctattaacatgtacaaaccgtactgtgcgtgtggcatcctatgagcaattgagtagtgtgctaggagtacttatcatcagatcaatcccttaagtaattaatatttagtgctagtatattttttttatcaactgtgaataatgtgtgttgatcgattggtttaggcagtagacctaggccctagatggctagatctatctgctcttgcaaggacaggttttagcttaattagctctcgctagctagcttgtggataacactgacagtgatagatccatgattaccagtagaagcttccactcaggtgggatgccactgtgctgatcaacgataggctagctagctagtttctgctggtacacactctaatcaacctagagcaattaatcaacacctgatgaaccgtataatctgaagaccaacggttgcaaatgcagttacgaaaaaggaacagatttactgttgcaccaaccggatcgatcgtcagtactcctatgaatataatagagcgtcgacgatcgaacaggactaaacacaattcaagttgattgattggaggcttcagtttcaacctgaatcaacgaatcgtcacctcgatcgatcgatcgatcaagctatagctagcaagggatcagattcttcaggtttggtaggaataatggggactactcgatcctagtgtatgttttgctaaagagaaagtcgagtgatgatgatgaattgatgatgagaaccttgtccattatcagctcgtggcctttggcaacatttcccgaccagattcctacgctctttgggtggctttgtcccacacacaccctcgttaaatcgtcctcacacactgatcatgcatatattcacattccaagcgcatacatccctacaagtgattatgggacaaaagctgattggttaattatgctgtgcttgcttgattaattgtgtgggtgtgctgtattgatgctgatcggttttcattaggtgacatgttatgcgtctaaccagcagttgggaacacttctctgaattgaatcatgtcttagtctgatgctaatgttctattttccttagtctgatgctaatgttctattttcctgcatccgttttttttttgttcttatgtgcatgcatggccttggcatattgaagtatttttttttcaaacacaaaaagtagtaaaatccacaatagatttttgttttgcataaaaacttgtaatggaaaaaaatgtcccctttaaactaggtgtttactaccttttttataattcgcatatcctattggctaaaggttactgtaaaccattaattgatggttggagtaataattaatcattcagtggccagttctccacagatactaacggaacagactgaaaataaacctaagctattgatctctgaaacttctttagctattctgcatttctttaaaatttctcacatgtgtatcctgtctcagtgtgatcatgatatattctctcttttagtttctagaagctgaaccacatatgtgccaccaatttttctcttttttcccctttatcacctgtcatatttcccctactttgttttcatgcttgactaacatgcatgcatggcgtgagcgcgtgcatctcacggagaagaaaaccaattaaccagggtgcgagcaaaaaaaaaaaaacaagaaaacattttgatccctcaaagaacaatatcatctaaatagttattatccctttgtttcatattataagttgtttgactttttttcttagtgaaacttctttagttttaattaaatttatagaaaagatagaaacaccgacactaaaccagtctcactaaattcaacattaaatatattttgataatatgtttattttgtattaaaaataaacttaaaaaaaatcaaacgactaataatatgaaagagatggagtattgtgcttagcttacctccgggtccccacagaggtagggcgaggttgcatgagccgacaggaagccggagcttctcctccagccgctcgacgtcgaccatgtacatccaccactcgccgtccctccccaccgcctcgtcgcaccggaacaagtccatcatgggctcgcactcgctgcgcaccaccacgcgcacccgcccgccgccgccgccgccgccggcgtcgtgccgcagccccttgcgcgccgccatgtgcgccgtcacgaggtgcacctgcagcctgaacacgtcgcggttccacgcggcgtccgaacggttgcacggcagcgacgccaccaccacgtcgacgtcgccgtaccgggagaagtccggcatggggagctccgggcaggacgggccctcgtcgtcctcctcctcgtcgatccactccgggaagaggtccgaccaccggaacatgtcggagacgcgctcgaagtcgacgccgacggcgtcgccctccacgccgagcgccagcagctcgtcgcggccgatgttcaccaggcccatccgcagccgcccacggagctcgtcgaacatcgccggcgccctcccggcgttcacgatcctctccgccgccgccgccaccgccttgttcgccgccacgcctcccagctgcaaaacacaggtgtagccaattcctcgtaagcaatctctcgaacacatggtgggtcggaaatcgaagcttagctttttgacggacgtcggtcgcacgcacgaatggtggactcaccttaccttccgagagagctgggcggtggtcgtcgtcgccggggtgcaggcgtcgcggaaggcggtgcagcggacgagggaggaggcggcgccgcggtcgaggaggtaggagtacttggggtggaggaggagcgccatgtacgcgaggaagaagaaggcgaggaacgccgcgttcagcttcacgatggccgccgccctcagccccgccaccggcgacaacgacgacgacgacgacggcttgacggcctccccggcgccgcccgtcacccccatgccaatggcacaccgcgccgggctagcttgtcctcgtgtcgtgcttcggcggcgaggttggcgcgcgtcgcgagctgaggtgcgcgctgttttgcctaagccggggcggcgttgcatggcgcggggttatatagatcgacgcgcgcggcatggcgcggcgaggcgcgcgcgaaggacgcggtgtgcgctgtgcgtgcgtgcgtgcgtgtgcgcaacagtgtcagtacgtgagaggcaagattgggggcaagtggttgggtacggtgagaaaggatgggggtgcaacgaactgagatgccacgtggcgagagttccattcaatccatgccttctcgaatctcgaggacacttgccacttcagtccccctccctgatgatgatcaagctctacaaattgcgtgtactagtgccaatcatgacgtgcgcgttgtgtgcaggagtaattaggatctgtttagctgatcgagctgaaatgcaactaaacagtttcttcatcgtctgaaataggagcgaaattgggtgtagcattttcattaaatgaactagataggtggtgctgagttttgttttatttttttcccttcagaaccatagatttatatttttctccagctatattaacatataaaactcgcactgactttcgtttaaaaaaaatactccacagctccactctatatataacacctaaaactaaatttagaagttggaatttacaaaatagatccttaacaacaatatttgagttaattttgcatcgcggtgatcccatcccctctatctcgatctctacctaggatcatggctcacgacctcggaatacaagagcatatcatgaattaaaaaattggcttaaacaaattatctcgctctatacaaacatttttttgaaactcacatggattgtggggctcttttttatatacaagaggagcatttggtaaagccaaaattttagaaatttctaaccgatgatccttgaacgtgcggacgttgatacctggtctaaataaaagcagatcgaaccttaattcccatggtcaaaaaggcacgaatcgctatgcagaataacaagagtgaaaacattattactccgtaccagctaggttcctgctagcatattgcactgttagttgacaggagccagcaatcaactttgtttatgtggtaattaagcctagctatgaaagggtatgtagcctagtggttatagtgacttgagtagtaccccaaggttctgagttcaaatctcctatggagcgaattttagattggattgtttgcggggctaagtttcctatttcaatggccgtatatatccggttaaatatagaggatgggtaaaaaatacccttctctagaaaaaattaggcctagctagagcacatattttaactttattgttagtattagtactagctctggttgtctatcactctgctgcctctgcacatactgatctagaacacacatgttctctacttctctgcagtcactgctactgacatgtgggccctactctctttgggccagcatgtcagtgtcagcagaggatctcattcctacagtcaatccatgtgtgctactccgttaaaaaaacgaattccaagctacaaacctaaacacgtttttttggacggaggggtatatataaacaaagaaaaagcactgtaggtacataatatagtactagatcagtcttattacagctgttcaaaaacagttcagtatatagtgaatctagttggtctgttgctactgcagttaattggctctggttgcttttgttgatctgttgctactgcagttaattagctccggttgcttagttgatcaagttaattagctctggctgtgccctaatcaaaattcatatatagtagcttcaagcacgacataccacctttcctaccttctggtggatactcctctcttttataatttctgcagtaagcttgaaacataagtagacactgccattaattaaacaagcacagtgaattaacccagatatgtgtaatctgcatactaattaaattaggttcgtgccagttcaaggcagccacaaccacatacaggcgatccatatattgatttatatatctgatccgtttgttgaggttggtgcatcaatcccccctgaagcagctatgtcgagcctaattgcgatttgattaatcaatttttctcatccaacgatttaattatgcgtgattttaatgattcgatcggtacagttttttttctctttcttcagtgctagtgcttctactagtattcgtgacaataacctgtcggatttggaatatatgattgctgatgtggtgtcgtttttattaacaagcccttgtacagcaaggtacggttcggttgccttgggtcaatcaagagaccattcaaactgttcagggacaggaacaagaacagcttcactctgaatccgacgcaatcttggccgtccgattctgatccgacgtcgctggattagatgaccgacaaaaaaccagagaaaatgttttttgggcgccaagaacatgtacaagtacaatgacgccacacctaggagaagtgatcctaaggcttcctcgatcagcttcgtggaatgaaatattttgtaattaatggaggaaaaataggatcgaaattggcccaaaaatggtcattttccgttgcaaacagtatatcatttcactggaatatttggtaggaacaacatacctctctgacaagaacttccaaggaatttgaatattccaactcaacaaagctagcatgattggtttaatgccaaatacatgaaaattaagtattactcatttcctggagtaccttaaataagtacagttgatttaaggccaaaattaagtgtctaatctagtgagcagccatccgtaactatcataattaaggagaaaaaatatcaccggtgccctgatgtgccacatcccgattaatgctgatatgcatccatctatccagctattatcagtacacaacgtttcatctctcgtaccaaactgacatgtaagctttggtttatccctttcccttcaccttcaagaatcccaatagaagatggtcagatggatggataagctacaagcatactagccacactgttgctgattcgatcttctgaaatgctaagctgatgatggtgccaacaatctcttctctgcacttcggtccttactgcagcaaaagataaagaagttttaaccatcctgatgacctgatcagaatcttcctttttcttctgttcttgttttctagtgatctttcatgatgcaatgaatgagaagaaatatataatatactacttgagaatggagatcaggtgtgatgaacacaaaagctttctggatttaaaagtgcttcctgatatgcattataagccatgtgttcccttttgttttcattgccatctgatcagatgcttccatccaagttacagaggggcagagatgatcgaattggttctggtcgtacatacacgtcgtgctcaggcttaaacactgcgtggttttcacacgtggaaagacgacgacgcacaaagctggaagtaatccacatttagcagcgatcataaaaaaagcagctaattagttggaaccaatgcttcgaggctgcagtacgtctcctttggtttcttttctctttggtgttgttcttctcatttcctttttatctttttccttctcctttcggtatcagtgatactttcagaaactttactccactgtaatgtaagaggaataaatttcagacaaatctatgtatgtgacgttggagagagccgtttgaggggattagtgaagttacatctcacctagaatgactgtttaactggtgatttgaggcataagaaagcattcctaagtgccagctaagtcatgtaaaaatttgcttacacaccaattatattctaatcttttaaccaaagaaatgctacacatggtactattaggtgaaaatgtgttctcctttattatttgcactttatgtgcatgttctacttctactactgctggttccctactctcttttggtcttgatatactgttacttgcaatcaatcttaattaatggccgacaatatctttacaaaagttttaaagaaaagaaacctctactggatgaattttcagggtagtgcttgatcaaatctaagaggtcgattacacatgtacctttactaattattggcagtagtagctgaagaaaggcaaaggcaatgttccattctttaatcatatggttttgaatgcaggtggcatgtatttggaattattaggctatagtcacaaaatgttttttggctggcacataccatgaaggtgattaaacatgcatggttggttgcatagtctaggtccctctactacagcacacaagatttaacagcaaaagtttgataaaaaggtgagagtgaaatgagattcagatgagagtagtaggattgctggttacaaagccttgaaggcaactccatgcccaaacctaacctaccccctgcattcttattcctcttgtgcccatggatggatgatcacttgaacaatagttgtctcaattttttttctcaccaaatcctgttggatttctttgtctttcagttaagaaagtttggggatgaaaagttctttgttcttccaacatcctccaggagagcacaaaaaaaaaaagggtgataggttgatggatgatttgacctggatgcttggagggctctaaaggctttatttcgtagtggaaatatggttgtggattttttttgcctcatatattcatttctcttgaagaagacgatacattcagtatatttatttgtctggaaaaatttatacgaaaaggctctgatgatcgattgagctataattgataagccgtagaaaaataatcgaagcattaaaaaaataattattggtaaaactttatgtgtattatcaacggtttaaaaatcaaggctgtaaaatagacttcgatggacaatttaccttttaactcttttaacttttattagtggtttaaaaaccaagccttaaagttaactttttaaaatgtaaattgcatctatggtatgacaacttgacaagtggatgtgatatagaagaacttgagaattgacgttcgagtgtaacgacttggtaagttggtgcgttctaatacgagaacttaaaaattttagtattttggtgtaacaacttggctaagtatgtgatgttttagttaatgagtgctaggtgaattttttttcacgatgttaataatctaatataccatcacgtagcaatcctattgatattatattataatcttgaatataatatttaagaattacattggagatctaatttgcaccaccggtttgaattttttttcttaccttctcaaatctcaacagaaatataatatcttctacatagtaaagtttaattgactagaatccttatttaaaaaaatactcggtataattaaattgttgcaccacttttttatttattgtatcaaaatcacacctacattgtaagttattgcactcgtacaatcacttataaaattcttacactaaatacctgtaagttgttgtactaggatactcatttaccaaattgcactcaacttaggtagtttatgcatcatgaatgtaatttactcctttttaaaagtttaaactttggccgtagctgataagagacgacgagagccaaagtggtagctcaaacaagatcgagaatgctggtacagtttagctcaagtcaaaccaaatcctgtactactacgcaatttagacgatttacctactgctatgtgattgctaaatggaatcctcttcctgtctcgtcattacagtatgcaatgtaaaagagaaatacagagtaaacgcaaaaccaaagaaattgtgtgttggggattgaacaggtgactttggagttcaaaccacgtacctctttacagtgcattatgctgcgttcatttctccaacaagagttgaatgaaattttagatattcgtggcacgctttcaaactgttaaacggtgtgtttcgtgcggaaactttctatgtgaaagtttctctaaaacatcagattaatttattttttaagtttataataattaaaactcaattaatcacatgttattaccaccttattttgtatgaaacactcaattttaatcatcttcaggagattcgagtgcatgtcgaaatcggtgatacacgcggttctggtcgacggcgacgagaatcttggtgcgattgccgggttgctttcggcatcttttcgcctgggccggcggcggatcgacgcaattaagttaacaaatcggcgtccggcgagtggccggctagccgccagcttcaactgctcgttcagagtagagatcgacctgtcagaatgttgggtggagcggagcgagctgaggcgcgtcctgtctcgttctcgtctcgtcgccgtcgacggcgcacctgccgatctgatctgatcacgttttttttttttttttgctccccttaatcatgattgagttggcgtgatctgatcgcacgggaaaccgcgagcagtgtgaccggcgatctgactgacggagtagtggctactggctagagcttgatagctttgcagatcttgctgtcaatcagccaccggtgtgagtacgctgtgcttgccgttgcgacgtcccgtgtctccggccaccgcgcggaggcgagcttattcgtcatcgtagatttttacgtatccagcgcagcaagaacgaacaagatgccgtcgtccgcgcgttccgcttcgcccatcagaccgcaaccaacgaaaatcctgcgcccccggcggataggattttctccgaacgcatagcctccatgtctgccgccgccgccggcaagagattccccgtcgacgcgaccatctcggtcggggctcctacttctccgccgatggggagacgaaggcggcagacggaacgctgtactagccttgtttggagtgcttaaaattacgataatctactgcttggtagctaacttttgaaaatctggtttatggtttcttagtttattttctgtattcaaaatttgggtgataatttggactgtatagggtgtgttcggacccaatgattcctcaccctctccatcgtattccgcgcgcacgcttttcaaactgttaaacggtgcgcttttttaaaaagtttttatacgaaatttgcttaaaaaaattatattgatctatttttgaaaaaaaaaatagctaatactctctctatactagtaaaaatgacgtttagaacagcatttagcataccaagaagtgattaattatgggtatttttccctgtctacccctattaaatatggttgcgcgtaagaatcttggcagggacaagttggtttctaggttttgcatggcactgttttgggcaggcttggatacttggttggctgcatggcgctcgtgcaggtggcgtttaggcgcgttttttgtttcgcttttttagtttgggttcactgccgcgcgtgatgctgaaatttttttgcatggcgctcgttaccgctattcgcgcgcctatcccgtggtaattttttcgcgtgggcgtgctgagaatgccgacgcttaggttactgcttgcccatatttatacgctaacttgctttcacgtttggagtactgagccatctcatcttctagttctaggcttctagctagcttcctctcactattgcagtacacatggccgaagatggcgatggcgagtttgcctttgatctgaacgagcctccgttggagcacggcaatggtacttttcttctctgtttgacaggatttttcttctcttgtgcatgtttgtacggcaactgtgctatctcttcttctctatatcgtttctcatatcattgttttccattttttttaactggttttgatttgaacttgccactaaatgaatttggtgcagtcgatttcgattatgtacaacaccttgctggtaagccaacttctttttgatacaattagattttgctagaacatgccatggctatttgtactatcaatgaacttgattttcttccttttgctagaacatgtcatggctctcgttgaagtaaaccatcgaaggaaggaaagacatgaccgaagaagtgagaaaacaagtttatcaagctttgttggctagaagcaagaatgggaaactaggcaagaaagatacaagagttgttgcagatcagtttgtcaaccatctttcctagatgaagccaaggctactcttgctgcattgaacatttagaatgaagctagttaggttccgcactcaattaatagagacatccttgtaatgcgattattaagttgtgttatcttaccatttctttggcatcatccttcctgggagtgagctcacgttcgcgcttctcgtcaagcatcttgagcacaatgcgagcggcggcggcggcgtcgagcgtgagagagcacggccggtgagcgcgacgcaagcgacgagagcggggccggcgagcacaatgcaagcggcggcggtggcgagtgcgacgagagcagcggcggcgagcgtgacgagagcgcggccggcgagcgcgacgcaagcggcggcggcagcggcgagagcgacaagagcagggccggcgagcgcgacgcaagcggcggcggcgagcgtgagcggcgaggttgagcggcgtgctgcatgcctgcatgcgacgcttaaggaattaaacgaggcaagcgcgggcgtgctgcggattaattgcgggagcggctatcgaacagacaagggtaattccgtccacatagcctgctgcggttcagaatgtcgttaaaatcgcaaacgaggttatggctagaacgacgtttttttcctatacggagggagtatctaattaatcacgcgctaatggactgcttcatttttcgtgcttaggtgatatgttcctatccatcagcagcgaacacacccttaagagagttggagattatgtgagaaactgtagctgctagaagcttatgcccgtaaagacaaagaaggtgctagttcaaggcgccatgctgggccgacccaggggatcagcccaatcaagggctttctacaaaggaataagtccgatttgactccctttatgtataggctcaatctaattcatattcctcaacaacaataccacataataccaggtaatattttgacatctcaactgttaaaaccattgtaatttaactcccttagcgattttaaatgtggtttcctaacgtactctctccgtttcacaatgtaagtcattctagcattttccatattcatattgatgtcaatgagtctagatatatatatctatctagattcattcacataaatatgaatgtgaaaaatgctagaatgacctacattgtgaaacggaggaagtaactcgtttcatacgagacccacatatcagcatccattcttcttcgtcttcctctcctctaacttccttcccgggcagcagttccttcccctcctcttctacaagtgacgaatagcaccacgagctcgccgccaccggcgatggccccccctcttcatagcgaacctccactcaactctcgttttctttctccggttttcctcctctttgcctctttggtttcccctcagtcggggtctttggtaaactcttgcgaggacggtggccaggagtggcaaatatgcgtaccatcatacctgtacacagcgctgaatgttggtttgcacagggaagtaagaacatgtatcatcagtaattcagtacttctcaaaatttgcactttacacaccatgaacacaattatatatggtcattttacagatgttggatatcattctgcaaaattggtgatctttcattctcaatatcatgatgggagtacatgtatgtacaatggaattatggcaaaaggaatgatgggctttgcatcattctcatcttgtggcaaacataaacatattactcacattgcaaacaaacagttgccagaacacagcaacacacacaaaaaaaaccattacaacaatatgatcaaacaataaatctaccatgttgtgagtgatcgatcctattattcttctaccaagacagactctacagagttcagaactatactactaaatcgccaatactaactcatccagttctcattgactgcatattcaaccagatccactcttgcatgccttactctggagcatctttccttccatcagcttttgtggaagcaaacagtttgtcagatggaacaacctgcatatatagaacaaaccatgtcagtgctactgatactctgattttttttttagtgtgctgtcttcatctcaatatttgcaacagaataagctaattaaaatcctgagaaattacttggtaattccgtgtaagagcacttcttaacttccttctcttgcatgctttgcttgattctgcatcaacctccgcctcatcatcagcaaaattctgatcagagacctctgtataaaaggaaaatggaagaaaggcgttagagactaggttcatcacattacgctgttttggagcaaccttagtagaactttaacttttttctgttctttctgttcttatgacaagagacatcacccaaaaaataaaaactatacaagctcccgggcttaagaacaatggatttggcatgccgcataaaaatcagtagtgttgataaaacatttgtatgaaatatgacgcaccaccatttgatcccaggaaaagccattgaaagctattttagataaaccgcattaaatcataacctatgaagtgcatggctattcagaacaccttatatagttataatgtgaccgctgatagtcagaaaaagatgatgaaacaaggaattcagacttttaagcattcttcaatgtgaactaatgaggtaattgagttaaccacctgtactttcaccaacagctttttcttccttgcaagcctcccactcccttccatgtgacaacggagtcctcccttggatagtctgaataccagattcatgatcacccactaaagcctccgccgcatcattccttgcattgctactgcattcgcgcggcctgaaatgctggatccaggggcttgcgggcaggcagtattttctcccgatccgtgagcaagcactggtccgatcaaatttgagtttctcccacaccccaccacggagaaccttgaatccgttgccagcatcattttgttcgtgattgtagagttgctcaacgaaagaagcctccattgagcttatataatgcatgtgccgctcatctgtccaccctgacgacatcatgtccaggattcgattgccctgtcaaagaaaaagagacaaccattttattcttcagagttcaggtatttgtaacaacgtcagataaaagagggcctgaactagtgaaattcatgtcaaaaatatcagagtagtgttgattgcatggcttaaagttatactccacgagcagagtaattatgtgtcttcactgcaccatgggcggattatattactatttcgacatgacagacatttcttgaacgattgcatgacaaattcagataaacaattaactgtacaagactaaacactttttactaagaaaaagaagctaatggcaataattcaaggaagcatgcattctgtatgacagaatcatgagcccaacaattgctacctgaaattaagaacaaacacgatggtaaaaagaaaaaactttctgttctaatacctgagcaatgccgcctgcagctggctccgccttgatcggtcgattgactgacacatcacccatttgattcttctcaatgaaccaaggaacccacaaggggaggaaaatccgaagaaattgccaaaaatcttctcgaaccgtatcagaaaccagcccaaaatttcctctcttgaaatatgtacagctacagagaagtagggggaggtctagggatctggaagcaaatcggcgaacaaaccaaagtaaatctcctcgcgaccggatgattacgaagagggaaaacaaaaaaaaacaaacaaacacggacaagatttcaacttcaagaaacaaacaagagaaacaaaaatcacacctctcgctcgatttcacccgcagatcgaacaacccgcctccctcgcagcgagaaagaagagagaacgcatccaagatttggtctgagcggctcgatctatggacagacaagaggaggtgaagaagaggaggagagagagaagcaggagagagaggagaatggaattgcaacggaagaagcaaagggagacgaagaagaatcccctcctgtttaaggagcaaataaatgcggtgcgagagagcgagcaaaaaaaaaaaaagaaaagaaaaagaagaaggcgcggtggctttaccgcttttaccgcctacgtgtgccagcgcttttccacgtggcgaggcgaaacgtggcgcgggggggaaagaaaatatctcgcgcgcgcacacgtgccgggccgcctctcagatatttcgtggccgctctggcgtgggcgtggcgttgccaaaaagatctctgaagctgggccccacctccctgtgcgtaagagaggctaggaaaacaaacaggagtagatttttgagcttcaatttctcataaaatttataattcttgaaatagctttttttaaatctagattttgagagtcgatagctataaaatctagaaaagaattagaagccacaaaaataaaaagaactactttttaaaattttcactaactaactactattatccacatcttaaaatcttttatctccttttgtgaaatgaacatgagttaactggttaacttttttttaatggaaccagtccactaacttttaatttctagatttgatatgagtgctcgtatttacgattaattattattttaactgtatcgatatggactaatctttttaagatgctcaaaaagatagggatagtatatttttgtattttgtttcttaaagtaatcttttatctaccagacaggaagaagaccatctacctgcgaaaccacgagcaagcaggcatgggcttgtccgctcgtagttatctccacggcgacgccttttatattcagttaggataagcaaaagtgtttttcaggtgattctgcagtgaacaaatctactactactactgtccgagatttttctttttcttctgatgcttacttcagtcattcgttatccaaagagagtcttcaggggcaagggatttatacacttttatcacaggcatctgtacataatatctgcaagatatatccaggagatatggcttggaagttgtgacccatagtttgttatgctagtctcaaaagtacaattattgaatcagctaagaaatatctcagggaggagagaaatatctgagggataatccagcaggtgcccctgtttttctaattgcaacttggtgaactgaatataatagtacagtatgacccatgttgacgcaaggacaggcaaactgtttttagactgcccatgttttcttctctgaccctttctgactaaacctttggttcagtgaatatgtttatactattgtttacttaacagtacaactatgcgttattccctgagtatcaaaatataaggattgtgtgtctgttctaatccaaactattataagttcaagcaactttataaaaaagaaaaataatatttatgatcgacaccactagatcaattatgaaaattattattttcagaattcacttcttgggtgtggtaggtgttaagactcttctctacaaaactgaatcaaatttaggataatttgacttgagccctatttgatatagctccatagatccacactggatttaaagtttgaatgctaaattacaacggtttaaatctttatatttcaactataacaggagcaaaatgatacatttgaatgttatcaacagattgaagatctatggatttgtagagttagaaatacctgacttcaaaaaatcaagaatccggataaatacaaaatatcttctttttttttagggaggcagtaacaagacaggtggtggattgttgattcattttaactgaaacaaagtgggcatatctcccaggtgtgacataagcaaccagtgagtgcaaagggagataaggtctcttaatcccttcacatagaaaaaaaaggtcgctttaccccttttgccttttgcaaaagtctaagaattactatgcaggtcgttttacataatgttctttttctccagcatggcatatcggcatcagctctcagtcacaaatcaactttacagaaatatgataagaccaaaataggcatctttcaagttccatcatgtgtaaattggtggagagttgggcacccactaaatagaaaaaaactgactaggggatgatgacacacacaccattgggaatagtcctgactacaactaggaggcaacaggaacttcagactgcagacttttcaggctcctacgagatagcattttataatcctgaaatcagcaagtgataactcattagcctacaaaactgaatcattgtgaactgcaccaagacaacaatacaagtctgatgcatctatgtacaaacagaaccatggagagcagcgtttacctccactacagactgagcacaaagcttcccagatagaactgcaccctccatcgaagccaaatatttctgctttgtgtagtcaccagctagatagaacccttcaatcggtgatctttgcagaggtcggcaaggttcacagtccgggatagtcttgtaaacagatctgtaacagtgagacagaaaagaaaggaacgtgagagaagtgtgcatccaactattagacctacctatgatatatcagatagggggcgctcttgcaaaatgtcctcaccttggtgtcttcacaacatgatacttcagaatctttgctttactctgatcagcagcaatttcatcaggaaatagcttggctagctcttgcatagttgcttcgatgatttcagtgtcactccgtccaacccattcctctgcaggagcaaagaccaactccagcattgaacggtttggatcatagtattcctgtaaagagttcaaaacaaaaggaaagaaaaccgttcagtaggcatccatgtctttaatttcctgagctattatggtccataaaatctagactctagagccaagtgacatgttgcctaaatgaatctgaaataaaatatatctactttccaagtttaataattaatactggattccttctgtaacacatgcacttttgggccttttgttacagctactaaaataaatatcatgtgatgcttgaagatggtaaacccaagaacaaatacacaagagcaataatacatgacagatagttactatttcgtaacatataatgtctcctagttagtaccttgcaagttactgacatgtccgcataaacacttaaaagtgaactcctgaaagaaaagggaacaagatcaatacatgggacatatgatatttggtattaatcaagaatgtatacaaaatcaggatagaatgtgcccaatttgggcaatacaaatcgttttagttcataaaccagtcatagcacagagcaaatgcatgaggcagtgaaaggacagcaaaactgatgaggaattagaagagacacctgctgaaaagaaggtggtcatatgtgttcttcagttttctatcaaacctgaaatgttcaaaccaacagaaatactaatatgagtcataaggagaaccacaaactcgatgatgagtaatttccgacttggaaccaaataattcaaccaaccaaccatatatgaacatttataacaggaactcccaccaacttctccagcttcttgaaataagatatttctttccactcttgaggtacaagaagcttcaagatatcaactaaatacaggctagtcagttaaaatgagtagccgcatatatataatttatgaactgcagaagaaacaaagattgtagaaaatcacctggtgttgcaaaaacataagcatctccagttatttgagttccatcagtaagtgcaaagtgtttcactgttccatcaggattaagttctattttctgaatacgagaattcagccgaacctcaccacccaaagagcgaacatggtcaacaataggcatgcataacctttcaggaggattaccatccaagaatgccatcttagaaccatgcttctcctacacatttgcataattttttttaaaaggcctctaagcgaaaattcatttgagtttcctcaaggtaggaaacaacagagacaagaaacactaagaaggatgtaatacgtaaggtactactccggaaagaacagaagaattactcatatgcaacacacatgaccatagagcaacataataaatacctgaagaaatcggtttaaagcaatcagaatgcactgcatggataactcatcaggatttatgaaattaagtgcctttgacattgcaatgaaaacctcatcgttcactcgatcaggaacaccctgtgctgatcaaacaactgtatcaggcaccatattaatccgttatcccaaaaaaagggaaagagattgataactatagcatatgtattgtgttttctgtataaaacagttctgtatattagctcataaagaatatagtcaacaggattgtgtgctttgtcaatatgtgcaatggcttttctaggtggaggaagaaatcatgcaaggttgttgacctttaactgaaacagtggtcttaaactaaaagcatagctcaagcttaaacctgtgcaaaaggatctgggcaaaataaagggcataaacttgagtacatgaagcatttcatcctcagaactgccagttcttcccaatgtgaatgcaacaataaagggcatcagtttttttattagaaaataaaaggttttctagcttacaacaccttctcctatatccattccaaattaatgaggtagaaatgtgtcttgtacacagagacttgacaaactgatattgtgaacttatacctgctttttcatccactcagaaacagtaaaaccatcttgagcttcaacataagcttggccaccaaccattgctggcaaaagtccaagagcaaacttcaccttctctggccaagttagcatttcattgtttcttagtatggcccatattcctgttaaatgcacgcatgatcaatgataaataataaataggcatcaattgacaacataaaagctccatggcatgatctattgatctatcattaacgttgctagtaatataccccctaattacagtcatgtgttagtaaaacaaaagtaaccaccaatacgatgtacttctgggaatcttggtttaattaaacaactccagcgctgcatatgatctcaccatttaagggtgcaggcaatgtttcaggaaaatcaaaccggctgaattctcctggcttgtttggcatggcaaatatcatggagtgttccttccattgcaaccgatcattaataccaagctcgccaaacaagttctgtatgttgggataagctccaacttaaaccaaaaaggtatatggttacatacaggcacaaaatgaacaatgtcacatatgtactgttgtggacgacaaaacagtgtgagcatggaaggaaaaacagtatctgtcatattcatatatgtttggaagggaatagtaggttgaaagaagactatgtatgaacaggaggatttatattcaattagctcatgatatttatgtgacgttaaaatttatcaaccatataagctagtaaaaagttactttttagtactgtgaaaaaaaccaatctaaaagtttcttacaaaataaaactaccatgtgtgttaatcctcagacatcacttcatacttcccgcatggcatttctaccttatcgatgaaagagtttgatacatgtttttttgttcaaaacccttagagatatctatcagtgctggcggtaataacctaaataaaatatagcacaacgagaaccttaaaaatccagagttattacttacaaaagatatgaagcccagtttcataccaatctccatcttcatccttccaagcagctatctgttcaaggcatttccccaaaaaaaaaaacaataatccacaaatgctactaacagtgaatatgagctattaagataaaggcaaccaaaaaaaaaaagaatgaataacaaaaaaaattaaatgcaacataaaagcataagagtaaaacctttccacccaaaacatcccttgcctcaagcaatatgggtttatgaccagcatctgccagatattttgccgttgataaaccagctaatcctgaaaaaaaaatcaaagctaaaaactacaatgctaagaccacgatgtgactgctatcaaagttagatatatatgtaaattattcatctgtcaaatcctagaattatatcatacctgctccagcaatcacgacctgtaatggtttagtgggttgttcactgtttctgaaaaatgaagatagttgtccagcttccaaaaagtttattgtgttttctagtggaggtcttggaaagtcctggcaaacaacctgcagaaaagccaatcaaatatattttcacaagagatggaatgtgaggcaataatagagtacaaaggttgaacctgtagagcaccgagcctccgacggaatctttttcctttattccttaagacaagagatttcactccaaagctcacatgctgactacttttcagtgcttggatgctgctacttgcgaagcacctatgagtaggaagttgtcccgcaaaagatcttgcttggctggttccagttatgttcatagatgacaggcagccagtatccatgctgaagcaactcctaaaattatattcagatctgatttgacaaataagcacgcaagagcgtctgcaaaaacaagaggaaccattaaacacacaatacacaaaaccgtttgttatgaaagtcagccaagtatcactgtatcagtatgtaaatttatcaagtttgtcatcactatttgatgaaaaaaaaaaaacgagccaaagaaacagattctattctagtccagtcgtcaaatggaaacatagcatgacaataacaaactgatgccaaaaggaaaaaaagagcaggaccagctgttagttgttaaagctatgtggacagtggtaatattggtttactccctaatcttccgagtttctctatgtggctgcggccaatcaaacttttatagttggagagaaacatgaaaggaaaactgcatatgacccgcataatttggttagtgaagtaaatggattggaacagatcaagcatggcacaaaaagcatgaaaggctcaaatgatatcacactagggcagggcagctggagaggacctcgtttgcctcctcatgcaaaagtggtggttagcgcaaactgaactcacaaccatgcgcccgctagtatctaaagataagcccccaaactaagcactaaatcatcatatgccgcatgctcaaagccagcagtcatctcagcatctctcctactacctatttaccaggaaactaccgccctcccgtcaccgcagtcaatccaacaccttagcaaccccgcaacccggaatgaattcccccaattctacggaatacagatacgtacccccgccgcccgcgcgaccgatccgatcctgctgctgggtacggagggggcgagcacggagtggaggagactcaccggcggcgacgacgagcgggcggcgacgtgggagcggaggcggacggcggaagctgcggggggaggagtcagggagggggtgggtttttggggcggtgggaaagggacaaaggggaggcgggggtgaggattgtggaagatgtggtgggggagatgccttttggcgcctgctgctctctacgttctacgtggtatataccaccatcagccaatcagtccatcaccctcaaaaaaactcatatttctgaagggaaatcataggagtattttccttttccgattacacgggagatgtatacgtgcacacgtaacactacactcactctatgaatacgcctcctaacatatattttaagagatggaaaccaacatatccctgattcatgaaaatttcagatgcatgaaaaattctttcctgggggaataagtgtaacagtcatgaagtaatgaaaagatgtgctgctacgaagtaattatctgatgaacagtataatcactgtataagtaatgtttatcaaatgttcgcgtttgccatagcagagacagaaactgtgcgtgcatctgcacacgagagcatgcagtttctcagttctcacggtaatcggaggcgactgtttggtttcaggtgaccgtccgctcactaactggaggtttgaacggtggttggatcagcccaaattcaggtcttctcactgtaccagttcagtccaagctgccatcttcttaacacttcaagaagaaccaaccaaaacccacctcgctaacgccacttaaatctcctgtgatcttgtccatcagattgtctaatgcgtggtgagatcttcactgcaacatttggaatgaaaatgacgatgctgtagccgtgttcattatttcacattctgttccgggcgacagattttagctgaaggcatggatgaaccaggtgaacctttgcttgggctagagaatttcttcgacgaagatgttgatttggtaagtacatttgttaggatgtcgtggatttgaagcattctttgaaaaatgccgtgattcttgtggatatgtgacaggagaatctgcccctggaagacgtttttgagcagctgaatacgtctcagagtgggctctcatcagcagatgctgcagaacgcttgaagttgtttggtgcaaacagattggaggagaagcgtgtaagttgactgttttctttctgatcatcgtttacctgaaactgaaacatattccttttctgaactcctgaatttttttttttaaaaaaatcttttttgtcaggagaacaagatcatcaagttcctcagctttatgtggaatcctttgtcctgggtgatggaggcagcagcagtgatggcattggttctagcaaatggtggtgtaagtgcttgctttgtgttattgaaatattgacatcaaatcgtcgaaaatttgtgcaagcaactcaatggattttctttattattcactcatttactgtctttggtcagagccaaggtactgactgggaagatttcctgggaattgtctgcctcctgattatcaattcaacaatcagcttcattgaggagaacaatgcaggcgatgctgctgctgcactcatggcccggttggcgctaaaaacaaaggttttttttttctgaacagaaattttaaaaatacaggtgaatctattgtgttagtctgatcttgttgtgttcatatattcatggatttacctccaggttcttagagatgagcaatggcaagagcttgatgcttctacattggtacctggggatattatcagcatcaggcttggtgatattgtccctgcagatgcgcgcctacttgagggagatcctctgaagattgatcaggtgactcaaattgccgcgcaccgttcatgtggaagatatcgataattggaatgactgatttagttgatctgtgtagataatttgattacattttgtttctcctccatcttgtagtcagctctcaccggtgaatcccttcctgtcacaaaaagaacaggggacatagtgttcactggctcaacatgcaagcatggtgagattgaagctgttgtcattgcaactgggatacactctttctttggcaaggcagctcatctagtggattccactgaggttgttgggcattttcagaaggtgattcatcgatcttcagactgtaataagaatctcacaagtggatgtgctgtaagctatttctgactactgaattttcaggttcttacctccataggcaacttctgtatctgttcaatcgccatcggtgcgattgttgaggttataatcatgttcccaatccagcaccggtcataccgggatgggatcaacaatgttcttgttcttctgatcggagggataccgatcgcaatgcctactgttctgtcagtcacacttgcaataggttctcatcacctgtctcaacaggtgtgccaagatattgttatcatgtttctgcaattaacagacagcatatcacatatcattgttacaaaaatacgtagtaatttggcgaaagcgatggcggaggaagccatgctttggaagtcggcaaatgcaggggtcccttccgttacctctgcgaggtcgtggtagccaaatctagcacgagatatccccattagatccccagcctccaataccggtcccgtgcttgtttttcttttcgcattgtaaataacttttatttctcttaatggaaaaaatacgctccttgcgtattcccggaaaaaaatatgtagtaattgatttttggcagggtgctatcactaaaaggatgacagccatagaggaaatggcaggaatggatgttctctgctgtgacaaaaccggaactctcaccctcaaccatctcactgttgacaaaaacctaattgaggtagaaaaattaattaaaaaaatgcaacgtattgaattcataattattgactagctatacaacttatgatccatccttgggtaatttaaggttttcagcagagaaatggacagggaaatgattatcctgctggctgcaagagcatcaagagtggagaatcaagatgcaattgatatggccataataaacatgctagctgaccccaaagaggttctgaactcatctttgcttgatttgaccatcctacatatatttcagaatggttcatggatatcatctttgcattgccaggcacgctctagcatcactgaagttcacttccttccattcaatcctgtcgataagaggacggctataacatacgttgattctgatggtaactggttcagagtcagcaaaggtgctcctgagcaggtaggaacttttcaatccatcactgtaaatctcactgctgttaccatcagaattcagaaaatagtaatacagaccttgatcagataggaagaacatctgatgtctctcatcttcagatcctcagcctatgctacaacaaggatgatatctctgaaaaggtgcagctaatcatcgacagatttgcagagagaggcctccgttcactcgccgtcgcttaccaggtagtcgtagcaccatcaagttcagttcagttcagtttacttgttgctaatgaatatctgtctgatggttgagttcatctgatctgatggcttgagtgaaggaggtgccagagaaatcgaagcacggccatggcggaccatgggtgttctgcggcctcctgccgctgttcgacccgccgcggcacgacagcgccgacaccatccgccgagcgcttgatcttggcgtctgcgtgaagatgatcaccggtataatcacgcgatgatcgtactgcttcttgatcgtcaatggagcaacgccaagaagcttcttgatcattgcaggcgatcacctggccatcgcgaaggagaccggccgccgtcttgggatgggcaccaacatgtacccgtcggcgtcgctgttcggccgccacggcgacggcggcggcgcggctgttccggtggaggagctcgtggagaaggcggacgggttcgccggcgtgttcccggagcacaagtacgagatcgtgaggatgattcaaggggggggcggccacgtgtgcgggatgaccggcgacggcgtgaacgacgcgccggcgctgaagaaggccgacatcggcatcgccgtctccgacgcgacggacgccgcgaggggcgccgccgacatcgtgctcaccgagcccggcctcagcgtcatcgtcagcgccgtcctcaccagccgcgccatcttccagcggatgaagaactacacggtgagctagttcttggacactctcacctcatcacctgtaaaaattcacctctcttttgcttgattcacattctcacagagttcttcttcgctgcagatttatgcagtgtccatcactataaggatagtggtaagcgaaactggaattcatcatcacaaaattctcccaaaaatctcgtcattgatcgtcttgtttggatgcagattggatttgttcttctggcatcaatttgggagtacgacttccctccgtttatggttctgatcatagccatactaaatgacggtgatgatcatttttctctgaattttactgcatcaaaagcaggaatagacactcgatttattcagtacttgatggttgggcatctactttgatcaggaactatcatgacaatatcaaaggatcgcgtgaagccatcaccaagcccagatagctggaaactgaatgagatattcgcagctggagttgtcataggaacctaccttgcattggtaaccgtgctgttctactggacagtcacaagaacaaccttctttgaggtaaaatcttgcaacctctgaagaatctgaacctgaacatgagaacatcttgttggtaaatcaacagccgaagcttttgtgtgtatgaattgcagtctcacttcaaggtgagatctctgaagcaaaattccgacgagatctcgtcagcgatgtacctgcaagtcagcatcatcagccaggccctgatattcgtcacacgcagtcagggcttgtccttcctcgagagacctggagccctgctgatttgtgctttcatcctagcacaattggtaaatctgcagaagattttctgaactctgaaacaatcaaaaaaaaacttctgctgctagtagaaggtttctgaatttttctcagtaacggatgatgagtttcttgatctgcaggtggctacactgatcgccgtgtacgcaacgatcagcttcgcgtcgatcagcgcgatcgggtggggatgggcgggcgtgatatggctgtacagcctggtgttctacgcccccctcgatctgatcaagatcgccgtccgctacacgctcagcggcgaagcctggaacctgctgttcgacaggaaggtgggtacagtagcagcatgatctgttcttgggtagttggattccttcctcattcagagctcgcccatggcttcagttcagatctgtgccggccatggatgaataatgaatctgttcgttcttcaggccgcatttgcgagtaggagagactacggcggcaacgagcggcggccggagaccaggtggccgcgctcccatcatcatcatcatcaacaacggagggcgctttccgatcatctcctcagcagcggatggcggcctacgcggatcgcggagcgagccaagcgacgggcagaaatcgccaggtacaagaactgtttgaaaaactggaggattccccggtctttccttattaagattcagattttacctcggttttcggtagtaaatttttcaaactactaaacggtgtgtttgtgcgaaaactttctatatagaagttactttaaaatatgaaatatatccatttgtcaagtttataaaaattaaaacttaattaattatgtgctaatgttttttttcgtctttcctttttttttggttggcttgcagattgggagatgcacatatgctgagagcgcatgtgcaatctgtgatgagactgaagcgtgtggattctgacgtaattcgatcggctcagacagtttgatttgcttgggttttagcatcatgacgttgtatcttcagatttcagagtaaaattaccatagctttttgcatgcaaaatgtcagaaacttgtacggaacaggtcgaatttttgttaaatgacaagtgatgatatatgagcttgtacctgatgattgagtctcttgtaacctccattgaagcatttgctttgtagttgtactactggtcttgttaacaaccagtgaacctgatgctatacttagcagcactatgcttctttggatctttcagatgatataaccaaataatctactaccatgatggcattaatgaacaatcaggaattcagaatactgttctgtagacaggatacaatggcacacctggtcctacaatatatcaagcaacacctgtgattatgtactgatgaaactgactttcttttctatttctccttccattcttctctccaataggcgataggcgaacaaaataaatacaatttgagatgtaacaggaaaagctaggggtgtagtttttgtcatatgaaatcttgttcttggtcgtctgttcggcgcgacgaagtatctccgtcgagcattctcttcgtcatgttggccctctggacaagacgaaccaatgcttgcaccacctctgacattggtggcctgaattctggttcaggctgtaacatgaatttgtttcataagattcagacattctgttccatgtattaggtaattagtattgcatagctcatctgcataggatggtgaaatcctacctggacacacaaagcgagcacgtcggcaaaccgggagagagacttggcagggtacagacccttcagcgcaggatcgaccattctgtccaatgcatcgatgtcatggagctgtggagtcgcccaccgcacaagtgactgctctgacctcggtctagtgctgtaatgcaaagtcacacgattataccgaggttcatcagttagcactaaatttatagttatgcgcaagctggaaactggttacgactgatgagaagatcaagttacctatcgaaaggtctgcgtcccgtcaaaagctctagcatgactactccaaagctgtagacatcgctcttcagtgtgtactgaccagtcatgtccacctctggggcagtgcacccagcactctgttgcgctgcctgcatagttttttttttccgtgacgaacattaatacaatcactagtgaatcaagatgtataaaaggtgtgacatcattgccataaacttctcttttcaattaagaaaattaatacagcctctacatgactacatcaattcgccaacaatttctgtaagtccagtagtcagttttcttggtagtttagcaagcgaaggttcatctcagtgctatttttttttaattaacacacaactgtccaaacaattgtcctcttaaaatgggtgcttggatatatcagcaagagccatacctggaattctgcatcagaaataaagcttgcaagtccagcatctgaaaggtgtggattgaattctgaatccagtagaaggttggatgacttgaaattcttatggatgatggatggagaacaaatttcatgaagatatctacagattatattttcagaggaaatgataagatgtcacatatcatatttcaaaatgagcatagaattctatataaaaggactattattccataatgtataactgtcatccacattcaaacaaagcatgaaactagcaactgtcattctacacataaacacaacatgcaaaggatatttccaagtttagcgagattctgatggtacgatatggttgacagcagtattcttacttcaattgccatgaacaaaaggattgctaattaaatttgtgaaactagtaataaatcagttggtttgtaacttttatggataatgaatgaaaagaaacaaggcccttgtttagttcaatctggacacacatgatggctaaaatcgtacaaaattaataacatgtagtataatgccaaaacagcagatcaacataatatggagagatttttcacttactccagtgcacgggcagagcctagtgcgatcttgacacgagagttccagctaagtggcttgctgtattcgtctgaaagatggagtagatcatggagtgacccattcctgtggaaatcgtaaacaagcaagtgttgcccatgttccatgcaatagcccacaagctcattgagattcggatgatgcagttttgaaatgtctgagaccagttcagcaaaatcatcagatgaatggaatggcatcacggtactatcaagtttcttcacggccagaacctgaatagtgtaaacaagaaaagtaagctctcagaattttgcctatatctaaatgtccaacctgtatcaccctcgaaataacttcaaaagcaaaaaggggaaatacggtaacataaaaactgaaactaacattaagaactatacggcctccaatttatgaggaatacttctatgctcaattgtttctgttcatgaggtcatgacagattttaaggcttttttttcttagctttgcatttccaccttttgactaatgtgataatgaatacacatgctacctttcatttactttgagaaatatacaggaatagcaatagaaaaaattgtagcatacctttccaccagtaaactgtgccctgtatacacgtccaaaagtaccttccccaacaaggttgtccatgctaaagctttctgttgccatctgtagatctgcaactgaataaacagttgcctttataggtgccacattggttttcttcaagacaggcttgtttgataaatcatcatcatcgaaagacttgtggcgttcaatcttggggggtggcttcagactaaatgaagcaggggatggcaaagactctacatctattgtagtagactcttcaataggcttcatgtctgcacattttcagaagcaaattttcagataattgtacaaaatatataacaaaactaaagtatgatgatcagcaaggcatcaggcaaacagacctttaacttcgtttgaagggaacgaagtgaatggctggtgctgttcaaaatgttcttccaatgccgctctgcgttttcttcttcttatcacaaagaatgcaacgactgctccaactaccagcaatgatatgataatgcctgctacacctccaccacctatcccagagcttccaccagaacttgaaccaccattgttttgacctgggctgtttggacggtttggtggaggtggagctgaatacggtggaggtggtggtgctggtccattactccaagaatttccgtcagttctgtacacagggatcttattagttcagggtacatctctcatacatttttacatgtttataagcaaagagaactcactgtagattgtttatcttcttaagttgactaggaatccagccagtgaaatgattgtttgcaacattcctataggaaagcaaagatatgagatgtggtactgcacgtgcaaataaaatattaattacttataggttgatttcttacagatcatcaagggggagattagcaaggacattgatataaccagtaaattgattgttctgcagatatctgagaagaacgagtatgggattacaggcatgtcactccaaaaagacatatctatgagagaaaaacaatcattttcttacaatttcttcaggcttgacaatgatgtgaacccttgtggtaggtcaccagcaagagaattaaaggaaagatccctgcatcacatcacatagggaaatggaaagtgaatatagacattaggaatatgaacaacaaagaaggattttacaatacacaagttaagacccgtctacaatccacgcacacaaaagtactcacagtgttgtcaagctatagaggctggaaaatacatcagttatatttccttgcaattggttatgatttagatttctgcacatacaaagagaaaacatttagctctaccaaattatacaaatttaaaagcaaaatcaacttgatgtttgcaaagatactcacaaatacttaagattagacatcgagaaaatcgagtagggtaaatttccagtgaactggtttcctgcgagattgctgcaaacaataaccacttagcacacagacaccagaaaagctgatgtactttctaaaccacaacttcatttgaggaacttacagcctctcaagcttattagtgggaagattgtactgtatctgttggccaccaccaaggttgttttggctcatatcgctgcattaaaaaatcaattaagactgttatcaactgaattgtcacttgacaggatcagatatgaataatctcagatactcacatctcaatcaatgaacccatggtattcatattgtacgccaaattaccggagagccccaagcttggtaatttgctacaacatcaaacacaaagaaaatattgtaagaagtaagaaagaaggtggtcgagtaagtagtaaactactttgcttcatgatgaggctcacattgcagtaactgatgatcctgagcacgtgataccctgccatgattggccacaagggtctccaccacttgcctgccaacctttgagctgccccggagaattcaggctagtgaagagcgtattgaggacagtaactgcatgaaaaagagcaaataattactacacgtttttcgccgggcctaattgcaacactgtataatgcatgtcagtatgtcaccaaacaaacacattagcaaacttgaaatttgaagtgcccatagacaccaatgcatggattcagatttacaagagtaaatagcatgacatcttaagaggaaaatcgcaaaaaagaaaagaaagaaaaaaaaaagaaagctgaaatgctcatagcaatttttgaccaattcttgccatgctccaacgaacaataaggcaaaaaagaagagaaaaggagggtcaaatctagaggtaggtgtaaggaaaacgactgcattttcttcttggaactgctaaactaaaatttgttctcaaaaattgcccctcgcaatccagacaatgttttgcacgaaattcctcctcaattgagattcagcaagcaaaagtgcaaccataactgagatagctaggtacatagcataggccaaatttggttagtagaaacagcagaaaaagaatggacatgcaagatttccaaccgaatccagtgtatttccttactcggattagcacaacttaactaccccaggggcagaaagaccccatttttatcaacccaaaaatgagaattataagctgccgaaattcacacaccatcttgttcactatgtcgaacagacgtaaatcaagagcattcttgcgcaaagaccagatttcgcaagtaaaaaatgaagaaagattcggttaatcggaagctttcacatccatttccccgttccaaaaccgaatctacagaaaactccgtacaaacagcgccagaatcagcaaaccagccggacgaaccgcaacagaaaacacaaacacagacatcgagcgaagaactccaccgattaatccagcagctctgaaacaaaaacagaaaagaaaaaaagaaagaacaatcgcgcaaaaaggggagaagattccagattctagcttaccatcattagggtcggtgtctgcagcgaccaagatttgcttctggggccaaatgcagaagcagcaggaggagcacaggagcagaagcggcagccatggcgcatccgctcttcccatcttcttcttctccccccacaccaatgctcacacgctctccccactaaaaacgcaaagaaaggcgctttcctcgcatgaaagatcccttctatagcctcctccccactgatttctttcttccaattaatttacttatcttatctcctcctgtatctgctgctgctttcagagtttcaaccttcctccgtgttcttgaatcgcgcagtgggaagtagcggagcagcagctggcaccaggacggggacaagaacgatgaggtcaaatcaattgcaaggttgtcgctttcatcgaggggctttcttgtgaattcagcagccgcgaagggctcacattcaataggagaacatcagattcggagacgaattctttttcttcaaagagaaaaggtaaaaggaaagagctgattttttaaggaaaagctgacacattcgacgtttttattaggatgcatctacaacattttcacgaacaagaaaacaaatccgttgctctacttagctgtactcctatcattcttgggaggttggaataaaaaaaaattgcagcaaaaccgcgcacagattctgctgtcagcgccgggccgatgggcggtgggttggccttggcctgaactcagaaccgcagaatttgggttggaatgcgtgacacatcttttgcatctggtactcgtactataaacctccaccatcagctgatgcaaaagaaattcttgcgtcagggttactgctgctgtacaattttggactccattaatcatctcagagtactactagtacttacggtacgtcgcatgcatgcagagctgtactagcagtctacagtagcacttgattgtcaaattcactaattgtacttagtgctaatgggcaatgctacttagggggtgtttggatcaggggctaaactttagtatctgtcatatcggatgtttgaacattaatttggagtgttaagcataacaaaactaattatataaatgagagctaattcgcgtgataaaaattttaagcctaattgatccataattagcactaatcatgaattaattatgctcaaagttttgttaatagtctatatttaatacttctaattagtatcaaacatccgatgtgatataaacataaattagtccgtgatctgaacaaggccttgtattattttctaagtagaaaatgaagaagaaaggcatcaattatgcagggtggagtcgccgtcgtggcaaacatgggttcggagtaatctgcatgtctgcataattgcatttttctggcaccgcgtgtcatggcgacaagctggatggatcctactcccaataatggagttctttttaaaaaaaacaaaaacaaaaggagaagaacaaaaataaatcttggaggtcaaacattgtacactactcaagggcggatccaacccctacacccacaagacccatagatacccccgaaacaccttttttgatttttttatcatgaatggtaaactaaaaagtccctaaatggctgaagattaaagaaagttacatgtaactaagtctcctcaaattttttgttacttggatctgcccctgttcactgctgtatatttatatgtatgtatgacatgattgtatttcaacagcgaaattcacaaaaatgtgatcagctggtagtggatcgggactccttacgcgcatcgtgagtggcatgatcttcatgtcatggcaatttaattactagcattttgttatttgcttggtgggaatttgtgacctgatggcccatcgaaaatctctcagaattttatgccttttatcagaagcaaaatctccaccagccgattaaccctgctgaacaaagtttcccttttatccaaaaaaacaaacttaggggctgcttagttcctccaaaaacttttcccaaaaacatcacattgtatctttggacacatgtacgtagcattaaatataagtaaaaagaaaaactaatcttttaagcctaattagtccataattagccataaagtgctacagtaacccccgatgtgctaatgatggattaattagggtcaaaagattcatctcgcggtttccagtcaagttatgaaattagttttttcattcgtgtccgaaaaccccatccaacatccgatcaaacgtacgatatgacaccaaaaattttcatttcaccaactaaacaagcccttagaattgaatatgatatatcctagtacaacgaatttgaatgataaggatgtgtttagttcacgctaaaattggaagtttgatcggaagtggaatgatgtgatgg

SEQ ID NO: 5534 - DNA, 29058 bp, Oryza sativa
  unsure (1)..(29058): unsure at all n locations
gccgcaaccgcatcgacaccctcaggaagaagtacaggaaggagaaggagaggatgcgcctcgccgcccgccgccccgaccgccccgaccgcccctcgccttccaagtggatctacttcgacaagatgcagtctctcatgtgcccaccgccgctcccgttgcagccacccgtagtgacgcgccgccgagacacgcagccggtgccgcgccaatcttggggtctggacgccgcggagtacgtgctgggcgggtgtgagaacgcgggaacaagggattctgggtctggtgcggaattgggtgaagagcagccaaacgaggctggtgcagggaaaggggaagactttgagttgctcgtggagtcgattcggaagcttggggatgtctatgagagggtggagagtagcaagaggcagcacatggctgaggttgagtggttgcggagggatctccaaagggatcttgaggtgaggaggagggagattttggagaaggcgcaagcagagattgcgcgtctcactgaggaagatggggaggagggtgacctcaaggagggtgagggtgatgataacaagaggtttggggatgatggtggtggcgaagagtagagcaatgtcgccgtgaatgcttattcttagcctagggtctgtaagttcgggaaatcaggttggtttactcatacaggattatcactcatcttgaatacccatccaagatagtttgtgatcttgaatttagtgacaggcctgtttcattctagcatcacacttagatttgttgtgtttgatattttgcatgctttatgtggttatgttgaactagcatccaagctcttatagttgtatatgtcattagaatatcatgttaagaggaaaacttttctggtacagaatatctcttcaagaaggatgttcacttagtaaaatacactgctttgaaatttttgtggtagaaaatagggcaaataccctttgcaactaaaccataagcttcgtactggtattgttatggaaaagattgaggcaatgttttagcagtgaatttgaaatgttgctgaggctgagcaacgttttgcacagtagcaatttgactctgttacccaatcattaaacgggaagttgtgcaggcacataggatttatgtagtgtcagcactcttttggactgctctatttgatagctacttcagaaatgcagttgttaacatactctgtataccattcctggattaattttttgttgctcttgctgctcataaatccttatactgtaaactctgttggaaactatattaatttaagtttccagtcttccttggaagttgttgctttgtgagcgcattgcgggcacatatccatgaatgtatctttatcagtccctcttgacatcctgcttttatctaacattgttatgctgtcccttggttgcttttcaattgttattttttgaattctgatacctgcaagcatcgtacacatacttataaacctatgttttaatttcgtttgtggatgtggcttgacatgccagttgtgtccttgattttaatctccgggtcacaattgttctgctggcagtatgttaggaaaaacatcatgttaatattctttcagcaggtccttagggtgtttttgttgtatgcctcgacttgccttttcaattgtttgatactaccccttgaatttggtcttatttggatggttgctaaaatttgccatgccgatgtcctgttagagtttggtggcattccatacatctattgccatattggtggtaaaaagataactttgggaacatgatttgttggcttgttatctagtatctaagtttttcactggaatgcatgcttgcttaagcaagtcttgtaatataagcaccccatgtcttggacgttgagaataaactgtttaattttggtatttcagggctaaaacatggattttgtgttagtagttggatccacaaggattgctgtggtagtcgaacttacatctgtaactttagatattatatgattttcagatcccttgattttagattgatttgatcagcttacacgactacacccagtgcagattgtggtgtaggtctcctttgtatttcttgtaatcaaaatagtggttctcatttaattgttgtatctgtctctttgggattgatacaattagtccattactatgacaaatcagtatgtattgggttcattaagttttggacctataatcataggcaatttgtacttcttgcaaatgcacattgtacagctgcatttgtaaatctcgtgtcaacccagggttatgtttggcgcttcctgcggttgtaccattgacagggtatgttagtatttattgataggtatatctatctaggaatctcgccatattgctgacggtatcgtatacaaaagatggcaggagaaaaacaccaaacacatcactgaacgaactaaccaaatatccctatcaattacaggaacagaaacatcaaaaacattaattacaactaaaaatctcagcgttgcaactacgggctagattctctcttccatcaggcgtagaattctttcatcaggagcagtagaattgcttgccacagctagatgatactccggcccgtcggcggcggtacatcgcaataagccatgcccacaaggcgatcgccccggcattgaacacggcgatgacgcaggtgagggccatgacgacgcggttgtcgccggcggcaaccaacacgacgctttggacgacgccgagagcgaggccgacgccgacgaacccgacgctctggatggccctgtcgacgtgcgccggcgtgtgcggccgcaggtacaggctgacgtaggacctgacgcaggagaccgtggacaggtagacggcgaacgacaccagcagcggcagccgccacgggacgctgccgaagaaggaggaggcggcggcggcggcgccgtacgactccgcgaggtaggcgccnacnatnaagcacggcacgacgacggcgcacgcccacacctgggcacgggacacgcccgaccgcgcctccccgaccgtcaacggcgccgccgccgccatggtcgagacgatcaagctcacggaatgctcaacgtaatgtttgagttatgcagtttactacaagtctacgacgctcgccgcgtcctccaccgagtgtttttgtatttatggcaaataactgtaagtccgaatcggacaatgggtcctagattccaagttgccgaccgcgataagaatacgattacgaattgacgcgagttggcggcagccatggacggatacggcacgctctgtgctggggctacagcaagattctgggtttagacccatggaatcgggaaaaaggtcaattttagcatttaggtctctcaactataggttgagtctcattcagttattagtatcattttcaaagtacgcaacgtaggctactgcaagatcgagaagagtgcctagaatcaccatgtgaaaatacaattcttctgcaggagcacattagtacgctctcaagaaaaaaaaattgttgagagagtaagtgttctctaaataatgttctgccaaggcaatatggcttatcctaccaactaaagaacaggtgatcgccatctcttatcacttcaatgtcctctacctcggcacctcccacggtgagaatccctctcgctgccttcccaaacttcttttctgcaaaggggtatccattcacaacgatgataaatctgttgcttgatctgaacatctgacgatgttaatctttatgcagagcacaatttacatacctgaaagtttcatcagatcttgcatagaatctggcagtatgacgagcttcccagatgagccgttcagtgctgtgccagtcccatttaagaggtgttcatgaatagatacccgtttgggttctttgcatggcaacattttgtgagctgactctttggattcatctacatcaaacatggttgcacttcctaataccgtggagtagccattgcgaagatgatccctaacaaaggctgtttcctttgccttcaccttcagagattcaaggtactgaaaaacgttgtgagaaattgtgaactgagaaaaaaatatctatattgcattcttgaataaaatcaaataccagaacaaaattggagaatacaacgaccccatctgcagtgttaggccggatggtcgagaccatatggctgtggcttatacggacgagctgcgtgagctttctgctccggatggtgaacggctgtgggatgttgaacatcaccccaatttcccctgccattccccgtggccctattctcatcacttgctgaaatgtcacaattttgatcagaaccttttcaggtcagtatgcaaatgccggaaaaagttcagtatactgagaagagtaaggccgtgtttcgttctttggccaaattttttttaaatatacggatacacttgaagtattaaacgtagactaataataaaataaattacagattccgtctgtaaactgcaagatgaatttattaagtctaattaatctgttattatcaaatgtttactgtagcatcatattgtcaaatcatggcgcaattagactcaaaagattcgtctcgcaatttacatgtaaactgtgcaattggtttttttcgcccacatttaatgctccatgcatgtgtccaaacatttgatgtgactttttttaccaaaaaattttagaatctaaacacaccctaagcttgaaatggtataactgatatactaagtgcgtcaactgggttctcgtgtgctttaccttctctgtaccatcctcaagggttgtcaatacctcctgatacaaaataaaagattaagagaaatgcaggttgtcagagcatgaacagcgaagagaacaaacgtcacacgaggcatgttcttaccacttcaccagacacgatgatgtagcagtccgtcgaagcctcgttctccaggatgatatccgccttggggggaaatgactctgccttcatctccgcgacctgaatttaccacgttatttagtcagtcacccaaccggtaaacgcagagctattccgaccaaggcgtttgctactgcgtgttcaattaccagcggcaggacgagcttgtcggagacgccctggaacaggtagcagctctggaccgcccctctgaacatgtgctgcgcgatgcctgaccgcacggccttgggcagctcggacagcatctcctgctgcagctgctcctccgccctgaacctgagctgcaggctttccatcatctgctccctcatcgccaccggcagccggttcgttctcccgaacaccgacgtcctctgcaccatgtccctctgcacacaatgccatgatcaccaatccgtgtcaaaagaaaagaaaaccatgatcaggttttgccaatatttaccatcttgaaggtgttggtggtttcgtggacgacgaggttggtgatgttgccgatgatgtaggaggtgaggcccatgttgaagagcatgaaggcgatgctgaacaacatctcgcccgtgttggcggcgtgcaggtcgccgtagccgacggtggcgagcgtggtgatggaccagtacacggcgcaggtgtagcagaaccacacgctgcggtcctcgaagccgtggaactggctgccgatccacgtcagctccttcgccttgtggtggaacgccatccacaggtagatgcacgaggcgaagtgcactgcgaacagcgtcacctgcattgcaatcatgagcacacaagatttcgtagcaagttatttgtatgaactctgccgaaatatagtactccgggtggaacggcgtggccttacgtagaggagcttgataagcctggtccacaagtaactgaatctaatgtccttctccaacctgcaagattcagaatttcatatcggtcattgatgaatgatgatcacatatgcatactgtagttattcatatagcattacatgccacccattggtgaatcatgctaccaactcaaagtcacgtagtgtatctgcactactactgtactacagggatggaaattgaggcggccaagctttctagaaatttatttattgtatttttctgaattatttaagacaattttttgttaagagctagggaactgacaaatttttgaataattttagcttaaaaaaactgatcaatcggaggctcggagctacagcaattataaaccaagccacttaaacgagctcttttcccccacactcgcactgaagataaagacaaagaaagaaaagtctcttggtccactcacttacaaggttgatatcatgaaagaaggtactctccgttcttccaaagacataagaatttctaggttatttagcagatattaagattaagaaaatatatattgctcgtcattaaatgagagattgataggagtgcgagagtgggagggggtattaaaatagaaaggaatttgaatgacgtgaacgatggcacaattaggctatattctttaatctattgtcccaacttcatcttccttgtttttcacgcgcacgcttcccaaaatgttaaacgctgcatttttttaaaaaaaaattctatagaaaaattgttttaaaaaatcatattaattcattttcaagttttttgctcatacttaattaatcacgcactaaaccgtcgtttcgttttgtgtccaatggtggaagagttctcaactcgaattggcgaacacaacctttagttagtatatacaaatgcttataaatgcatatattatgtacaaaatttaaatccaagaaatgtttatatttgaaaatggtgggagtactatgataataaattaccttataagtcaggccagtagtgctaaggcctcctttggatttggagggtttctttttggatttgcaaaggatccaaatccttaggattctattcctatagtgtcctttcgattgaaagaatactacaactttgaaaatcctatagatttaatttcctatgcctcatttcaaaggaaaataagcactctcttcctttctctctctactctctctctctctctcactcaaataaatttcctctagaattcctatattttatttcatgtgaattattcgaaggcactagttctggtattcctgtgttttgaaatcctataggttttacaagagcatgatattcaaatcttatattttttcctattcctatgttttgagaatcctatatttcaaaggagctaattaaatcatgctgcgtacaaaaagccatacgtacttgatcacaactctacaagtctgcaatacacactcacacaaagtactgcacactcacgtactaatcattcgtgcgtatatgaagttatgaactcacacacaatctatttgaccgagatcgtccattggatgtggagtatttaccttgcaaagagcttgctgacgcgccgtaatcgccagagccggagaagattgagcaacccatacaatgcttgtcttttgccgctcactatccggtagatcatctgtaaaggaatcgttgaggcgacatccagcgccaagcatggtcgtgccaggtgcctaaaaatgcaagtccatcgataaatattgaactctctgacggagatactccctccatttcaggttttcaggttataaaatgttttaactttggttaaaatcaaactagtttaactaagtttatagacaaatatagtaatatatataatactaaattagtttcatcaaattaataattgaatatatttttataataaatttgtcttgggttaaaaatattcctactttttcctacaaatttaatcaacttaaagcagtttaactttgattaaagtaaaaacgtcttacaacctaaaatagagagagcagcaaaaaggaaaaaaaaatggacatgcagtgacggatcagcatcacgtatacctggtggcgatcttcttgcggtcggttacgaggaggccggtggaggcgtcgcggtacgccacgaagaaggagacggcaatgtcgacggcgaagaaggcgtcgaccaccagctccgtgacggcgagcgcggccgaggccgacttctccatggccagctcgaacggcgacgcccacgccgtgtacagcaccagcacgatcaggaacttctgccaccacctggagtggaccactcaaaccagaccgatcgatgtacaagagttcagttcagttcagttcgtgatcgatgtataatggatgcaggttgttcgatcacctgtagctgcaggtgtgagggttaacgacgaatggtcctagcgaaggagagggctcgccgaatgccggccggagaagctcgcttctggaggcggccatgccgatattcgtcaccggtagtatggatgcccctgcagtgctgctttgtcttgccattctgctggctatgcctatattatatactgactctgcgtgctctctcctttgttacctcgtcaagttggtgatctagcttttgacgtgggctcaaatctgcaggatacgaccaagcgaggaaagagttcaaaccaaaagttttgaaagggtgtgtgccacagtccactaatcaggaatccactagagttaggatcagggtttataatatagaaaatccgataaatggcatttacaagcgcctaatttcaaaaagtacgagttacattaaatatgtgtttaatgtataccattatacaagtaactttatctcagaaatatcatcgtcgttaatgttccgttagcaacccctgtcaagtgctataggataaacaatacatttaatggagcgggacataaccttaacgacgatgacatttctattacaaagtcacttaggcaatgacattttataaaactcacacttatcgatagtattttttataattggttgtttgtcaatagtatattttggattttctcttacagtatcgacataaccagtcatttatcacaataaccagtcatacaaggggcattgcatttagaaaccgctcaatagttcaaacaaggttttcttaattgtactaaaattttttggacaaaatggtttgagacttactagttttcaaaataaaatgatcggttattacttctataaaaaaaaccactaggttatgacaatcaacagcaaaatcattttaaaatcattttttcagataatgaaaaacaaaatcatagactagcggttagcggttatagatcggtgcctaaactcatatggaaaaccttggataggttccaacttcgcttctcagacaatgttatccgcgttgatttgagaagcatcagtgccttcttttgtaactttaataattggactaaaattttagcaatggtggagattatggtcaataaaacatagagataatattttcttttgagcaataattgggtcaagaactataggtatgatatagctagctattagtgagatatctagctagctcttcgttcttggtagtttccataaagggagagagaaagggtaaccttaggccctgtttagtttccaaaacaaaaattttcatgctgtcacatcgaatgttacgacacatgtatggagtattaaatgtaagaaaaaaaaaccaattacacatattgcatgtaaattgcgagacgaatcttttaagcctaattgcgtcatgatttgacaatatggtgctacagtaaacatttgctaataacggattaattaggcttagtaaattcatctcacagtttcctggcagaatctgtaatttattttgttattagactacgtttaatactttaaatgtgtgtccgtatatccgatgtgatagccaaacccaaaacttttcctaagtccttaatgtacacatatatatgctgatatgcagcacactgtagtaaatttcctggtgttgtagcgctaatcggcactgtaaaataataaataaatctggcaatcttttatagctaaaaccaaattataaacaaaataaataccgataattatgtaaacttttctttaaaaggcgaatgattaaacatgtgtcaaaaagttaatggtgttacttattaaaaactggtagtatgatattagaagaaaactcaacaccagttacgatgtataactgggtgccaattaatttttagtttcaaatttcttaaattggtaatataaaatgtattgcttctaaattttgaaattattatatcaagaaaaaactaaattaagattccaaaccgagtgcagctacgtattattaattctaaattcaaaaattcattaagacttcatgacaagtacaaccttgtatttattaatgaatgtatttaataattactaaattaagaagataaaaggcagcaaataattaagtattatagtgtattcaatactaatattgtaattaaactaaatcgttttgatcttgatgactctaaagcaagatatacacttatgcacagtatataaaataaatagttcatgcaaacacacaagttatctcaaggatttaccggcctagtctttgaaatagaatttgcgtgcgtgtgtttatagaggtaagtgcacgtgcattatgagtgcgttgtactgtataatataaaatatatatatgtagtagctcttacagttgacatcatacaaagtcatatattgatgttatattcaggtcgcgtactgatgatagtacgtgagggggcttaatcatgatagagacgaaaccaatggttaattataacttgccaaggatggtgtccctccaataaatggtctgttttcatacatatacgctctgcaacattgacgataccttcatgaacagaaactaagccaaattcagactttcgtatggcctatatgtatgtaccccccatggttggcaccaggacgtaccagctttgcacgggactgttcctgataatgtgtttactgtagtactctagcatcgtactaccaccatctcatattacttgtcgctttgagtttttaatatttaattatttatcttattaaaaataattagaattattatttattttgtttgtgacttgttttattattaaaagtattttaattatgacttatcttttcttatatttatactaatttttcaaattaaacgaatgatcaaatgttacaagcaaaaagttaaagcgacatctattatgggacataggtaatactatatactccctccaatcctatcttaagtatagtggattttcgtggtcaacgtttgactgtacgttttatttaaaaaattttaaaaaagtaagtcacacataaactactattcatgttttatcatctaataataataaaaatattagttataaaaaatttttaaattagatactccctatgtcccataatatagcaacctagtaccgaacgagacacttcatagtacaacgaatctggacatgaaatatgtcatgtttcgttgtactatgaagtatctcgttcaagtatctcgtttggtactagggtgctatattataggacggagggagtagatggttaaatattgaacacgtaaacttacaactggactcaattaaaaatgagacgggggagtatatagtacgagagctattaatgttcacttttctaatttcaggatttcagcacttactaaaagtatataggccggccgactagagaagtagactttgcggctctgcacccgtggtgaaccgaaatccacatgaggctaatccaacaaaacttttctgttagtgccatgagttcaactacagtatttgagtgaggccattagaacacgccacataaaaaactagtaagtaaacctaaaaacaaaatgccttgccgtcatgtatatatatcacgctcacgcacatacacgaagggaatcaaattttctagcaaatatgtaaaaacgaagaacaagattttgctgcatttgattaggtaggaaaaaggaacatgtacaggcggcgtagtagtgctgctacgtacctgcagggagctataggaagacgctatctgaacgcaggacagcatcgagagaggccatatgctcgcaagatgcagaagagatgctcgtcgtggtggtcgacgactcgacggccgatcgagctaaacatgcatgccacgagaacagctaggtaaatagaaaaacatgcggctatgaatctgtaaccacggaggcagttccgtatctgtaggcagtggatcttcctctcgcacggtccgtcaaggactttcactgggaaactctttccaattccttgcaggatcggataagaagcatgcctacatacatggttgcgttgtattccgtcgcgattcttttacttattaccgtcaggattaaagaccaggattggcgcccttgatttcattattataactctgtcacggcatgatgccgcgatttcattccccagatatatatcaattccatgctctgcgatcgtctcgttctttactttgcattggcgctagctcgatccgtcgctcccttccgttgattaatacacgcgcatcggcaatctggcatggcgtagatggcgcaaaccgggcggggcgcatcgcctgctgccttttgagcgctccttcgaagaaacggcaagtgcttggcatcgatcgatcgatcggttctcgcggcgaggggtgcggacgtgcggctgcctcttgcgtttggcataacacggacgaccgggtggtggttcactcatgcgtggggtacgtgctagcggagctgcgcgcgggtgtccgaggcgtttgacaccatacggccttcggttgtcccggccaagctgcgaacgcttgctgcagccgactggcgacgaccgcttggtgactggccggtgcgcagaggagcgcgtcgcagcgatgctgggtacgtaacttttgttgcaacttgcaagttggtttgtaagccatcgtgtgtgggcttcccaggatccaacatggtggagaggttcggaaccgtgaggcggcatacggcacgttgcgtacgttgcatagtgattcagcccattcaaccacccgcgtctaaatcccaatacgatatcgttcaggtccaattcacatattttcagcaggaaaaagtacatacgaggtccctcatctgtcaccgaactaccaaatcatctctcaatcgaaaaattagatatatggcatctctcaacttaaaaaaccggtcacttaagatccttagacggtattgacaacagttttatccaacgtaatggttgagttagcgtgggtcccacatgtcaggatgacccacatcaacaccctcttgatctctttctccttttctctctcttctcctctatctctcacttttctcattgtcgtctgagtaagtggaacagggtggtggaacaggcaggagaggaggtccagcggtcggtgacgagcaacgccatatctgagtaagtggaacggggtggttggatgcccgaaccacagtggattagatccagatggcacttatggtggagagggggcaacggtagagacggatcccctggagctacacaggcggctcgacaaagagctctaagagcatccgcaatggtaaagtaaggtgctacctataaaacatgtacatctcagcaatagactagattaatagtaaaccactttaatggtatgtctacttgggtatctataactctctaatccattgcctcgtttttctctatagactatctacaggttagtagatagctttgttctctctcttcatttaatctcttccaagtaagaaaatatgctaacatggatatcttgtagagagcctatagataaccattgtgggtgccctaacacataagagcttccccataaataaattgtggcctctactatgaaatccacgtcaccttccatgtgacctcgtaactttcagcagcacactccggcggcggcaaggcggagatgtgtggtagaaagtgccgacgacgctggaggcttatcaattgttaattaatggttagagtttttattatctcaattgttttagaatagtcttaacgtgtattttctaagagccaacactggacttagtttagctcaatggcacacaaatcagtactatgttgtaattttttcttttcccctttgcgggggagtacgttgggaagaactttatttgaacgaacttcacggttggcacataaacgaattactggacacataatgggtacaaaaattgcaatttagaaatttcttccgttagtaataaattatatggagcacaacacgtatcataattcgctcttatttcaacgtcttcgttgaacttcggcatgataaaattctacaacctttgggcaagattttaaagaacacatgcatgtacatgtacaaattaagaaaaataaagaagctaatattcagggaagagctgttcagttgcctccagccctccactcagcggaacaggcacatgacgaagatcgccgcgagtacgagcaagtgatcgatcccttggtcgatggccattcctgcaagaggtgcaaacaacacgcgccaattcaatcagagtgcaggcaactcacctaatgttagcccggaactggcagccgcgacgccgcgatgcgcaaatcttggtgcgcgtataaagtcacaagcactaaccgtccatggcgagcttcccggcgatggaggcaggcgaggcggcggcggcgccttggcacagcaacgggtgcagcagcgcggcggccaggaagttggcgagcacgagagcttgaggcctcatggcgtcccgctccgttggctcctgtgttgtcctgtggtcgatctcgtcaggctacgcttgcagaaaggctagcgtgactggagattcttggttgcgaacttgcagtgcagcgttccgatcggatttataaacgcagggagcaacgaacaaccggcgtcatttgacattcgtcacgtcttcgttgagtttagcttagcctttcgctgatctgacctgactttggtcgccagccacttctgactaatctgtcttcctctgtgtgtccgtctcgtcaactgccacgtgtagctctcctatccgccggattggcagcgacgtgaagatcgaacggttggaggaaaaaacgatgaatccgtcagttggggtaggccaccggccggatttgaatccatgggaaaaatttcagagaatgaatgctgtgtgccaatctcggccggcaggaaagcgggtgcaactgttcaagcgcacgccacacatgtgtgcgcctgtgatgcgttttggcgtcaggtatgccgtctaaaataattgcactggaacacacagttactgttcgcagtggtctatagctagcaatcctagcgtggatgtgctgctttctagctccatcatctctaaatcttttataagcacaagtgtggaagtacaatccactcgagcactcgacccggccggtttgttcggtcagcactgcctaattggcaattctcgtcggttttcaacaaacattttagctgacgtttgatcataccgaacatatcctaccccacaatggttccagcgggcaatccggcaagacggcaagttagcgatcacccgtagagaggagcgccagaacagaacggaacagaacccatagaccagtagtgctctgcaaaggtggaagcccacggtgtagtatttgccagcccaacccacgcaacccacacacgtgatgtggcccactgggcgctggcaatgttggggggtttcgggctacgtagattagattagatagacgacacgataaaagcaaagacgatagaattaataacgggaacaaagtcccgtcccccgagagagtttaattgcgaccccaacctagcgacgcaacagacatctgttgcaggggacggacatacgaacaatcaaacaaacctagctactcctactacccccagcggcaagtcgaagcaccggacgatggtgaccaccgcgccaggccggcccagtcgtcgacggattggagtctggaaaggaggagagggtcgtgtatttaagcttaagcaggagcaagcaaagcagaccacctcgccatcacagcattcaaagtgcaacgatggggagtggtggtggctactggcttagccccacggtttacgccgcgtactcatgcgacggagctaaataattgcccgggcgccggcccgcgcgccctctctatccggctctcacgtgcggcggctagccccacccacggtgccacaccacgtacgccacggtacgtcgcggtatttactcgccccgcccgcgcgcgtacaagacaattgcgcgtaggtacgcgacgcgcgcggacggtacggtggggaggtgtttactaccacttcctacccacgcgtgcggctctttgttagactttaatttgttgcggccattgcagcacggcttccgtcgatacctcgtgctacgtagtactagcacaccaaggtccagtaaaaacatcaagacgaaccaaactgttcgcgagatttttaatttgtttttttaagatagctttgtcaccttgtcgttgtcggtaagatgagccatactagtattgttactgtggtgctataaccatgcagcactgcagctgcatgcacaagagatcgatcatcgatgtacgtagtacgatgtgtagggcttgtggccgccatcaatccggtaataagcgaaccggttttgcttcgaggccaccccggtcaaggcagggggaagaaaacaacacgaatggccggttcgtatgttgtgaccattttctccatcggagagaggcaaaggacgggggcggtgagagatctaacggcagattgcccgtacccggtacccctcccacgccaccacacccacacccaacggctgcgttcggccacagccgcgtgggccccctcccggaacctgaatccgacggctgcgatcgcgccccggccgtggtcccgggacaggcgcacgtgctgactgtcacggcgcgggccccgccaatccatcccccgacatctcccagtgacttgtccaatcaggcgtccacggccacgctcgtctcactggaggacgggacccacggatcgtggggccgacacgtcagtggggaggggagggagggatggtcttgggccggatcggctgtggcatgagtggtggggcccacatggcacgccacacgggtattgtgctcccggtcgtagctccaatatgacgcgctcggatgagacgcacgggtgtgcccgtaacctcatcatggagccacttctaataaagctccttttgctttgttttttttccccttctcgccttgactgaatctttcgaactttacgtttgttttgtttaggcttactagatcttaatcacctcgagccaggggttttgctgtgctaatcatgaattagcagctgcgtacgttttatggtgttctgtatacggctgtttgtactgcaggaaaaattcgaaggataattctagccatgttatatatgtatgggaggaattttgaatggctatctcgccttttgcagtggaatacagaaaagaaatatggtatattgtattcttcaccaatgtcatactaggcaacattgatgcataagcatatacttgcagtggagtatatgcctatgcagacttgattggaaggggcatttctttttttgaaaaaaaaaaggggtagaagtcagcctctctatattcataagtgaatatacatagctataaaacgagcaccgttataaaggaaagttttacttacatacttagtttttcctttttaataggattgtgacgagatcagtacgcacacttcgctttctatatatcttgatcatgtttcgttgttgagtttaacttactctagctaattaagccgcataatcaattattctctactttcacaattttgatacaataattacttaaaaattaatttatactatgataaatgagaggagaaaaaataaacttaatataatataagacgaagggagtagatgctacagcactgaggagagatatttcagtagcggagatcgtaccatcttaagctttgcctgagagtttctaataaccgtaacttatttcataatatctacctcccttaaactgtttagattctctcataattttcaagaatatgtagtcataatatatagtaaagggattagaagcagaaacttgataaacccatcaaattctcaccaaagctacacaggccccgttagattccataaaaaaagtggataattttttggataaaagtggcacgtttttcaaactactaaacggcatgtttcgtgtgaaaactttttatataaaagttgttctaaaatatcagattaatccaatttcaaatttataataattaaaactcgattaatcacacgttattatcacctcgttttacataaaacacttaatttttatcttcatatcaaacaccgtctcaatggtttcttaattcttgatttctcatgtcccctgaatatgaagtaaattgaggtgcggttgccggtaagcaatacctcgagagaacttttacttaatacatagtatattgttaatatatattgtcggtataataaggacaatttagaattttgtcacaagattaaaagatgtgataacaatttaatctaaacccattgatcacttataccgactatagatattatactaatacagtgtatacgtaaaattctctaccttgaaacccagtgcagcattggactgcccccttatccactggtttaatttagtctagtatatatagagtacataaacaaaatttgcttcttttaccatccttaacacatttattaaccaattgtcgatctgacccccaatgcatggatagtttaggttgattttgtcaggcaattctcatggtcaattcattattttgaatcaaggtttatgatatgtgctccgatatagagttctcattccttttcatagacatatacatctgataagtacctctaacatgcgtacacaattcttactgtctcaggtcataccaaggaagatcttattgtcacacaattgattccattgaacactgtacgacaatatcttgtaaatggtcagtaaaacctgaaagtgcatgtaccattaatctttttctagccaaaatttatctttcttttgcgggtaggaaacctttatctttattttcacggcgcagtgtatccgcggcgtgtgacgatctcatgcctgtcagggcagggaaacgtacgtacgcgatcccctcccccctgatcaggcgatcactgcaccgtcggctccgtgacaagtaggggtggaaaaaaagtttgggctcgcgagctcagctcgggcttggctcgagctcgcttagcttggctcggcttaaataccaaacgagccaagcctaagcgtcctttctagctcgtttctgaaacgagccgagcctgagctgtctcgcgagtcgcttgatttggctcgtgagcctacgctatcattaattatatgggtgattttattttctagtgaagttattatttgtcaatatgtaatttatcatttatattttgatgaattgaatatataaagttattttaattttacatattaattatttgttattactttttttaatgattataaattatatagcttaatggaaggctcgcaagccagctcgagctagctcgagccacaaacgagccgagccaagctcatgttttagctcattgctataaccgagccgagccaagccgagactagcttgttgcgagccattgcaagccgagccgctcggctcgtttccacccctagtgacaagtgacaacgtcgtcgtgggcatattggggaagcggagcaccctgaaaaaaaggtcgcacgccgcagcctccaccgcacgcttcttcggctcccggatcggatctaccaccccacttcggaaattaaagacaaaaaacccttcgcgaagcaacgcaagcccacgcgtccggttccctccacgagtccacgcccgcccagggattccgcacgctcggaacgcgacccgagcccatccgcgcgaggccacaccacaggcgtgaaatccccgcgctgcccacgagcccgccgcagcgccgcgcgagggcagtccggtcaatccggcgcgcaaccctccccctcgcgacggcacgtgaccgcgcctcgagcagaccaccggctgtccccggccgtcggatcggatcgggatttaacctcgccgtaagccgcggataagcgcgggggattagaatacttaacctctcctctgctctcctcctcacccggcttaagcgcgcgggggggctgcgattcgcaggcgagagcacatgccatgtgaccccaccccaccactcctccctcacctacagctgttaaggccagtcacaatgggggtttcactggtgtgtcatgcacatttaataggggtaagactgaataaaaaatgattatttgcatgaaatggggatgagagagaaggaaagagtttcatcctggtgaaactcgtcagcgtcgtttccaagtcctcggtaacagagtgaaacccccgttgaggccgattcgtttcattcaccggatctcttgcgtccgcctccgccgtgcgacctccgcattctcccgcgccgcgccggattttgggtacaaatgatcccagcaacttgtatcaattaaatgctttgcttagtcttggaaacgtcaaagtgaaacccctccactgtggggattgtttcataaaagatttcatttgagagaagatggtataatattttgggtagccgtgcaatgacactagccattgtgactggcctaattgctctccccctctactgtgtttgcgtctttcttcttcgcttctctttctctctctctccatctcctcctcatcacttcccactctcccccttctgtctctctactttctctctctaccgccgctctcgcagcaggccaggttctctctaatggtcgtgaggcagtgagctcgctcgtacatggattccttgtgggcagcgatagcggcactgtttgtggcggcggcggtggtggtgaggggggcggcggcggccgacgacgcccagctgctcgaggagttcaggcaggcggtgccgaaccaggcggcgctcaaggggtggagcggcggcgacggcgcgtgcaggttcccgggggccgggtgccggaacgggaggctcacgtcgctgtcgctcgccggcgtgccgctcaatgccgagttccgcgccgtcgcggccaccctgctgcagctcggcagcgtcgaggtgctgagcctccgcggcgccaacgtcagcggcgcgctctcggcggctggcggcgcgaggtgcgggagcaagctgcaggcgctcgatttgtccgggaatgccgcgctccggggctccgtcgccgacgtggcggccctggccagcgcctgcggcggcctcaagacgctgaatctctccggcgatgcggttggtgcggcgaaggtcggtggcggtggtggcccgggctttgccgggctggactcgcttgatttgtccaacaacaagatcaccgacgatagcgacctccggtggatggtggatgccggagtcggggcagtacggtggttggaccttgccctgaacaggatctccggtgtcccggagttcaccaactgctccgggcttcagtaccttgacctctccggcaacctcatcgtcggtgaggtgcccggcggggcactttccgactgccgcggtctgaaagtgctcaacctctccttcaaccacctcgccggcgtgttccctccggacatcgccggcctcacgtcgctcaacgccctcaacctctccaacaacaacttctccggcgagctccccggcgaggctttcgcaaagctgcagcagcttacggcgctctccctctccttcaaccacttcaacggctccatcccggacaccgtagcctcgctgccggagctccagcagctcgacctcagctccaacaccttctccggcaccatcccgtcgtccctctgccaagatcccaactccaagctccatctgctgtaccttcagaacaactacctcaccggcggcatcccagacgccgtctccaactgcaccagcctcgtctccctcgacctcagcctcaactacatcaatgggtccatcccggcatccctcggcgaccttggcaacctgcaggacctcatcctgtggcagaacgagctggagggcgagataccggcgtccctgtcgcgcattcagggcctcgagcatctcatcctcgactacaacgggctcacgggtagcatcccgccggagctagccaagtgcaccaagctgaactggatttctttggcgagcaaccggctgtccgggccaatcccttcatggcttgggaagctcagctacttggctatcttgaagctcagcaacaattccttctcggggcctataccgccagagctcggtgactgccagagcttggtgtggctggacctgaatagcaatcagctgaatggatcaatacccaaagagctggccaaacagtctgggaagatgaatgttggcctcatagttggacggccttacgtttatcttcgcaacgacgagctgagcagcgagtgccgtggcaaggggagcttgctggagtttaccagcatccgacctgatgacctcagtcggatgccgagcaagaagctgtgcaacttcacaagaatgtatgtggggagcacggagtacaccttcaacaagaatggttcgatgatatttctcgatttgtcatataatcagctggactcggcgattcctggcgagctgggggacatgttctacctcatgatcatgaatcttgggcacaacctactgtcaggtaccatcccatcgcggctagcagaggccaagaagcttgcggtgcttgacctgtcgtataaccagttggaagggccaatacccaactctttctcggcactttccttgtcggagatcaatctgtcaaataatcagctgaatggaacaattccagagcttggttcccttgccacatttccgaagagccagtatgagaataacactggtttatgtggcttcccactgccaccatgtgaccatagttccccaagatcttccaatgaccaccaatcccaccggaggcaggcatcgatggcaagcagtatcgctatgggactgttattctcactgttctgtataattgtgatcatcatagccattgggagcaagcggcggaggctgaagaatgaggaggcgagtacctctcgtgatatatatattgatagcaggtcacattctgcaactatgaattctgattggaggcaaaatctctccggtacaaatcttcttagcatcaacctggctgcattcgagaagccattgcagaatctcaccctggctgatcttgttgaggccacaaatggcttccacatcgcatgccaaattgggtctggtgggtttggtgatgtctacaaggcacagctcaaggatgggaaggttgttgcaatcaagaagctaatacatgtgagcgggcagggtgaccgggagttcactgcagaaatggagaccattggcaagatcaaacaccgtaaccttgttccacttcttggctattgcaaggctggtgaggagcggttgttggtgtatgattacatgaagtttggcagcttggaggatgtgttgcatgaccgcaaaaagatcggtaaaaagctgaattgggaggcaagacggaaaatcgctgttggagcagcaaggggtttggcattcctccaccacaattgcattcctcacatcattcaccgagacatgaagtcgagcaatgtgcttatcgatgaacaactggaagcaagggtatctgatttcggtatggcgaggctgatgagcgtggtggatacacaccttagcgtgtccactcttgctggaacgccagggtatgtaccaccggagtactaccagagcttcagatgcaccaccaagggtgatgtttatagctatggtgttgtgttgctggagctgctcaccgggaaaccgccgacggactcggcagactttggcgaggacaataaccttgtggggtgggtcaagcagcacaccaaattgaagatcacggatgtcttcgaccctgagctactcaaggaggatccatccgtcgagcttgagctgctggagcatttgaaaatcgcctgtgcgtgcttggatgaccggccgtcgaggcggccgacgatgctgaaggtgatggcaatgttcaaggagatccaagctgggtcgacggtcgactcgaagacctcgtcggcggcagcgggctcgatcgatgagggaggctatggggtccttgacatgcccctcagggaagccaaggaggagaaggattagaaacaacaaccaccgacacacaggagaaacagccggcggtgagtggccaccaacgaggccagtcggcggcgaaatgcccgtagaaacaacagtcattcagaatcagatggatgccattttgaactctccacacaagcttagcaatcgcttctgatggtgctacaagataagaattttccagctgtaggttgatcagtcgaagttgttatgtacctataggagtagatcttttcttctttcttttttcgcagctttcttcgtctccctgtttgtttttcccgtcgcgtcgcagtaagagctgtgtatgtacatatataaatgttgaattttctttggcgcaaaatcaaaatccgcctaggttgctcctcgtcattttttccccttctcttgtctcttgacaatggtttaaatgtgcatgagttcatcaaacatgcaatgaatatttattgcagatggatattattgcagggtggtcattgcaagtaaatggcatccgaatctgagaagaagcaccactggagggggtggtggaggagggtggtggtgtgggagagagaaacatgacaggttgaacagcaaatggccagtcaagaggctgacacagctcctgtttccatgtgaggtagagcatggctttgcttgcgtggggtcaggtgcagtgagccagtgacacacccacgcaagaagacgcactcacgcagcacaagcacctttctttaatttcggggggctagcttgctttgtcttcaaatcatttcataagaggggcttagcttagcctttagttggtcaaaggttcccctaagcattttttgtcctctctgattatcctaatcgcctaggtaacatggctcccaatcttataataaccaccctcactattatacttgcatggtgctgtgtccgatgcttgggcgttgtcaaactaatgatgtgtgtgtccgcaaagtgagcggcacactggcatgcatgcagattcccccagatttcaagatggttgttcaaacgtatggttgctttcaagttcaggatttgagcttgcagtgtgctccttgtcttggtttgcccattccttttactgtgagagaatttagtgcagagcagagctagtcacattgggtaaaaattcatgaacttgctgaaaggcattctggttttggtctttatatctccacaagtagcttctccaatctccacagtctagacaggtcgttttctctaggccaaatgagtttttctttttcttcagtttttttttacctttgaggcttcgaggagctcaaaaaaagtccccatggagtctgtcccctgggtgcaactatagtggaacacatacacatccaacacaaacacaaagcctggaaaagctacaggagccatggtgacattgacaaactgtgcctcagaatggagtctctgacatcaccacaagggagtgggccctctgcctgtccgcatagcgttagcgctctggcttaaattttgctcgcccagtgctatcattatccccccttggaatagttgcatctgtaccaccatgtggcttgatgggttacaacttctgagtcgttaaaagtaattggacacgctcttcgtgtagaatcaactgaaatacgattatacgaatctacggaccatttgatacttggaaatgctcccacagaggattaggatgacttctgttggtttactgtagcacaatggattttttgaattacttctttcgatcaaaactatcactatgtcaaagttgttaggaatttcaactttcaagtagctagtacatattccctccgtttcatattataagacgttctagcattgcccgcattcatatagattttaatgaatctagacacatatatatgtttaaatttattaatatatatatatatatatgaatgtggacaatgctagaaagttttataatatgaaacgaaggagatagtagttaagagactttcttttttaaaaataactatatataacacactattttagtctagaataaattactcttacaatgtgggcctacatgctactcttgaattatgttagcaatgcgggcctacattcatacacatttatcattcatacacatttaagacaatcttagaaagaccatccacgccagtaccaatataagcttttggccattgattttaatgtaacacaacataggatagaagagaacatgaggtgcaacttcagcaggcttggtggcaaataaaggaagtgaaggcaagaaaaaatcattcattcgccctataaatggtaaggaaaaaagaaaccgtggtattggtggcagcagtaacagatgcgtttgatattgttcttatgacaatgtcacaaactaaaacgatatcaaaataatgcaattctaaagaaaaaaaatacagtgttggacgtaatacaagagatcaagtgaaatttaaattggcgaagataacagaagtgtggagagtgacaatgacacgccatagcaaggaagttccatgcaatggaggtgatgagatggggaggtaaaacgcaaaactgaaaaagaaaaggcaaaacatatctagcaggaagaattttaacggaaacacgctatataagggacattaataggtgatgacgatggcgaactatatctagggatgggtaaaaattgagacaaaaatcaaaactgaaaacccgagaccaaacctgaaaaaacatagtatcgatcattggtccctaactcggtctaggtctcatgtttacaggaccaattatttgattagtttattgcatcggatacttgaattaccgatctattcaagccttatcctaatcccctcctcattcatcaatatatcccttccacttcctcatccacgatagcacttgacgcctcgtatgttatcttggcgctcctctcccctctcctcacctcagaacttcttgagtggacctctctggctagaatgtctccatggcttttgtccctcattggccaccgctgcctcaacggcaaggtgctagaaataaagtggtacatagagagggaggaaggggagaacaatctcttctcttgttagtgtttggtggtgaggtttggaggaataacaaggtaggggatgacaaggagattgtgatttgttgaacatcgaggtcacatgtttcagatcagatctgagataaaccagacttggagaacaatatgtttaccgggtgtttggtggtaacgagccaccacaaccgcaccaacacctaaggagtaacggtgacagccgttgagcctctccactccacgcaccatagctagcgaggatgtctcctcttttgtgcacttcacgtcctcgagcatcaccaaaaaagacagtgcacgatggtcgatggcaaccatctccttgggggagagccggaagcctatgttaaaggcaagtaccacatttgcgtctaagtcatctgcaagtgtgcggcttgctcacctacaatcctacaaggaagatgaatgtttggttagaccaaaactatcggttaaccaaatggccagtttaaatacttccattgacaagttcggtcttccaatttaaaggaccgaattttgaaagaccaaaaagactagattatagcactatactatgaattggatggtaatgcttgaaattggttagatgtggggaatgcacttctgacgcgaacaaattggtagcatttctacacgtaaacaacaacaaaccaatactgtgtggtcacttatttttgctgaattatttaattcctaggagccccaaaatgcgccatgttcctcggcctatttttgcactgcgtttagaactatgcttaaagatttgtcgtgcatcagcatgcatggcactttaattgtttcgaagtgtaggagtacctagcaatctagcattgttgtcggcgcgatgcgtgtatggttgtgtatcaccatttgtatttctcaatttgtgcttgtgttcaaaaggagggcatcaagtctgggccccaggatggctgtgcttggcctaatgcttccacccttatctgttgggagaggacatgtagggcatccagggacagagttatcatggcacagtgactgggtagctggacgagtgaccggctgagcgatctagcagtagtatcatcggccaggagtatgtgaaaatctagcaaaacaaaagcgcaggttgcattgctgactttctgcactgataacagcgtcccccccgggggtctctctctctctaggtgacattacatgcgactaaggctgtgtgtttagtttcctttcaaacttccaacttttcgatcacaccatatatttggaaaagaaaataaattgtatagtttatatgcaaattgcgagacaaatcttttgagcctaattacataataatttaacaatgtggtgctacagtaaatatttgctaatgatagattaattaggtttaatagattcatttcgcagtttacagacgaaatatgtaacttcaaatgtgtgtccctgtacgttaattttttttttttaccaaaacaactacacacgacctaagtggttcggttgttcgtgcattcatatttgtgaggcattttaccacgcaccatgaatgcgccctgcccatgaatgtggagcagtaaagttgcagctttcttgaatggctactgttgcccatcaccagcaaaaagttgatcccatttcaccggtacaaacgtggtcaattgacaaaatggttgtatagtgttaatatatattccgacgtattttctctatcacaaaataacttaatcatgcattttatccaaatttattata

SEQ ID NO: 5535 - DNA, 6524 bp, Oryza sativa
cgagttctcctttgcactgcgactccgcactagcatttgatagcggtgaatcggtgctaggttcagagctcagagcggaagcataccgtgtggcgcataacctcctcccatggcgtgtccttcagcgggctgatgctcccgtcgcctactatggagactatgcggacggcgcccttcccggtgatggttccgccggccccgccgccaagctcgcccgcggcggcgcgcggtggcccgagagagcggacgccgccggagtagcggcgggcgatggtgcgcgaaggggcaggcacggaagcggtttcatggaggtggcggcgagtaggtaggaagaggcgagtggtggccgccgcggaggcggacgtggtgggcgtggctgccatgggagtctgggaagaggaggtggacgaagcggctggacctcgagtctcgagccttcgagaacctttcgactcatccctaccgttcgatcagaaaatcgacggtggatactaatctcagggaaaaaaattctggaaaacgtttttctacacaaacaaaatacgagttataaaaactagctggtggcccgcgcaattgcgcggcaaaccccaaacaaaattatatatttttaagtatgattttacttaaaaaatttattaaatagctatctcattgtcttaagacattgaaaggccaaaccttatcatcatcgtgtttctaaatatatagtttttaaaagtcacaccagttgctatccattatgtcatcctcttctttatttgcttgctcgattatcactatttctattcattcttcttggaatcattaaaaattggattttatagttttagagtttattgtcatgttgtgtttcgtttttacaattcctagatgtcccgtcaaatgttgccattatacacctctacggccagtccactgtctcttctctttattatcattgagattttaaaaatcgaaaataattatcgtttggtttattttttactttctaaaagtcctgccaaaccatcagcggctttgccattatactcctatatgactcgcccgttgcctcccttttttattgtcattgagatttcaaaatcgaacatgattatcattggttttttttactttttaaattggacttgtagtttcattttttataatttttagaaattccatcaaacgatgccactatgcccctctacagcccatccgccccctactcattattgtcattgtgattctaaaaatcgaacataattatcgttggaatttattttttattttctagaagtctcgtcaaccgtcggcggctctgcaactatactcttatacaccccgtccgctgcttctctttttattgtcattgagattttaaaaatcaaatatgattatcaatgtggtttattttttttactttctagaagtcccgataaccgtcttactcgtttgcttcacggcctgcctgacatccctccttttaatcgtcattaggattctatttggtgttttattaacattttttatatgtcgtatcaaccgccaacactctactctgttttagatggtattttctttcaatagtctttatttttatcacaaattttagttatttataaattgtattcctaattgaaatcttatttttctttttctaatttcagaattttttttaaaaaaaattagttagtaccgtattgtgttatcttaatgtttttattttttattttcaatttcagttgttttaaaaattgtatttctacttgaactctctttaatttttctaattttagatattattttattttttactctaaattttaattaatctcatattgggttcttatatggattattctttcaatgttgcttatttttaatttcgaatttcagctaattttaaattgtattcctacttacactctcctttcctttaataatttcggattttattctatttttatttcggatttgattaatctcgtattgagttcttatatggaaatttctttcaatattgcttatttttaattccgaatttcagctattttaaaattgtatttctacttggactctccttttctttttctccgattaatgtgggaatttctaacccccacagcgaacgtggtgtctcctttcaaagctgttttaataacataatagatagatacccgcgcaattgcgcggctagcaccgatataaaattatctaatttttaatatagttttacttaaaattttgttaaatagatatctcgttgtcttaagactttgaaaaaccaaaccttatcatccctgtgtttctagttttattttttaaaaagttatatcagttgcaaatcctaaattctttgtcacccctcatttatttgctttctcgatcaccactacgtctatttgttctcactaaaaacctctaaaaattagacttatagtttttagagtttattgtctcgtttgggttttgtttttataattttcagaagtctcatcaaatgctgccactatactactctacggtccatccactgcctcttcttttattttcattggattttaaaaatcaaacgtaattaccatttgggttctttttttactttctagaagttccaccaagctgtcagcacctttaccactgtacacatgtactgctcgcccgctgccccctctttattgtctttgagattttaaaattcgaacatgattatcattggggtttatttttttactttttagaagtcccgtcaaccgttgtaaccatgctacttaatgacccatccatcgtccctccttttaatcatcattgggattctatttggggttttgtttatagtttttagatattccatcaaccgccaccactctaatcctttacatgcatgttgcttctcctatatttgttgtcatttgtcatagttttataatttttagaagtcatatcaaaccctgtcaccatacttctcttcggcctatccactgcctcttctctttattgtcattgggattttaaaaatcgaacataattattatttgggttcatattttactttctataagtcccgccaaccgccatgaccaggctgcttaacggcccatccatcgtccctccttttaatcatcattgggattctatttgaggttttgttaatagtttttagatgtcctatcaatcgccaccattctacttctttataaacttgttgcttctccccctctttattgttgtttgttatcatttgtgttctagatgaagttttttagaagtccatatttttcagtccgatattttatttacaaattatattcctacttaaactcttataattatttttctattttcagtatttatttttttgttatttcaaattttagttaatctcgtcacatgttctagatggtatcttatttcaatagtttttatttttttatgacgaatttaagttatttataaattttattcctaggtgaactattattttttctttttctatttttggaatttattttaattttgatttagaattttggttaatatcgtattatgtcttatatgaattatttcttaatgttcttttattttcaattttatagttgttttatcctactcaaactatcttttttatttctctaattccggattttattttatttttattctgaattttaattaatctcgtactggattcttatatatactcttcttttaatattccttatttttaattccgaattccagttatttctagattgtattcctatatggactcttcttttttcaatttcagattttattttatttttattccgaattttaattaatctcgtattggattcttatacgaactctatattgcttatttgtaattccgaatttcagctatttttaaattgtatttctatttggactcttctttttttcttctccgattaatgtgggaatttctaacccccataacgaacgtgatgcttttttttcgagcagttttaataatataatagatagatagatatcttcgaaactcccgcccgccaccgagcgggatacgcaaaaatctccaaaattttccccaacccgcgcgcccccagttttcctctcctccgaatcccaatctctcgcagttcgttcgaggagctgagacgctgcgacggccatggcgacgagtctcttcctcgcgctgcagtgcgtccagtgctccactatgcaggtgcgcgtcctcgcccaaatccctcccccgaaaaccccgcgagtttcttcaatagctcacccggtttcgttcttgcggcttcggtttgatttcccaggtgaagccgcagaagaagagcagcaacaagtgggtgtgcgtggtgtgcaaccagcgccagtccgtgatgcgcgtccacgcccgcgggcaccgcgccgccgacctccgccgcttcgtccaggaagccaacctctcgcgcggccgcgccgcgcatgtgcccgtgcccgaggaagactgggtccctgcggtgccgggggagcagcgggatgagttcccgaaggagaggaagaggcggatggactggtccgactatctggaagatccgggggagtacgatggcggcggccaccacgaggaagctcgagatgaaggtatgcgcgaaacctgtttgatgtgatgtcgcaatgtatgtgtatcacagtatcagtatgatattgggtagcgtgtaaaatgatatgctcattaggaccaatggtaagttgattttgctaggggcctagtgttactacttaaaatcaacttgcttgccgcatggtttagtatcgtgttttcaagcttggacgcagtgagtacgggtaatgatacttgtggttcaaggcttaacaaaggcattgctgaactaaaattataagcacctgtttgtgaatagtcttgtatttcatattccatgcatgaatataaatgttattggggcaagctatacattgcttatgcagcgctagcatgatcacaggtctgttacgcagttacaatggctagtacctgaatgctcggctataaaaaagttgaatatctgcattatgtttcaggatgaggttgtattatgtatagcacttctaagtcttgagttagttctcttcatctttgtttatctgcacttatctgggaaggaatgaccagtctttaatgcatgatctaattgttttcatacctcaatttacaaatagatgtagggattcaagtaacaactgaattacctgaaaagaggcctaaagtcacttccttgaagagggcccccaaagcccaattgggattaggtggaaagaggcccaagacaccagtcacttccactttacccaagaggcaaccgatcgaagaaggttcactcccatgttctgcagctcctactgctgaaggcacattcaaatcctaacacatattgtacttgtcattaacaaaacatgtaagttaaacgggttgtatgttttctgcagcacaaagatcaaaatggagcaattatttggatacaagtttctctgaagggggaagtgggtttgaagactctgagcgacattgcagtgaactggaatgctccattactgatgttgtggtggatgatgaggtacaccctgattttgtgtgatatatatgtgtcttgtcttggtctgtagcattttatgctttgaatagtgcagtagttagaaaagatctgatgtgcagttggcaaaatattatcatataggatgggcactttattatgcactgaatcgcaacttgctatgttaaaattgaggagaaattaagatgcatgctaaccttttgaaacaatgatgttaacagtgcatctgcttaacctactttcagagttctctgaacttagtcctttgagtttaaaatgtatatgtataaggtgacaggcttatgtcacaacaagagtttcagttagttgtatactccacttaacaatacccccacccctgtaatttcaaaaaaatccctggcaaaaagagagaggatgggaaaacacaagtggtgactcttttcttcattttggaactccacaaagttatcctaaaaggtaccccgtataaaatcttctgcagtacttcaactggaagtagggatatgtaattccgagttaactgaagattttgttggatgtatatggggattatgcactactaaataactactgattgcatgcttcatttgttatgcttgtgtctggctgagtgcatcactgcatcttccaaacataaactgatattccgaaacaataatccctacacgaagcctgaatcacaatgaacaaatttgaaacttgctgatgtctgaacaattcaacaacttctgatttctgaaaccattgttagtttaaacaattttgatcattgaccatgatgaagatgtgcactcttctgacatgaacctatcaccgatcactgtttcgctgccatcaacctgctaagttatgttataacctattaacttggtaagttcatacgtctcaacatctttctaaatccagaagagggacttgaacaaatggtcattatggtagggcagtctgaag

SEQ ID NO: 5536 - DNA, 3612 bp, Oryza sativa
ttagtactggtcgaagttgtaatctctggaggtccatctcgatcagcatcaacagtaccggaacccgacgaacctggccagtttgaccgctcctcatgggccggtctgtccggaggtgtgccggcggtcggaccggcctggcgcccggtctgaccagctgagccgacctcgtcgtcgtcgttgtcatcgctctcgtcttaaaaaatacgaccatcctccccctgaacctgtgacagtgtacctgcaatgtcgggtctagtacctagactagcctcatcaaaaaaaacgtcgcaagtttcaacaattttgttagtctccaaaataagtacacgatagccacgagtatgtgtgaggtaaccaagaaacaatccatcggtagaacgtgccttaaacttatccaaattttcagatttcaagacaaagcacttgcaaccaaaaacacgcaaatgtgaaactttgggttgatgtccaaatcgaagttcataagaagtttttccaagtttacatctcaagaaaacccgatttgaaatataacaagcagtgttaattgcctcagcccaaaattttctaggagttttatattcatccaacatcgatctagccatctcaaccaaaacacgatttttcctttcaacaacaccgttttgttgaggaacattaggagaagaaaattcatgttcaagacctctttcattgcaaaattgttcaaatgaagcatttttaaattcaccaccattatcacttcgaattctttttcaaataaccaggaaattcaagctcaaatcgaagaaacaaaccacgaaagtgttgaaaagcttcgtccttagttgccataaagaaaacccaagaatatcgagaaaaatcgtcaacaataaccaacacataccactttcctccaacagattgcactccagctggaccaacagtgtccatatgtaatagctgtcccggtgcatccgtcatcacagaaacaataggagcatgtgaaaaagcaatcatcttagcatgacgacacggtgtacaaaccaaatcaagatctttcttaagtttaggcaaaccacgaacaagatccaaaccacttaacctagtgagatgatcaaaaccaacatgtccaagtctacgatgccaaaacatcacatctttatcaaacttagcaaccaaacatgttatcacaggtgaaacaggattttcaaaatcggctttaaacactcttccatagcgagaaatattcaacacagaatcaccacaagaatcaaaaactttacttccagttttcttaaagtggacctcaaaattttcatcaacaatttgtgaaaccgaaagcaaattgtactttaagttctcaaccaaagctacattcttcaattcaaatttttcctttaccttaaccaaacctatagcgagaacgacacttgtagaagcatcaccaaagataatagattcagtcttggatgccttcttgagtgaggagaaccaatttttatcaccggtcatgtgccgcgaacaaccggaatccatgatccacacattctccttccttgccacaaaagcctacacacaagtagaagtcgaagcctcagtactggggttagatgataataaaaatttaggaatccagtactgagacacatgaccagaagatccaataggcatatatccacgtgtaaaatcaattttagaattttcagaaaaattcctccgagaccggtctgaccgaggtatagtggccggtctgaccgggggccggtctgactacctctgtaccaccggtctgaccggtgcccggtctaaccgacgctcagtaaccggtctgaccggtcgccggtctgaccacgggacccactgcggtctgaccggtttcctcgagggaaaaccagatttttgccactttgattttgcaaaagcaatctctctctctctcctttttctgtttatgagctaatctgaaacaaaaaccaacaatatgtccatcttttccacagaaagagtaagtatatttttcacgatgattagacacattggtaaaattagaagacttagcaacacaagcaacaacaggaggttttgcattcacaacattggattttgaagaagatgcactcaaagtagacatgataccagcagatttaaacacagttttcttagtatcaggtttaaccaaaatctcaccacttctagcaccagcacctaacacaataggaggatgtctagaattatgaccataaggattaaaacctaaaccatgattatgtgtgctaacctttgattgatccaaaatcatgttgaggttctttttaccatcataaaatcttagcaaagaacttttcaaataagaaatctctttttccaaattagcacaattttcactatctaccatgacacctttgcttttacgacatttagggcaagaaagcacttcattgtttttcacaacatcttccatgtactcaacacgacctaaagcatccctcaatttcaacttattcaaattacatgttgagcaatccaaaacatcatgaggttgttttaactttttagcagaaatcatgttaaacatcaaactagcatgaaaagcaatttgatatttttgcaacaactttttagttaaaaacaactcatccaaagtgcgtgtgtgcaaagcaaaactaaaagcaagagaagatctatttttcaaatcatgtgcagcattaacatctctaatttttgaaatctcattcattaaaaccccacagtttgagcaatcatcatcattaggaataagagattttaatctagtaatttcatatttaagagattcaatgataaattcctgttttctatacatcttctcacacttcctttttttcactcaaaatattaatagcttcctcaaaagcacttacctcattatcttcatactctgtgtcagattcaccacgcgccatgaagcaaacatcggagatgttctttcccttatcatcatctccactttcaccatctctatcacttagtggctcgaaggcggcgcaaacttgttgaaaagccttcctgagattctccagcttcctcccttgggatgaacccttcggcttgttgttgttggtcttctcaccatctttgtcttctcttttgcctctcccaagcttaggacaatacgaacgaagatgatcaattgaaccacattcaaagcaacgatttggaccacctcttttcctgttcctggcattattcatagctcgagcaattctgttagcaaccaaagccaaatcctcctcctcgatttgttcgagttgatcatcggatgtggcattaaaaacagcaagaaaagaagacttagatgaagaagcatcagcatccaaagaggaagaagaagaaaccaaagcactcgacttagaatcaacttttcgagaaagaacattcatctcatgtgttttcaattttatataaagtgaatccaaagtcaaagtagacatgtcaacagactcctgaatagatataactttcatatcccaaatagacatatcaagaccatttaaaaagtgacgagaaatctcagattgtggataattagcatcataagaagaattaacagatctaagattactcaaaattttattaaacctaaaagatagt

SEQ ID NO: 5537 - DNA, 11982 bp, Oryza sativa
  unsure (1)..(11982): unsure at all n locations
cttattaggcgaaacgatgggtcattaatatgcgcacttgcaagttgcaactgcatgtatcatctggagtttattttgccgggatgtgattgaagtttcagttttttagtttgaacctcattactactcagtgcttaatactcttttcattctaggctattacaatctaatataggatataatacaattcataatactataagtattatagtgtgtgtttgattgctttattttaaaacggaggtagtactccctccgttttttaataaatgacgccgttgtcttttgaacatatatttgatcattcgtcttattaaaaaaatatgtaaatgtatagatataaatcatgcttaaagtagtttgagtgataaaataactcataacaaataaattataattacgtaaattttttgaataagacgaatggtcatatgtgtgataaaaagtcaacagcgtcatctattttaaaaacggaggtagtaccattttatcatggaccctaatctcttactactcgtttcactactagtatttgtcagtttcaggtgctttggtttgattgctacgtcgtcttaatctacacatgcgtacgacaaatgttgtgggccattttctattcatcgtgggctacacaaactaaccgttcatttaaccggagaaacgatgcctcccgggcctatcatttcggccaacgcccacccgtgcaaacccgcctattcaggacgatccagacacatcacatgtggccccatgcttccatcccccacgcttccgggcgcgcctcctttttgtcttaaccaagcttccccccgcgccattaattaacgggcaagtaatttaattattaccatctctcacagcctaaatcgggggccgcgtcctcttcgggatcccgaaatagtaatttactttcccccccccccccccttcccgatccatcgcacgctacagcaagaaaacccccccaccgggccttcgctgtcgtcgatgaccagtgggcccgcgagacaatctagccgttcttcatttttttcgctttcctgccacgtaaaccgacccgtgggatatctcgcccctttttctagtatttttttttcttttcggtactccacgctcgttctttcgcttttcatccccttcgcgtccgtttcttccctttctccccccatttttctacctcccttctccatagctcacgctccttcacgcacacgcctcgctcgcgcgcgcacacaggggggaggaggaggcaggtcggcggcatggcggtggcgagctggagcattccggcgatcccgcgggcgggtccgacagcgaggggtgtgctgctcggcggcgccttcgtgacggccgcgcggccgcccgtggcgtggcggtgccgggccacgctccctaggagagtgaggctcggtggcgtggtggcccgtgccggtgcggcggagacgccggtggccggctccggggaagccgggttgctgttctccgagaagttccccttgcgccgatcccgaacggtaacttgttctgctctgttgttgtgatctgcggcgaagctatgcttcgttgttttttttttgttggtgatggggtctgtggtgttcaggtggaagggaaggcgtgggtgagggtcgatgcggagccggatggggagggcaagtgcaaggttgtgatcgggtgtgatgtagaggggaagtgggtgctgcattggggtgtctcctacgatggtgagcagggaaggtactcgctgattctctctccgagctgtgtctctgtttgcatgatttatgaactatgagtgcatccttgttttgatcatccgtggggagttgatttgtgcattgttgagagcgtcgtttgaatcaacgatggttgtcagactggcaggtatgtcctcatggtaggctgctttccatatctatgtagcctcaccggtccagtctaagcacttgtatatgtatatagtgaaattactgtcaagtgtcaatgcaaccccttaatctttatttggcttcgattagaggaaattataaacaggttcattatgaaaaattcttacaaggtgggtgccattgatttatggctatacttggaaaatgcgcgcgaaaagagaattttgattaggtgacggggtagtgccgtaaccatgtaggttggctcttatcctgtttttcttttttatttggaatttcgatatagcgttgaagcgcgaggtgattagaaataggcatatctgcaagataggaatgataagttcttaaatttcaattgcaggttgcccggtgttatgtctccttatctcctttggagttgtcttgatattccaatattctatacgttacttaaatggcacgatagttttgcaaggaatatttagaattaatatttgtcatatcttttgtttttgtatgtattcaagcttcaacatacatacatttctccccgcaaaaaaaaaagaacatttctgtaaaaggcaaaaaattgaattttgtcgtctttcagatttagttgttgctgtaatgtccttccttgaatgcaaaaataaatgatctagctcctgaaatatatggcattctttatccttatttagtgacccaatttattgttatcacttgtttctataattttttgcagagaatgggaccaacctccttcagacatgagacctcccggttcagtgcctattaaggttgttctaatcctatgaaaaacatgttaaagaactcactactgacattcacatcccagggatctctaagtttgtttgatgtctgagtcgaaagctcgttgcatcctgtagccatattttttctcatttgatcttcctattgctgaacaatatttcaaactttcaggactatgcaattgaaacatctttggacactccacacaattcagaaggcaagacgattcatgaagtgcaaatcaaaattgataagggcacatcaattgctgctatcaattttgttctaaaggttcaaattttacgctgctgtatgctttctctgctgtcagttttatttcctaggcattctgtaccatgtgtcaaaaggcctagaagtctacgactggcccattagattcgtaaaattgctgaaagtgcctaaggtgggaagttgtcttcccattttttagttgtctaagaaaagaataatatataacccctacaggtatatntgcaaantaaagtattgggagcggatatantaaacacatgccttttagatntatagattagttgttaaatgcactactctttcttttaattatnacattttggaattaatttttngannngaaggtnnngatgcactttgcagggtntagnnnnngnnnnngggngnttggtttcagcacaagggtcaggatttcagaatacctttagtggatcctttggtggagatctactaggaacagaacaagatattgatgtcaggccaggttaggaagtattttagtgaatcatgttttagattattactatagtggtttggcactttgttcttttcattggttggtttttatgttatataaaaatgcatttccttctataagaaaataatcttatttagggttaaaatcttagtaattttcataggatgcttgatcatgaatattaccacattgaaaatttaccccatttgcacctttcatatttcagttatctaacatactcacatctctgatttcttaggggctttaggtcacctatctaacgtgttacagaaacctgagggacctattgctgagcctcataaaactgtacccgatgataaaggttcaagaaccaaacacatttcaggtttctatgaggaatacccaatcttaaaaacggtgtatgttcagaattttataactgttaatgtgagggaaaacaatggaacaactaaacatgctgtggaattcgacactgatattcctggagaagttatcattcattggggagtttgcaaagacaataccatgacatgggagatccccccagaaccacatccacctgcaacgaagatattccgacagaaagctcttcagaccatgctacaagtaaggaccttgatcccttggtagaggcaaagaaatgacatttaattgtatcaagctaaagtacaagataaatgtacttacaagctgtgctatataaaaattaacaagtaaaggtgttctggaaaagtaagtcaggctcatttgtatttttggtatgtcctgattctatctgcgctccaaaaacagggaattgtatcatttgcacttcttaggttgtctgaacttgaatttaccactatggcatatgcatatgtggtaaatcatgaaagaatgctcgctatagaaaaataaaaaaaggaacattttttaagtgtacagaaatgatttcacttttttcttattgcttaagaaaagtttaaaactcttctttgttttcctttttgaatggtaccttcaaatgatccattattaagagggttacttttagtctccctttgatcaggggaaatgtgcaaaactttatatcaagattcaagtcaacattttgaaaatctgaaggaaattgtgaagttctttgtttgtctccctactccattaccgacagactggcttctttttgggtttgatttcttcctttactagtctagtgagggcaagcattttcttatcagcaattctctttcaacaatcctacatcttcaatgtaggtgctgttttttggggatattttggtagtagtacactatgttctctaaaatcactgaaaatgcctcaattgatgccttttcatttttcaagatggttttgtattaatgttttcaatagtttcagctgtgggaaatcagttaagtatcactcttcacacatctcttatcatactgcagcaaaaagctgatggaacaggcaactctctatcattcttactggatggagagtattctggtctgatttttgtggtaaaacttgatgagtatacttggttgagaaatgtggagaatggatttgatttctacattcctcttacaagagcagacgccgaggctgacaaacagaaagccgatgataagtcttcacaagatgatggcttaatcagtgatataaggaatctggtggttgggctgtcgtctagaagaggtcagcgagcgaagaataaagttctgcaagaggatatcctacaagaaattgagaggttagcggcagaagcttatagcatttttaggagccccacaattgatactgtagaggaatctgtttacattgatgactcatccattgtgaagcctgcttgttctggtactggatctggatttgaaatattgtgtcaaggatttaactgggaatctcataagtcaggaaaatggtatgtggaacttggctcaaaggccaaggagttgtcatcgatgggtttcaccattgtctggtcaccaccacctactgattctgtgtcgcctgaaggatacatgccaagggatttgtataatctaaattccaggtatatctctgtgtgcacaattattgtgttactttagtaatgttttctatgaaatttgaaatattagtaatattggtgctaagctggaagtttacacttccgctatctacaaaaaaatgagatgggatagttggtaagttagagataaagctagtaaccaagttagagctaagatggtgctatgctccagcttgttttatgtaaagccatgctgtgtacatgagttgattatgatggataatcagtctaccctaccttaagtttccttcttctccgttgccaaagcttcttcctccttgctgtttccaaaccaatctactgctaattctccattgcctacctcagctaaccttctacaatctagcatatagcacttgtgctgaagattttagtactacgctatctagtagaaacgaaaacctgggtagcatatgaaattcacatatggattctaaaggagaaaaccccttttatacccctaaaatctctattaaaggcactattactgctgcagtagcttgttgttcttctatggttaacactaccaccactatgcaataaatatttatatgtcgcttgaggcatcacttgtccactatgatgcatggatacgcgatactggtacggcgatacgagattttttaaaaaacatcaatacgtcgatacggcgagtatatataaaaatatgtttaaaaataaaatatagggaactacaaaagggtaaagcaataagattatcttaaaatatattctatgaattgttgcctgttacaaaaaatatagcaaatatagccttgtattacaaatatagcaagtatattaaagttataaatatatcagaagtatagcattgggtctttaatgtgctattgaacaaggaggttacactgctaggtatcaaagaagtatctgataagtatcgtgtgagtatcggtatttattttttcttttttttccattgtttaatgaccgatactcctccgataccgtatcgacagagtatcggacgtatcgccgtatcggataccggtacggcaagaaattgaagtatcggtgcatcatagcttgtccagaaaactggctctcatcctacttgattttgactacccttatgaagcttcttagttgttgtcttccttgtttccaaaaaaaaaaaaaaaacaatgattttcaaagggaaaattatgacactgaaagatctatgcctttatacagcataatagtatgaacccatcatgtcagctcatgccattcattaatatgatatcatcaatgtttcagatatgggaccatggaagagttgaaggaggctgtgaaacgttttcatgaagccggtatgaaggttcttggtgatgccgtcctgaatcacaggtgtgctcaatttcagaaccaaaatggcgtctggaatatttttggtggacgccttaactgggatgatcgagcagttgttgcagatgatccacatttccaggtgaggttccaccttcccttgcaaactatttaattagaattatttgaaaatgtcattcatgaatgttcattatgttaactaagtatcacaacattatgattttcttcatgaactgctggtttcatttgcacaaatattttcctccagtggagcttgataaagttatgcgaaaataagcttaatttaaccaacaaatgatgcttggagatagtctcattgagtgacctacaaactttgatagactccaccttttcaacttgcatacatttagtattggaagtaaacacagattagcatccgaaataacatagaaattgacatagttccaaaatggaaaaaagacatactcaaacttcagcagccatgaacattgatcaatcataatattgttctacatgcctattccatttcattttacttaacaatgcactatgtgatgtactagacttactttctaatttttgggtaaaactatatgtccttgtagggaagaggaaacaagagcagtggagataacttccatgcagccccaaacattgatcactcgcaagagtttgtgaggagtgatcttaaagaatggctttgttggatgaggtatgctatcttgttttttcttggctaaaactccttttgttgctcatgcttaactatatatgtgtattccccatgcgaagggttgtatgttatagcatccccatgcaacagattaaatagatttgatgtacatacattgtttctggatggcgtgtttagctgagtgctagttttctttcctcatatcacattcttttcaaagctatgttttcatatatgttagtttaccttgctcttaccacaaaatggaatgtacacagtgcacatcctcatcaatatcacaagattctttttcatgctacgataataggtatatattgtaggctgctaagctcctataataacaaactggattggacaaatgctacacctgaatatctgcaaattgtcatgggttccaccatatatatatgtatatatatttttgccatgtagcttagggatgatcgattctgtatctatgtaattgtgtagtgcttggacatatgcaaaaaaaaggggaagatattgcaggagctttaccctcattaatactgaaactatttcttggagccaatttattagggagtattgttgggaacagtagcttactagtcctaatgtggttgctgcatattttcattagctgaacaggataaattaaatcatagaacatagcattagagcagcattcctgaaaacgttagcatcagatgacttcattgtatgtttgcttctgcttgacttgcagaaaggaagttggatacgatggatggcgacttgattttgttcgcggattttggggtggatatgtccacgattacttggaagcaagcgaaccatattttgcagtaggagagtactgggattctctcagttacacctatggtgaaatggattataatcaagatgcccacaggcagagaatagttgattggataaatgctacaaatggaactgctggtgcatttgatgttaccacgaaaggaatacttcactctgtgagactccattttcttaccaagttttataatagtgcttatgggtgatttagtatttttgaaactctagaatttatatgcctttccatggtttgagcttctcagttcggatatgcatcatgaagaatttcctgccctttagcatttttcttttgggtggaggtatactttgtccttcaattatttgataattaaagttttattgctgctatgaagacgcagcatgctgaaccacattaattaaacttgcatctttggcagtattcctgttccatggcaatatttaaagtctcattaatctgttgtaaagtggttttctgatgatagttaactcatccatgattgtaatagccaattctgccagtttgagaaggatgctattgctctggattagccatgcatattttgtcttacacatcttttctggtatacaggcactggaaagatctgagtactggcgtctgtctgatgaaaaaggaaaaccccctggagtgttaggttggtggccttcgcgtgctgtcacatttatagaaaatcatgacactggttctactcaggtacattacaaaatccctacatacacaaataagtattactccgtagcattatcttcagaaggttactatatggcagcatgattctggcaaatctgacatcatatttttgttatatttgcatagaaacatcacaaatgtgcaacgacctgcatgcatttcttaataatagtcagatagttgtccctttttttgaacgctgcttaatttcttgttttcaaacaactaaattttgctcagcccatccttgtagaactcttttgaaactggaatgcttttatggatactaatcaaattataactggagctgttaagctgtgttcgaacaaaatcatggctaactttctttgatatctttgtagggtcattggagattcccctttggtatggagttgcaaggctatgtctacatcttaactcacccaggcactcctgcaatcttctatgatcatatattttcgcatttacagccagagattgctaaattaatttctattagaaatcgccaaaagatccattgccgtagcaaggtaaaacttcctcttgtatcgtatggtaccccctcttaccctccttgcccttccccactctattcatgttctctaatgcttgaatttatataacatttacagatcaagatactgaaagcagagggaaatttatatgcggcagagattgatgagagggtaacaatgaagattggcgcaggacattttgagccaagcggccccacaaactgggtagttgctgccgagggacaggattacaaggtctgggaagtgtcatcgtagacttgccgcgctggtacttgcagaacttctattgtagacagtatacaaccattcggtatagctcacaaaaggaaaactgaatagcacaaagctagagttcggcatcctgctgatggtaccaagaaaagaagtggacagcaagggcaatggaaccacttgtcctaccgaaaagatttcaccaatgcagtgaaattacattgtaaattcgaacatttgatcatgcagaatcaccggttatcctgtgaataatttgtctgcaggcaattcgcctgttgatgtatgcatgttctttatacatttttgcagagatacctccaccatgttggagctatgtaatactatgtgatacactttggcgataaataaatgaagtgcatgcatttcttgctatctgcaaatgttagtaccaatttttcctgcagtgtgtgtgagtggatcataaaaggttgagacatctcccatttcaaattgcaccagttttcgatgtagtattgaaaccaacatggagcttacagtaagatatccaacaatagacaagatgccagtgacaagaacattagtatggattcagttttaacttctaaaacatgccacggggaaacactatactactactactactactactactactactactactaggtgggaaatactcagaatgatgctacgaggccaagtttccagagtaaagatgccacggcaccaaagaggttaaccagacttagtttcactagacatcaggagctgctgatacgggacgataccatcctgtcctactagtataccaaaaaaagggatcgtcatcatcgaatcatcgccatcaggagggggggcatcagggcttgagaaccagcgacagtccaaccttggaggccttgtcgatcgccttggtgtcgacctcggcggagagcgttaagaaagacttgggtctccactcgtgctggatgagggcgctgaccatgccgtggttgttgtagcgcgccttcacggtagtgagagggtccagggcgtgctgcatcccgaagctgagggtgttctccttggtcgagaagctgtgggtcagctccgctccagcagccgtacctgactctttgttcaccagatggtagtaggacgcagtgaggctgtcccctttgttgttcctgaaaatgggaagccaaggatttcacgcatggatacaaaagagaaactgcaacattacagaaaatttgcttcgattaggagtttctgagaagtcagattaagaggaatgtatgctcaagctagcaaacaggtacgcacatggttatattgtagacatgaatcgtaaaattgcaagcaacttaacagtgttacagtgggcacgttagaagaaaacacttacagcgtcagatcagcagcaagatctgaattgttgatggtcagtccagcatcgtacttggtgaagtccccagtagaagtatcaactgcaacatcagcaccgacagcaacagatttgttgccgaacacaccagaaaggttaaccaaaggctttgaggtcaggccaacaccgaggctgataccagcgtagtcatgcaggtactggagttcagcctgcaaccacaaggcagagagtcacaaacggtaagtcaatttgaaatctaaaagacccaaccaatctagcagagatgaagatgcatataccttcccagctgtctggtatggaaaaggaagtgatacgatttgcttcaagcctgatacaccaaggtcttcagttgtgattgtagttaacacctgggaaaagttaaacacaaatcaatcaccagtagataagctactgactcaatttatagtccatcaccagcgagtttaatcaggaagtaataatcagataacatttgatagatgaagggcattttcaaggagaaacttgcctgagaatcggaagtagctttcacatccagcatcacattattgctcttcagcttggtctggatctcgctaaagatagcttcatctttcattgtgcttgcagcagtgattacctatagacagaatcacagaaatcaaataataagagtcatatttgattattatattagtaggcgtcgcgacactaaatgatggnggggtgtccaacaagtagatctaatgcgcg

SEQ ID NO: 5538 - DNA, 82999 bp, Oryza sativa
cttgaagaaataccagtaggcttctggatgcaagaggtccagccgaatagctgctgctgttcccagattctcgatcttatctgacctgctggtgatgattattttgctcccacgggcccagcaactcatcgaagattttaagctttgccatgtttgttcactgatatcgcaagctagctcaataattatcagcaaccttttgcatgaagaatagttttggtgcttcactacaccattctctctcagatttgccactcttgcatccttcaggttatttcctctaaggaacaaaatcaaagagtagtgattgcgcaccctataatcacgacaagcatgctcgactagagtgcttttcccacattttcttggaccaattattggaagcacaggaaaatcttcatcaccaagaccatctgtttgcagcaagaaactgagcacctgctcatgttccatttgacggccaaacatgcaattttccaaaactgaatatgtgtcacgaggctggtggtgcactactcgataattcctcaaaaatacaacaagattcatcatgtcagaaatgcctttttctatggtagcaatcattccttgtagctgttttatgctgttactaccaaaacacagtgttcttctatgactggagaaacgaagacgcttggctggattgaacttagaaaatgaatagacatgactcacctcctcatcctttctgtcctcttgaagggctggatatttatacctatcaagcaagtagtggcctctgtacatcccctctattaacatctgcaactgatggagcatcccttcattggcaatacactttccctctgcctcctcaatgatggtctgggctcttagtagcagtcggtttagtgtctccagagccacctcagcatctggcagttgctgatatttcttgatggcaaaggttgtgagtctataggcaatatcacttacggctgcaggaaccagcatattcatggtgattggtgaacctccccaaaagatggtgcagtgaaacaaaaatataagggagagatcaagcagagcagtggtgctctatgatgctaatgtgctgtttttctacagtacttcacgcatcgcactttcctcagtaactttcttatcacatcactctcatggccgtccaaaatacatttaactcgcttacaagggagcactgtggataaactaacaagtatttctttaaagagaacttctcggctgagaaattaacaacttctcatcgaggaatgatcctgattttcctgcattgagatttgactcgagggtccatatctgtttagtaaatgaggcgcaagataaacttgttttctaaatagagaatacatttcctacaagatttctctttaaagttaatttaaatataatctcctacaacaaatatggattgatatgcagatagatgccatgtcagtatgtcacatcattccatggtcaactataatactatacccaataattgagcattttttgtttctagcgttttaaccgcaagaatcaaaacgtgctatgatgtgaacatccccaatcgccatccaggttaaatccaatacaatccaatcaaataacgccgtaggagagcaaatcgatgaaagagacaaacttacgggccctatacgctcgttgatcgtctctgccagtaattgattagttaccagtcacatcggcgccgccatcaggtggggtgacgccgcatatgggagacaggtgaaggaagcttccgggcacggggaaggagaggaggcggggattccacctgcggcggcgccggcgtacgcgaccaccgcgcggccgcgggtacccgcgcgcccgcgcccggcgacgccggacgctgtcaccggtcgcgagcatttgcggtgcggaagggagcggaggccggaggggaggtgagagtctgagagacgagagaatgagcggtcgtaacagaggggatgacgagagagagggatggaccttcttgggccggagaacttgttaggtgagctcttttcgctagttgggccgggattcctctcttgaaggaataagttcaccagacatccctcaattttacgtccagtttgtatgacatccttaatcctcaatactagaaatcttcacccttatactatacaaaaccgtacaatttagttcccataacagtatggttctctggtttcactgatgtggcatcctagtcagcaaactaaaaaataaaaaaattatgagcccacatgtaagtgagaaaaaaaagagtagttaactagttggaccggatcctagggcctggaatctcctgcccaatagctctcccttaaaatgatgtgctcatgggctgctttggtcgacggccgccgtcctcctcaccaccccacatggaaagaagagagatattggtgaaggcagagataggtgaagatgttctgacatgtaggacccatgttgactcaacgctgatgacttgggtcaaattgcgatgcgggacaaaatcgcctcgctgtactgccatgggacctatattgcaccggtttttgataattgagagacccgttgtatttggtattttggttgaaggatgaaaatcgatctcgttgtcgagttaaagggacctaaaatgaacttattccaatttttttatcccatcaactatttgaaaatttcaatttgttagggttgtgttcgacagtgatagctgagaactaatccctcgtgcacgcaaaacggatagacttattagcatatgattaattaagtattaggtatttttttaaaaaaaaaaggattaatttgattttttaaagcaaatttcctatagaaaacttaaaaaaacactgtttaacagtttgaaaagcatgtgcgtggaaaaaaaggaatatgagttgggaaagaagggggaagaacacaacctatattgataacccactccacatagggcactcccctaataataaggtaaatgctccgatactacttgaacaaaacaaaatatttctgccgtagttagcagtcaaaccaactctacctttgattcctcaatatttttttattaattactccataatcctttccatataaatattatttccttcgtgggtctgttcccctactccacgatacgccatcatgagctttagaaatattgttgattaattccatatttaccaaatcaaccctctatagtctatcctaccagaaaattggtgaatctttcacaataccaacaatttggtagggtagagaaccaaacttgctcgataatgcgcatcatatttatcaattcctttttcaaagaaattaattaggagcatggaaaaaatcagcatgcatttggcaaaccttgtccatatggaactaaactctcaaggattttagttagtcctccacaacttagtaaaattttgagagcctcctctgataggttgagctagagataataagctgtagaaaattgaacaaagcaactaaaatagtgtgtatgtaaaatttttaatatgtattattagcattttaaaaaccaatgccgaataatagtctatcatgaggaaaaacccctaagaatcaactataagttctaaaatttaaatttttgctgcatatgccaacaaacagacgacgagtatgcaggtcggtttgaacatttggaaggaaatggaagaaacaggcgaggtttgcaaaacgaggtaggtagggatgcacagcaacggccaaaacagaaggatgatcatgccgactgtcaccaagagcctacaacaatcgagcatcaagatggggatagcctttaagttcgtcggtgaagctctagaccccttgggaaaatattctttaaaaatgcaagttgcgacgctattagagtatgttgagagaaaggatccatcgaacaaaggttccatttgacttagtatatattcagccattcaggccttcagggttgcaagcaaagcagtgacgaaagcagcactgctttcagttgtgtatggattcaagcgaagcactgacgaaagcagcggcgtcttcagtgcgacggggtcgagacgggatcactcaaaaatcggctaagatggataataaactatggtggaaactggaaagcatcagtcgttttcgagaaatctatcatgtatatgagcaattctacggtatttaaggaggtaccatgaggtaccaaaattttagtgtaaattttgatacctcatggtacctcacagtatctagttatcacgagataccaaatttataatagaaaaaatggtactttatggtacaccctcaagaaccgtaaaattgctcaatgtatatagtcttcgagacagcagcgacgaacagcagcacgcctaaacggaagcgattaatttcaattgccctgaaaaaaataaattagtacagctagtgcatgcaaagacatctgtcactgtttagttgcgaaagaggcatatctagtaatggcagtgtcaaccccaacaatgatttgcattattgctgtttttagaataataaaatgttattctcaacacatataaatcacgtcagcagttcagcactgtcccataaggtaaaactctcaaactggccgagaggcaaagtctgacgatcgcttgaacaactctagctaggcagcagaagatgcccaatgttgtcaatatgccatccagcaactgctccggccgtcacagagaagcaaaagctgtgtttccttctcctaggagagagccaagcggacaagcctggaggttggctgctaatgctatggagcgtccagttgccaatatttctgctaggcactgtaagcggccataggccggttggtgtgaaaacgcaaagatccccttcagggtcgcccacaggaaaaacataaaaaccatgtgctcaaaaactacacagccatgagcagatgcgctactcattcgaggaaagtaaattcagtgcaacaaaaggattcatttcgttaattcattcctgaaaaatttgttgctgtgctgaattagtaattggacagcagacagcacgcttgaggcttgacaatctttactcatggccgccgaattgccaatgtacgttttccctgaaaaaagtgaccactgaccatgctaacatgcagctgtagatcctttcttgaggttctggacaggacagatccaaagatgtttcactgaagaacatggaagagatcgactagcaagtctcagaaatgttcactgaagaatatgacgagtcccgtgagttcagaattcggaaatgtgttcaccgaagaaaaacgaaagttcagaattcagaaaagctgactattttattttttgaacgactcgcccgagacgatacggagttctattcatagagcgaagctgactattttatcacctcctacgttgttattatgactagataagcaaacataggaagtactaatgccataggagctttcaaatggggctattttaaggtagtggatagtattacattccacgagaccttcgcaaaattacaaagtgaacatccagtacaagtgtccggagacgagcacgacaatgtgcagtacggttcaccttcagctcgccggagcaaagcttacagccattacaagcaaaaaagaaacacattgtgctattacttgtagtgttattaagtaataacaccactagtaccagttcaagcacagctcgaaacaaggagaaaatttagtagcgcatacaccatgtcctgctcagatgctgtagtccgaccattgctggatgaaggaggtgtggtccatggattcacccggcatgtcgtcgcccttcttcccgccgagcagcctcgccggattccccaccgccgtggtcctcggcggcacgtcgatgagcaccagcgacccggccccgatcttggccccggcgccgatcctgactttgccgaggatcgtcgcgccggcgccaatgaagacgccgtcgccgatcttggggtgccggtcgcccacggccttgcctgtcccgcccagcgtgacgtggtggaggatggagacgttgtcgccgatgacggcggtctctccgatgacgacgcccgtggcgtggtcgaggaggacgcccttgccgatcgcggcggcggggtggatgtcgacggcgaacacctcggcgacgcgggactggagcgcgagcgcgagggcgcggcggtcctgcgcccagagcacgtgcgcgacgcgctgggcctggatggcgaggaagcccttgtagttgaggaggcagtgggagaagccgacgcaggcggggtccctggagcgcgcggcgaggaggtcggcgacgacggcggcgcggagggtggggtgcgcggcgagggaggcgacgaagaggtcgtagaggagcgtggagagcagcgtggaggagcagagcttgttggcgaggtggaaggcgagcgagcggtcgagggaggggtgggagagcacggtggcgtagaggaacgacgcgagcgccggctcggcgtcggcgtcgcggcgcgcctcggccttgatctgggaccagacccacgactcgtcggcgtccgactccgggggcgggtacgccggcacgacggccgggtggagcgccggcgggctgtgccggcgtggctggggatcgtcccggagaggctggcccgcagtcatcgtcgccgtcgccgtcgccgtcgtgtcgaggtgtgtggatatgtggcggtcggcggcgaggaaggcgtgtggcccgtgccgaggcgagagcgaataaataggcgtgtgccgagtggggacacgtcagccaaccaatcgaaaacaggtaaactttatctctgcgtgggcccggagttaagctggtacacacgatgagcacgagcccgagttggcgcgccgtggacgcgtgggcaagcgccaaggcggatcgagcggcgacgggcctggcccacgtttcgtggcctagctcggccctgcacaaacaccggatcgagcgaactggatccacgcggataaccgcgggtggcggcaggcggtgtcgagtttgtgcacgtccacgtcgtgatccacctgaccacctctagccagaaggcgccggttgatcgagccggagatacctgcgctgacgcgagtacgcgacgctaagctggtcgtacttggttggttgaatacgatctgatcgcaatattgttgccatcgatggacgaaaatcacacgattacacgagcaattatttggttgtgaaaccgtgaaagcatccaaatgttccatataaccgttggattaacgtgcacgggacggcccgacggggagagtgcatcgataagagtcatagtatagccaactactcattccaaattatctataaccaatctaacagcatatttatacaatagttatatactacactattaatatatggtccaacctgtcatacacacattgtgtcttgaagtctgtgctacagctgactataaatctataacccgctgctattctctcttctcatttatcttcttaaaatatatttacagcctgctattgtaatccctccgttttttaatagatgacgccgttaactttttctcacatgtttggccattcgtcttattaaaaactttacgtaattataatttattttattatgagttgttttatcactcatagtactttaattgtgatttatatcttatacatttgcataaaatttttaaataagacgaatggttaaacatgtgagaaaaagtcaacggctattaaaaaacggagctaatatttgctctaactgggtatggatgataggtcacgccgtcacgtgccaaagtcagagtgggccggtcccgatactgttgtcttgcgccgctgagtttctgaccccgccgcggcctccgccgtttcgtacgccttctcctctcccgcgcgcacccgcctccgcctccgccttccccggccgccgccgccgccgcaggagaggagacgcaggccgcggcggcgtcaaccgccgctctccctttgccaccatctccgctcccgacacacactccactccactccagtccacagcactaacccatcggtcccggcgatccccactagtgcccctcctcgcccgcttgccatggcggcttgcggcgccgcggcggcggagtattcagctctcctgtccctctcatgtgggcctatcactcgccgccgtttcgccgtctcctgccgcgctcgaccgcccggcaacctcaggtgagtgcctgaccaatctgctgcttcctgcttgctgggagtagctgggggacacgcgatgtgttcgagaaagtgtccatgagcgaacgcatttgggattgcgcggtcgttgcgtgcaaacgaggccgtttgtgccaaacgttctctcactgttccacccgctcgtgcaaaatggatgtcgccgagcatcgatcgtggcatgttgtcgtgtctcaacccattagtcgagtaggaatatctgttaatactctgtccagtggtgaacgaatctaagctgacttagaggctgctctgcacggttaatctgcagtgctcgagctaatgaaatttcacattaatcttctgaaaaagcagtgtgtttcagtgtgctaagtcattttgcaaaacatggtaaagtcgctctattccatattggtctagaaatccctgggtttgcgcattctagttggtagagttcacatgaaggtttttgcgcttgactcatgactgacagcttctgtgtggtagtgcacagcagaagaagaagcgagggaaaaacattgctccaaaacagcgctcttcaaatgcaaaactcttgcttactactgaggaaaatggacagcttccaagtaccagtttgaggacttctatggaacgtcctcagaagagtacatccagtgaggacgataccaatggggctattagccagatagatgaaaaaattgcagccattggtaatgaacagcaagaggtactgccttactggggtggtcatatacttatatcagcctatcagggtatcctggtgcacttccacacctccttcaaacaagctagctaatttaaagagatatgcttctacattcatagatcaaggattattgaacttttgtttatgtgacttctgtgcagtatgtcagaaaaaaacattaaaaagaaaaggcacagtcatattgcagaaccatgataacataggattaaaacatttaaattgctattcatttcctttggactgattatgcattgtcgcttcctaggagggcaaccttgttataaatgtttttccctatttggaatagagttcatccttatgtagtattatgcagaaattcgtctgataaaggattgtaatgtttattttcactcctcagtttgccatgttcatccttatttagtaccaataccaatatgctaaattgcctctcaatatcttagcagttatcaccaggccatccacaataaccttagagctcgcatcgtctccaccagaactagaatgatactgctttgagcgagacactgctacctagttgtactatgcaagcgtgtagtctttcttatgtccttcagaaattgtttcatttttcataagaatttctcctcttatatattaacacagaggtcaaaggataaacatttcgaatcagactttcaacttgaagattttggggaaatgatacaaaacatggaaaagagtatggaatgctttcttctcaagtgtattcatacattcatgcatgatatctgatgaaaatacatgaaaaataatttttaaaaatctgacatggctagatattctgctcctaaatcaagctcgtcttcaagcaattgaagatgttgacaaaattcttactgaaaaggaagctttgcagaaaaaggttgacactctagagatgaatttgtcaaaagcacttgcaaccaaagggaacataaatacagatatccctggtgatcatttagagaaatttacaaaagaaattttgatagaaagtgctctaagtggaggcaatccagcacatttgtgtgagtctccacttttcatggagctgactgttctaaaagaagagaatatgctacttaaggctgacgcacaatttcttaaagcaaagattgttgagtttgctgaaacagaggaattcctattcaaattggagaaagaaaggtcactgttagacgctacagttagggagctggaagctaggtttctagttgctcaaactgatatctggaaagttgtccctctgcaatatgatgtttggatggagaaagtagaaaatctgcaacacatgcttggatgtttgaaaaatcatgtagagaagtatgctgcattgttggatcagcatgatgatctgcatgacaagattgatgagctagaagcatcactaaaagaagggaaaacatctgagttttctccttatgttgttgaacttctgcaacagaagttgaaagcagcaaaaagccatcaccaagcaggccatcaagaaacaaacactcacattcaagtatatcagcagttaactgaggaatttcaagataacctaggtaaactaatagaagaaagtggcagactggagcattctgcaaatagtatgccatcagaattctggagtcacatcctgctcatgattgatggttggttccttgagcggaaaataccaaatactgatgcacgtatgctgagagaaatggcatggaagagagatgaccgtatctgtgaagcctactttgcttgcaagggtgcaaaagaaagtgatgttatggaaactttcctaaagctatcgttatcaggaaacaggtattaaatttatcttgtgaatcactttatttttgatgggttcaaatatgaattagaaaacttatctgcaattttttcataagatctatactactttagtggtggtgtccaaatctgcctccaacgtcacgagcaaacgtgtggggccataaggtctcagcacatgaatgcttttgctttgatgttatatgcctaattaaataactatgttataaacttgtaatttttgcttgtgcttttatctcttgtaatatccattacaacacacggacctttagctagtattttctaatatattatcagtcaatgcagttctggcttgcacattgtccatatagcagcagagatggctccagtggcaaaggtgatcctgtacatcaattcacacttccatcaagtatttggttctgtcggtgccttatccactctcactgcacaatatatcctttctgtaggctatgtaccaagaaaatgtaatttcgtgaattgcagccttgcctgatataatccacacaagcttagctctatcttgttcacatctgcagttatttttgcctagtagttgtcaacaataatgccaacagccaagtactggcattccattttgagttgaaaagattgtatcgagactttgcaaccaacaagaacatgcaaaataatggagaaatgcactgaaaattgtatttagcactaagttcatgcatctcaaaattcaattggaattatgtagaaatttcttggttgaacttcacattggctgaaaattgacttagaatgataacattatttggcttacctttacttattaaatgcatacaatttattcaaaaccagttataccaacaactgattagtcagaaaagtaatggaagtcacccaccacaaaccatgccgtgttttgcactagaaattccatccgatatttgctagtaggtgccacattgcctgcttagtcagaaaatcaacatgcctgcttgcttgctagtaggtgccacaatgctgggcacattaaagttggtgatgatcaacatggccctgatcaagcacatgagtagggaaatgagtgatttgattcttaatagttttctcctatgtaaagcgttaaatatttgtacatgaggttgaattcatcttcacatcaaaaaccaagtacttagtcatataatacaggaataatgggtaggattagtgtgctgtattgtttgacaagaaatttcatagcattaatgaaagttccccatttgttaggaacttgcattgtataattgatggaaaatttacaagaacaccctaaaaatattttatgtattggttatactcctgaatttttagtgtagattcgtgtcaggtaagttcatctctacatgaggtcttccccttctgaatgaattttcctatttgctactagcgttctagaaggtgctaggtttgttgcctgccttctagaacaggggccactaccagcagttttcttctatattaagaaatagaccataaagtcataaacattatatctgtgtatgcaactgctcatagccttaaatcctagttatgagaaagattaattggctgtggaaagtagtctgctggcaatttcatgtttcaaaatcaaatagattatctcaaccagaccacattctgactggaagttgaaatgagataactgttacatgggcagttatattgagaaatatttgcagaaattcttatgtaattgtttatacttatctttccatgctgcttggatttgaagtattgcttatactaatcagcattttaattgtgtaatctcatttaagtttgcttaacaaaatggttcttcaggttggcggtctggcagatgtagttgctggtcttggcaaggcacttcagactaagggacatttagtagagattgttcttcccaaatacgactgtatgcaacttgaccagattactaatcttaaggtttgtgcttgttggttagccatgatttttttttacatggttttgcatctttaatctgagcctctgaggtaagattgtattcttggtgatcctgcaggttttagatgttgtcatacaatcctattttgatggaaatctattcagcaacaacgtgtggacaggaactgttgaaggttctaagcaactctattggaccttataagaactcaaaaaaagttaataattgtttgctaactgcaattccaatatacaggtcttccagtctattttattgagccacagcatccttcaaaattcttctggagggcccaatactatggagagcatgacgattttaaacgttattcatactttagccgtgcagcactggaattactttaccaatctgggaagaaaattgatataatccactgccatgactggcaaactgcatttgttgtaagaactgaaattcatttcgcttgctttttcatcaatagctgaaaacatataaattttgctgttattcatttgctaagttctgggtgtcaactattctctaccgtgttcaagaatattgtatcttacacttagatttcaggcacctctatattgggatatatatgcaactcgaggcttcagctcagctagaatttgtttcacttgccacaacttcgaataccaaggtacagcacctgctcctgatttatcatattgcggccttgatgttgagcagttggatagaccagacaggatgcaagacaatgcacatggaagaataaatgttgccaaggtatagaatagagaaatagcagttgttttgaattctgtaccttaaaagtcatgatttttatatttttgcttcttattggtttcagggtggaattgtttattccaatattgtgacaactgtatcaccaacatatgctttagaagtgcgctcagaggtaacaccagcaactctgttttctaaacaactattacaaattcaatatcagcttcacacactttagatgttttctttcaactgtagatacatgatcaacctctcaaatagtacatatttttttttgtaacattagtatttatacttagagtaattgactacacaaaggtcgatgtatttatctgatagaccaaatcttttttcgaggcaacatttatgtaagctgttaatgtacaagtaatgtgaaaaattaatatgtttatttgacaggcacttcttcatctaaaacaagtggcatttcttagtccatgtaggattaactgtctgcatttgctgtccttgcttttcttttggcctttgccccagagtaaaaattgctagctcaaaacatatggcataagtaaacaaggtttgaagagacttcagtgaaggccttttatgtctgacattgttatgcaattttttttaattgttttaagaattttcaaggcattttacttgatatgttactaatgaattaggggtctgatataagttgcccatcatgaccttttttattggtcagggtggtcgtggtctccaagatacacttaaaatgcattccaggaaatttgtggggatacttaatggaatcgacacaggaacatggaacccttccacagacagatttcttgctgtgcaatatagtgctactgatcttcaggggaaagcagcaaacaaagcatttctcaggaagcagctagggctgtattctgaggatgcctctcaaccactggtatgaatttcagttctacgcccatcttaactaattatatggctatctattcatctattgtagcctttttaatgtaatcaagtcatttcattgttttttcttgaaaacgccagagaattgcatttcatttcatttaggggaagagaataaaggaaaaatacaaagtaggagagaccaaagcctcctacacacccaagccccggccaactagctgcctaggtttgccgaaccactaagaaacttttggagggcagacgctcccactatacaccaaagattaccctcattctctaccacctgcaagaccgttgcaacattaggactggcgccattgaaaacacagtcattgcgatgcttccaagtctcccaagccactaagataaccaaggaattgagcccttttcgcacgtcctttggccagtattttgtatattggctccaccacagcagctttttataacaagccccttgatttgtttaaccactttttataacaagaaagtacttctgttaggggagaataccatttaaaaatcacatatctgaactctgttttctccagttcaagaaaaccccttttgagttttgaactttatatcattttcattttttgttggtattattcgtttagattagctgtctccttttgttttgtttcttggagtacagtctctattgaaatgaattagtctcgtagtttatgttcagctttgatcctcattttgtgccttttaatgaccatggttttctgaggcaggtagcctgcattacgaggctagttcctcaaaagggtctacatcttatcaggcatgcaatatacaaaacagctgagttaggaggacagtttgtactcctgggttcaagtccagttccacatattcaggtctgtatactcatcgagtgcctcattttattttctcaactgcagctcacatttggccctatgagttcttgatttgccatggatatgtctggttccatagttttatgtatataatttattttcttctacatcttggctgatcttgttactgtgaactgatcgttgtgcatttgtatcacagagggaatttgagggtgttgcagaccaattccagaagaataacaatattaggttaattctgaaatatgatgaagctttgtctcattgtatttatgcggcatctgacatgtttatcattccatcaatgtttgagccttgtggccttactcaggtgatctatccgtacatattaaattatagatcttccatttaccaaccaaataggcctacaattgctaaatgtgcgccagtgtgcccacatagcttgcttgggttcaaattggcatttgtgagctattatcacaaggcatggatttagactaggttttactttgatctaaatatcccatacaagtcttacatggttgtgtcatccaaataattttcttttatgaaattagccacattttactaaccattttacatggttgttgacattttattctttttcatgcccaagtctgacaagtttttatcaaccagatgatagctatgagatatggttctgtgccaattgttcgacaaactggtggattgtgtgataggtgatttctccctcaaacatttcctttgcatagtatattctgatatatctgttgtgttctacttttccagtgtttttgattttgatgatgaaactatacctgtggagctgcggaatggctttacatttgctaggactgatgagcaggtgagttttacaatggaatgcactttcaaatttggatttctaatgttttatgggtagagctcacgtgggatgcctattttggtaggatctaagcagttgcttggaaagggcattcagctactacagcagaaaacctatggtttggaaacagttagtgcagaaggatatgcagattgatttcagctgggattctccagcttcacagtacgaaaacctttatcagagtgctgttgctcaggcaaggggagcggctcaaacataaaccttttcatgatgacattgtgagcttagattctcccaagcgcagagacaatcgtcagttttatcatatctgaaccaggcatatgctgaagaaatattgttcttctcacattcacagaattcacacatcgtgatccttgctgttgccattcccgaaagaactgagaaagagtagtcttacagttgatcaagatattgcattttgcagtcagtgcacggaactagttctgggtttaatggggatgagtaatcataatctatactggattgcccccctctaaattccccccaaccgttagtttttgtgggaatgcaagaagtaaatatgtgcactgtagggtgacattcgcatacatgatactgtacggtttattcagatcaacgtttgggtaatgtgactacttttgagtttgagagatttgcgtgctccgttctaaccttctagggtgtgtttagaaaatgggttaggagaggtgggattgggaaatggaaatgaataaagggataggatgaaatggggtgagaagaatgggtggctaagattgaagcttaccctttaaggggtgggaaatcatatcccaaacccattttccaaacacagccccaaggttataaattttttttttgagggaccaaggttataaattcgtcgtctgaaattgacattttgttttgcgtttttgcatgtgattatttgagtccgcgtacatttccatgtaccatggggtattccgttccataccgccaggcaaactgatttcccaggaacaaatcagataaaaattattttacacaatcaggtccattgtacttctttcatcaaccaaccagataacattgttttacacaatctgaacgaacgaagcaaatattcgggtacgcggaaagaggagaacgtcgcgcgtctcaccgcagcctgcatgaaagcaatggacctcaccgccgttgctcgccggagatccacactcacttgccggggacgaagttggtggcgtaggcccatgcgttgttgttgacggggtcggcgaggtggtcggccaggttctccagtggccccttgccggtgacgatggcctggacgaagaacccgaacatggagaacatggcgaggcggccgttcttgatctccttcaccttgagctcggcgaacgcctcggggtcgtcggcgaggccgagcgggtcgaagctgccgccggggtagagcgggtcgacgacctcgccgagcgggccgccggcgacgcggtacccctcgacggcgcccatgagcacgacctggcaaccccagatcgccaggatgctctgcgcgtggatcaggctggggttgccgaggtagtcgagccccccctcgctgaagatctgggaccccgccttgaaccacacggcctcgccgaacttcacgccgttgcgggcgaggagctccgggaagacgcagccgagcgcgcccagcatggcccaccggcagtggatcacctccagctcccggttcttggcgaacgtctccgggtcggccgacagcccggcggtgtcccagccgtagtcgccggggaactcgccggtgaggtaggacggcggctcgccggagagcgggccgaggtagagcacgcggtcggcgccgtaccacgggctccccgacgccgcggcgggcttgggcttggccgccgacttgcgcatcgtgacgcggccctcgccgaacaccttggcattggcgaccgccttgccggcgagggcggcaggggaggagagtgccatggtggacgccgccattgacgcgagcctaggactaggaggagatggccacagatgcttttggaatgtgtgtcttttgagctcgtgagctgctgtggtgaggaaagtagtgagctcgagtggggtttaaatagtggcgggaaacggggacgctgcaaggatgggcctatctcttgcgatcgtctggttggatactttggatagctcgcttcgtctatctcgccacctgtgcacgctttctgctgacgtggagatcagccaatcagcagacgacggggtggacatctcgatatgagtcgatagagtagcaattattagatcctaggccctgtttggatccggaggaatagccctccggaatctcgttatttaagagtattaaacgtaaattactgacaaaacccattccataatccctaagctattttgcgagacgaatctaacgaggtatattaatccatgatttgctacagtaatcaactgttaatcatggattaatatacatcattagattcgtctcgcaaaatagcctaggggttatggaatcggttttgtcggtaatctacgtttaataatcctaaatagcaagattccagagggttatttaatagcccggaggatccaaacaaggccttagctaggctaatgggctaatatcttgttcggacaaataacccagcttggcccatgggctataataatccataacatctctcttcgtttagctttggaattcctttaggctgcgtttggctaatgggttatgtctaatgggaaatagaaatgatatcttgttggaatgaggtggtagattatatgaagagaaattgtatcctatgtttggttagatggatggaaaaggaagtttctagactaatgaccaaaatacccctccttgcaataagtggcagaacatagacagatagaaaggggtcaaaatggcaaggggcaatatggtaatttcgcctagcactctatccacccctcaatccagcaggattgtgcatcccatttccaatgtatccaaacagcataaatctggaaaagggaaatgatatccatttcccatcctcctaatcccattagccatacgtagccttagcttttatcactcgtgtcagattatcacacgcagcttgaagaggctattaaatactctgtagctaatatagtactctcttcatcttatgagacttcttagtcaaacgttttcaagttaaatcgaatttatagagaaaatagagtaacacttttaacaaaaacaaacatagtatcaaaatctattcaatgttatatttaataaaactaatttgatattttacatgttgctaatttttctataaatttgattaaactttaaaaagtttgattaaaaaaaaagagagtcaaagtgtcttacaagatgaagtggaaggagcagtaactttgatatattgaaaagaaaataccatggttcaagcctattcattattgtcagtgttacggataagtcatatttcctatacttaggttcgtattgtgtggaagtaccatatacctaatgttatacgagagcggaaaggtatatccaaacaagttaataaagtgagcctgaaaggaaattatctttgccggaatagaaagtgttaagagtctaacctagagaagacaagcttcttcatgttctacttggagaagaaggcgcttactagtataaatacaagcctcccgtgaagggatggacatctaatcacgtctcacaagtcatagctagagcctcatatagagacaattcggaggaagtcgaagccctagtccaagtcatagctagagcctcatacagagacaattcggagaaagttgaagccctagtcattgataagatcttgctgagccgtaagattatattcaacgggtcagattagctagtctactccatccatataatccgtgtggtacttttctcagttcattacttataataagggttattacttagcttgagagctcaaatcagtataaatccttatctcttgtcttcttgatatgatcttgcatataccttgttctaacgtttttcatactctacaaatattattgacaactatcatgaaaaaaaaaaccatgcaaaatgtgcatgttaaaagagaagggaaatagctagaggagcactaaattccgcatagcaaagtttatttctgcaggtcttctttggcgatttgtcctgaataattgctgggaagtgcacctgaatgaatccctgatacaagcaagcaaagacatcgattcacgtgagagcaaataacatccataattaagctgtgtgttcggacgtccattttctcaacccatattgctcgttttccgcacgcacgattttcaaactgctaaacggtgagttttttgtaaaaagtttctatacgaaagttgcttaaaaaatcaaattaatctattttttaaaaaaattagctaatacttaattaatcacgcgctaatagatcgctctattttccgtgctactgttccaagttgggaacaacccatagggaacacagcctagtttagctaaacacaatgcaacatgtgtttgccataatgcaatcaatctttggactgaacgtctgaaccctttcgaaacagcgcacttttcttgagtgttctgtgctaatattccactccagaagcgcccaggttcttatcgatgccacaacgaaaatgcagcagaatttctggcttactacctctctgcactagagcattatcacaacaaatctgctactttgatagttgatgcctggtagtgacaagaagcacgaatcttaccacgtacagtgcgcgcatcaaccacatgaaaagcatctactcacggggatgtgtcggctgtcaactgaacacaaattgcaggggttggttccttccatctgctttctccacaagtgaacattcacatatggtgttccatactttgatccgcatctgatttatagccatgtgttgcgaatttgtgaatacctcgccatattcgcaagttggtgaacatatcaccaattgtattcgagaatatagttgattacaagccgtaacgtttattagtgactaaaaacaatttatagataaaaaatttatatatgtacgtattattagcgacttaaaggttaatgctaaaaataattcactataaagaccatcaaattcaactctaaaattaagtttaaattttagctacaacgagtaaacattggagctaatcaatgtgaagccttctagcctttgttatttttggcgtggttttgcaagtgtctgatctcataatttccaagtgatggataattttaaaattttcccgaatcttcatccatttatttatgtatttattttgttatggatctttttacgtgtcaacacatgagcttgggacttgggagcctggccaagtggtgctagatactaggaatagtgtacaatgtatacagaattataagaggtgagccacgcaagctgccactaactacgcgggttaaacggaatattccttgctagtaagatacaggagaacttgttctttttcttaacctgataatgtagaataaggtagcagcaactaggagccttcccaagtgactaggagtaggcttctctcacatgaccgatgtctcgatacacacatggcacatggaaatgaaacactgcttcttgaccaaaaatctgggattggacctctgtttatatttcagcctgctggattagaagggaaggaaaaaaaattggatggaaattgacagatagaccagccaaacgatccagaaaccaactccctcacgttgtaccagtggttcaaaatcaaaagaggcaggcagaaaggaccaacgaggcaacgatcgaatcgtgtccatggtctccacctcacgggagattctccgcatccaccgaatatccactaggcgacgcccccggcaaatgctcccaatttttttctcacatgcactttgtcacctgtcagaaacgtgacccctgttatcctgtaccataaactacagtatttgtacttagctcctggcatccaaaaattatcattttctctgcactatacccttatatacctcgtgcgtaagaatatctcaattccttttttttcccaataagtactccaattcagccgcgtataaactcagaaacacgtagagattgtttctcaccgcagcagattgtggcaacccaactgcggatcaaaaaccaattgttccacacatataccactcgcctgggaaaccggcagagccacccaaaagatagatgcgccgaaagcgaccgccaccaccggtccaccgcggcacacgcgacgcgagaagcagagaaggatattcccctcgcggctcccctccggatccttcccccacacaccgcaagtccgcaacgcgagccgcaagcgcgcaggcgcgcaaccgcgcaacggccgcacgaaaagcgaaaccgaaagacacaaccccgcatcccattcccgcgggcctctcggctgcttccggaaactcgtgttttctctcacaatccctactcccacccgcgcatcttcgtaatattcgctcggcatctcccccctcgccctcccgcgctcccggtatataagccgacccccccgcggcctcccattctcctcatcagatcaaagcaagcaaacaacaacaaaaaccacttctcgtgggtagaagagagagagagcgaggcgatttcgaccaagaagatggccgggatcgtggtggtgttcgacttcgacaagacgatcatcgacgtcgacagcgacaactgggtcgtggacgggctcggcgcgacggaggagttcgagcggctgctgcccaccatgccgtggaacaccctcatggacaccatgatgggcgagctccacgcgagcggcaagtcgctcgccgacgtcgcgggcgtgctcaggtcggcgccgctcgacccgcgcgtcgtcgccgccatcaaggcctgctacggcctgggctgcgacctccggatcctcagcgacgccaaccgcttcttcatcgacaccatcctcgaccaccacggcctcacgggttacttctccgagatcaacaccaacccgagcgccgtcgacgccgccaccggccgcctccgcatcgcgccgtaccacgacttccacgccggcccgcacgggtgcggcctcgggatctgcccgcccaacatgtgcaagggccaggtgctcgaccgcatccgcgcctccgccggcgccgccggcaagagggtcatctacctcggtgacggccgcggcgactactgcccgtcgctccgcctcggccgcgacgacttcatgatgccacgcaggggcttccccgtgtgggagctcatctgcgaggacccgtcgctgctccacgcggaggtgcactcgtgggccgacggcgccgagatggaggagacgctgctgcggctggtcggcagggtgctcctcgaggagaggaacctgccgccgctcgactgcaagctcgagtcgttgccggccgtcgccgtgcaggacggcatgcccatgacgctccggatcaagaactgatcaatggcggcgacgaacgtacgcatgatttcgagcgcgaaacggctagctcgaacaatgtgtgtgtgaggattgcgatacgggtataattttaactattgactgatttttgcgctacgcgtgattgagcctgcgattagtagaggctcattgtatcttgtccgatcaattgaagtaaaacatttggcttggctctctctctatgagatgtaatccatttctattatcttaaaagaaaaaaagtaaaacattcagaaaaaaagtaaaacattcctgacagtgaattgactagtctgaattttggtgataattaattgtctgtcgcctaaaatgttttacccatttcgtcaaaagaacgtgctcacccaaagtcggtttggttaatttgtgattattgtatactattagtagaatcttcgtctcatatacttatatgcaaggaaagagatggttccgataacagtggaataaagtagaagcctacgaagagctataaataaaaacatgcgcataatacaattctcggtcactcagcttttgtcttttgtgtggaaaaaaagcttgtggctcggatcaactcgaacttgcagtcttaaaaaagttaagcaagctaggctttcagtttgtgaatcaaacaagctagcttgcgagccgctagtttaacttgttagtacaatagatcaccatagtttttagtgcttatcaactaatgtttagtcacttaattacattcaaaataactgtatttaataaattatttattaggtagtagtatttattatttatttatgataaaatagtaaatttgaaattatgaaggtgaaataatatgttaaaaaagcttaataggtcagcttatgagccaagccgagatagatttttagctcgttgaggataaagagccgagccgagccgagataagatggcttgttaagatgacaagctcaaacgtaccgagcaggcttattatttgcaagctggataccgtactccaacccataagttcatctcatatttttagcttaatagactagatcagtttagctgcctgcggatgcccaaccgcacagttaccgtcctaacatgtaggtccaatatttccatattcttaccgaaattttgagatgttccacagctcgatattcgtatttcgaatgtttagcaaagatgtggcgcgagaaaattcatctagcaattcggaaagcgccacacgggcggcggaaccgccatctcctgcgctttcaccgagcgagaagatacgatgatatcttcgcgtatccggtactcgtgaacctgaaagtttggacactgattgaaagagatattccccggcaggttcgccaccggattcagcttctcaccaaattttaggcacatattctaggcatatgctgggcatcgtttctgctcccctctctgttgcgctcctcgtcgatccacgagaaaggtgcagtggacgccattgaactgcagccactggctcccacagctcgccgttcacacacgtgccaccctcccattactcgattccgaccctcgacgacggcgacctcccggtgagtgggccgcgacggccagcttcagcccacgtcgtcttcgtctttgcaacggcccatcaaacgatgggcctcgtcgagagataagcccacaatggaacgggctattgttgggtttgggcccatcacgcagcccggcctctctctcgcgtcgtgacgcacaccacccatcgcctctcctctcctacgcttcctctctctctccgacctcctcggatccgcctcgatctcctcctcctcctccacgcgcgggcggcgaggaaaccctaccgcgaacgacggcgatggcgctgctcccgcggacggcgcggctggcgctgctctcggcgccgcgggcgtactcggcggccgctacgggggcgggcgcagccccggcgaggtacgcgggggcgccgccgccggcgccccagtcgaaggcggccgagttcgtgatctccaaggtggacgacctcatgaactgggcgcggagggggtcgatctggccgatgacgttcgggctggcctgctgcgccgtcgagatgatgcacgccggcgcgtcccgctacgacttcgaccgcttcggcgtcatcttccgcccatccccgcgacagtccgactgcatgatcgtcgccgggacgctcaccaacaagatggcgcccgcgctccgcaagtcagtaccaccttcctcccctcggctgctcagatttcgcgttcctgtgttccgatctgggaatttggtgttgcccagcttttagatcttggaaattatcttgccagggtgaaaaagactcaatagctaatgtgatgtcattctgtagtgtagaaaagccataatccgaaaagccttaatccccacctttaatgtcatttggaaacttgccacaaattcgacacaagcaccaatgttctgaatgcccggacaggacaaatgggatagtgcggtgaataattgaaacctccttccagcatcaatagtgcattagtctaaatattttggcatgattcaaagtatgccaatgaagattgtggatcattcaacccaccataacttaggataacttagcatacgccctatatggccttgcagatatttgagaggataaatcgacttgataaatatatagggtcaattcaatggcttggtgttaaacactggctggatttgattttagaaccataaaccactgcctgtggatcccgatttgatggcttggtgttaaagtcttgctggatttgatttgaggacctatgcattcatggaggatcagacttggaatgcttatgcgttcaagcttcagtagtgctaaatgttaacttaattaaagcattgcgtttgacttccaggatatatgtgtaacataaattgatttgatgtttacgttgtcgattactcattagtgaaaaaacatatttgctggtgaattagatattgtgggtacatagcatggttgttaaggcattgttatggcatcgccatagtggtaaaggcggttgcaggatatatgttgttgcagatcccatgccactaccatcagatctagctcaagatcgcagttgttgcagcttgctggagcctttgaatctctctggtggcggcgacggacaatgaggtgagcagaggcattgagctctaatgggccaatggcgccatggcagtggtagcagcctgagatgttgagctcatgcaaaggtggtcggcagccagatggcggctagtgcctcctctgctgatggctggtggctggtggctggtggctggtggctggtggagtatgatgcctcttagggcatacgtagaacatgtgggtatgaagctaatgttagctttggtgggttggctgcttggcttattgggccttttatcaatttcccctttgctcttgctgatttttctacaatattctccactaatcacaccttagtcacctcatatgacatcacaattcacaacacctcatgccctatgatgctgaggcggtggtgtgcaactgtgttgcctcaaaacaccttatgccttaacaacacttgtacctaggttatttaagatttgcttgtctcgataccaattttttcaaaaaataatatagtgctccacggtagaaaaaaaaacaaatatatgccctgattatttgcataagcatggatttgcttctccaagaatctataactctagaaagcaaagaaaaatctaattctgatcagcaaggtgtagtttgtattgatgtgcttctctgaaatgtccagaaaccagcaaaaggagtggcgtgttgttctgagtgtttgaaatcaaataaaattattttgttgtatgaatgccatggcctttgtggaaatcagtgcttttcttgtgtatcctctggttatctgctattaattttagggtgctacttccttcttcttttttttcaaacatgctttttaagatttcgtgaagaacttctgttgtgccttttgctatttaggaatggttttgtcaaaagaccattcaacctttcttacctgctcacaattttataatgctaatggcattggtaacttcttccacagggtttatgatcagatgcctgagcctcggtgggttatttccatgggcagctgtgccaatggtggtggatactaccattactcctactctgttgtgcgtggatgcgaccgtattgttcctgtggacatttacgtccctggatgccctccaactgctgaagctttactgtatggtgtcctccagctccaaaagaagatcaacaggcgcaaggatttccttcactggtggacaaagtgaggcaatgcttgctactgatcttggttgttttatttctttcgaccctaattttcatccgaaataagaatggcgttgtgctcggatctgcaaacttattgttgtgcctggaaggatgtatacccaggtcgtgttgatgtcagttccacatcaatggacgagaccagtgttggaacgagtttttctttacattgtaactcaacatgttaacttcgtttatgcaaagattcgccttaagcgcgatttgtgcgctgtatctttacccttcactaaacattttattgtgtccattattggagcttcctggcgcgccgtgttccctgtgctgtcataatgttcatagtcccattgcatatttcaattcaacagaactagaaatggcagtaatacaactgtccaaaaagtcacctgatttagatattgtttaggccccttgcacatgcgtttatgtttagattttctgaagacaaagtggactgatcatcaccttttagagagagtgtggaaatttcatctgcggatgttttaacacggaaaaggtgatggcttactcgaacaacgacgtttgtgtcatttcagcaggcatcctactcaacttctgtgtcgtagaattatcacttctgctgaagacaaccctgagttgaagacccatgcatcgtcaggccagtcataaagcatttgcatcctatggagtaaccttgtgctcgagcttccaccgccgcagcctcgctcatcgatcggtggagaccggagagggatcggcagagaatgcacgtgacaccaagggactcttcaggtggtcaccgaagttcttcgtgttagaacttggaagtgggaatcgtgctatggcaggggtactgtaaaagagattattattgacaactctcaaaaagagatacatcccgttttgttatcgtaggcttaatggagttcccttggcaaagcgggccctaacctctcctccaagccaagagcgccgctacaagaacacacaccccctctgccatagccgccacattgccgcaaagacgcaaattaaaccgtcctcttctgccatctcgtacgtcgcctccttcctccaatcccggattcccggtgatcaaagcgaaagaaggtaataataaccagtgatagcttcgaatctctgtaccgccggtgtttttgttatttataatctctaattataattgcgatctaataatgatccggcttcgtgcatggtggtagtagcaggattgttcgagcgagatgaatccggcggccatggcggcgctggggtcgaagctggcgacgctggggtcggcggcgcgggaggcggcgagggtggcggcgaggcaggggtgcgcgtacaacaaggcggtggtggaggggagcaggcagctgcagtcgagggcgtgcgaggcgacgaggagcgcggccaagcacgggcgcgcgttccacgaggagctcatggagcggaacaagcgctacgtcatcgacccgcccaccatccagacgtgccaggagctctccaagcagctcttctacacccgcctcgccaggtcccctccctaatccctatagagtgatagatcgatcagcattgattttgattgattttggttagctcgatcgatcttttttttcttttgcgctccattgacgtacgttgattagcttctttgatgccaactgaacttttttttggtagatgaacatattaattaattaattggtgcgattacagattgtatagttacaaccgaaacctactactaaggatttataattgaaaagtagattggttttacggttcttgacactaaaaatttgataacaaatattagagtagttttaatcttaagtctgaagacatttgattaaactttaatattgagtggttttacagaaagatacaaaaggtttgtactgttttatgataccggccctatgctttttgaaggattgtgaaaagagaatctcaattcattattatgagaattattgtcgcgccaagaccaccaccatgtttttctccctccgtcctaacactgaagtatttgctcatgaagagcttattatttttagatgtggggttcttcagtcctttttttatatatatttttagttgtagattgccaatgcatctccaatcttcaggtgcaaacgttattaattagggtatgtttagttcacgctaaaattgaaagtttggttgaaattgaaacgatgtgacggaaaagttggaagtttatgtatgtagaaaaattttgatgtgatggaaaagttggaagtttgaaaaaaaaagtttggaactaaactcggcgttagagaggttggacatgccaaaagtatagtcgaatgtacaagctagcctagggagaagatggatgtcatattcgtcttttcacatctactaaatatttgactgctaatactccctccgtattttaatgtataatgccgttgactttttaacaaacgtttgacatttcgtcttattcaaaaaaattatgtaattataatttattttattatgatttgatttatcatcaaatgttatttaagcatggcataagtatttttatatttgcataaaaattttgaataagacgaatggtcaaacgttgattaaaaagtcaacggcgtcatacattaaaatacggagggagtaataaactttctgagggtcggagagagtaaatcatagatgttgaatgctattttcttaatttacatacgagtttgtattcatgccttacttgttgagaaggaactctgtattcgatcatgtttaggaaaggtagctgatggtttcaatctctctgcgcaatcttttctagttcggtatggggcttgtgcaaggacttcgtttatttcttctttgaaaacatcggttttatgtgagcttactttttttgtacaataataaacttctttagatgatggaagtgttacgctgtcggccgaagatgaactcaaccacaacaaaaaaaaagttgaacataatgtatttctttggaaaagttaaatatcaccacttactaaatttgtttgttggcttattagccgcaactaaaatttaaattttgaaacgtaatttaatcgatttttgaggtatttttcatcgtattttattttcactattgatttttaaatcgttaagaacacaaatataaaaaaaattctacttacaaattatttttgtttactttgtttatgttttttcatggtttatcagccatcgtacaccgatgagatactaacaagttgatgtttcgatcttgcagcatccctggccgttacgagtcgttctggaaagaggttgatggcgcaaagctcttgtggaaaaacaggaagaatctaaatctaaaggccgaggatattggcgttgcaacattgtttggtattgagttgatagcatggtttgctggtggtgaagtcgttggtagaggatttactttcacaggctaccatgtctaacctcttacttctagcaagaacgaccacacactagtcatacatcatcagtaagatattgtgttaatttgctacttagtagaatatgtctagtctgatcttagattcctataattcaaggagatagtagtagtttttctcttcggcacgatacaagttttgttattcttgttatgccaccaaacagcatacatgtgaaacagccatgacaaactaattggtttatttattatatctatataacatatggtttatttattatactctgtttggagtttagacatgttagtgtcctggtgtgtgtgatcacttgcaattgatttgcacattaatactgctaatttaattcatgaaactgctgctggccagaatccggacctcaacgggcaatctattcaattgattgagtatttcaatggccttcactctcaaaaactccatatttcattaacactgccatcgcattgctccatccgtttaccaccttgatcaccacctcgccctcctcaatggcgccgctcaaaacgttgctcctcttcctcgtcgtccttctccccgtcgccaacgcatgccagcctccaagaacactccacgtcccggtcttccaccgcgacgcgctcttcccgccaccgcccggcgccaagcgtggcagcctcctccgccaacgcctcgccgccgacgccgcgcgctacgcgtcccttgtcgacgcgaccggccgcctccactcacccgtcttctccgggatccccttcgagagcggcgagtacttcgcgctcgtcggcgtcggcacaccgtccaccaaggcgatgctcgtcatcgacaccggcagcgacctcgtctggctccagtgcagcccctgccgccgctgctacgcccagaggggccaggtgttcgacccgcgccgctcgagcacgtaccgccgggtcccctgctcgtcaccgcagtgccgcgcgctccggttccccggctgcgacagcggcggcgccgccggaggaggctgcaggtacatggtagcctacggcgacggctcctccagcaccggcgacctcgccaccgacaagctcgcgttcgccaacgacacgtacgttaacaacgtcacgctcgggtgcggccgcgacaacgaggggctgttcgactcggcggccgggctgctcggcgtcggccgcggcaagatatccatctcgacgcaggtggcgccggcgtacggcagcgtcttcgagtactgcctcggcgaccggacgtcgcgctcaacgcgcagctcgtacctcgtgttcggccgcacgccggagccgccgtccacggcgttcaccgccctgctgtcgaacccgcggcgcccgagcctgtactacgtggacatggccgggttcagcgtcggcggcgagagggtcaccgggttctcgaacgccagcctcgcgctggacacggcgacggggcggggcggcgtcgtcgtggactccggcacggccatatcccggttcgccagggacgcgtacgcggcgctgcgcgacgccttcgacgcgcgtgcgcgcgcggccgggatgcggaggctggcgggcgagcactcggtgttcgacgcgtgctacgacctccgcgggaggccggcggcgagcgcgccgctgatcgtgctgcacttcgccggcggcgcggacatggcgctgccaccggagaactacttcctccccgtggacggcgggaggcggcgggcggcgtcgtaccgccgctgcctggggttcgaggcggcggacgacgggctcagcgtgatcggtaacgtgcagcagcaaggattccgggtcgtgtttgacgtggagaaggaacggatcggtttcgcgccaaaaggttgcacgtcttgattcaacttaatacacttcttgagttagcctgaagcacgtgtaattctactacagttatcaaatgttgtttcagctcgtacttaaatgtgtgattccgatgtattttggtacatttgtaatggtctaaaaatattttgggatcttttcccttccgtcgtgttaaatgttagactactaggcattacaacactacgtggttatggtgctattatcacggttatcacgtacaataatcttttcagtttttgaagccacgctatactgcacgtttttgaagccacgctatacttcacggtaaccgcacggtttttacggtaaccgtcaaaccatggactaacggtaacctcatcctaaatggtttggtaaacactaaaggccacacgctatagacaagggggcatcctctccaggtttagaatcctcccccataagagttcatgttattttttacccaaaaaaacttgcacaatttttttcttttagcaaattcccttgctgatttggcactttgacaattgacacgatctatcatctatggagttggagaagctgcggccacgaggagtcgaggaggcccccatgccatgcgcctccctagcggctatggccacgcctcgagcacctgatcgagcttcatttagttgatcgatctgaaaattaacgaaacaagagcacattgtctctacaacttcttttttttttaaacacggattgatgagttatcgaaatgacgaatgaatccctgatcgaagcatcttttccccgcattgtgcagatcgaatttcaagctttattagtagtaatgggcggcgcattccagcgccaggtccggcctccaccactggtggatcccgtgcgccgccttgaagtccggcgacgcgccgcggttcaccgtcaggacggcggacgggaacaggtgcagcggctcgcatccacccgccgtgccgatgcccagcagcaggtccttcaccgagttcctcgtcgccaccctccccacggcgcccgcgccgatgtcctccatcttcttccggtggtcgaagtaccccacgtactcggcgctgatcgggtcccccgggttgacgaacacgttgggcacccaccgcgccagcgccgcgaaggcgtcgtagcctccgccgccgctgccatggtgcaggagggtggccgcggcggcggtgacgaagctgttggcgatgcggacgccctgcctcacccgcctgtcgccgatcctctccaccggcgccgacgggaacggcgcgttgaagaggaacgtggggagggcgacgcccgccctggccatggacttggcggcgagcgtcgagatggcggagcccagggagtggccggccagccagacgcggtggtgatgctgatgccccgccgcggccacgacggcgtggacggtccgcatggcggcgtggaagcgggaggtgcggtcgaggccgttgcggacgagctggaggtcgagcgccaggtcccgggacgccgaggccttcttggtgatggtgccgcggaacgcgacgacgtagtgcggcgcgctggcagcggcggcggcggcggggtcgaggaggtgccacggcggctggaacgcgtagacggcgccgaagatggaggagtcggcggcgtccacgagcacctctcgtacctcgaagtggaagaacctccaccacgccggcgcgcgggcgtcgtggccgtgccggttccactgccggtcgcgctccatgacgtacacgccctggacgaggctcgccatgacggatcgctggtggtgcgggcaattcctggccggaggaaaaccatcagaactcaaaggtgatcagatcaatggttcccaatgcaggttcctgcttgttttctttcacaaaatatacgatcttttttatgcttagttgctttcagcactgcaagttagaaatctcggggtttcaaaaaaaaagttagaaatctaagcacggtactagacaatgcaaattcttcaaggaaacagagcaatctgcaaccaaaaactggaaagttttttttaaaaagtaaaaaaaaaaggaacaatggaaaagagggaatcagcaaactaccaattcacatatgtcaagtacgtaggtcctgacacctcaaagatgtccttctgtgacggcattttgcccatctttttcttgctcggttgctctgcacaacaaagggaagaaatttgcatgttagtctcagtgtcataggacagaaatttacagattaaaccgctctacttgattatatgaccaagattcccactttcctcttaacttaacagctccactctgcagtatcctgctgcatggatgtatccacattctgtacagaacctttgtgtgcagcaggaagagaacttttgtctaatcatattctctagagctcaggatcgacagtgaaccaaatagttgacaatgtgatccataaatccgtgatacatcaatcgcgtattcacaatttcacattacaagaatcagaggagaaactaaagaaaagcagcaagaacattacccggagataaaaactactctttgcatatcatctcctgctgaggatcatcctcatcttcattgcacttctgactctgaaatgaattcctcatagcaagagcgtttattagccaaccagacgacttaagtttcaagatcaagtcaagaaaggaatctaactttttttaaaaagcgatgaaaacaatagtttaaaagattgtgcgggcaacgaactgcatcagatcaaatggaagctccagttgcatgatttgggcaattttttgttggcgctgactcaggctgcagaagttaagaaagggttgtatcggaagagcaggaaaccagaagactttatcacttatttttttcaagaaaaaacttatgagcatgaagtctccggttttgtacagttggtcggagcacaagtggcttaaatttataaagaacatatcatgtgccgtgcagatttgcatagcattacttcctcttcacatcctttctggaggagcaattagagcaagtttaataatgtagccaactactaactctaaaaaatgaaacattatctatagccaacctaataatacactcatgcaataattatttgtacatataaaccgcatcattaatacctaatccatccatctcttacatagttattagagcttgtgttgcagccaactataaatctataacttttcttgtctcttgtctcttctcttttctctccttcacataagcacaacttgtacaactcatttatataaatcccattttactcactcttagaagattgcaattaatgaagacatctttttttttggattcctaattggatacaaactttggactggttctttatgatatttttgctgacaaaaacatagctgagaggtgaggtgatattgcttaaggctagtgatgacatctgaaaagtctaaacgtgtcgattggttctctgagttatgcaacttcaaaatttttgtatgacgggcccggttgacaaaaccagaactggtaagcaaaagtgcttccaagttttttttttttctaactcgtcgtggaagaatctaatgtggtcgataactagaatgaagtgtggatcttccagaattttgtgtagctacctggcaaatgatagaacaaccctgttgtttcgcttatgcttattagccaaactttgaattttaaaacttaattttaaattcgattttatggttttctttttcatggtttattttatattatttgtctttgaatcgctaaagacatgtatattaaagttttacctacaagttatttgtttcctaataaactgtctggataagagcaaaatgatatagcttgaaatgacttcggaaattactaatagagataattcaataaagttcattagcaaattgtaactcagaagactcttacatgtccttttggtcgatatgtggaatatggatggtggaaacacatcttgaatcccccttttcagacttcagagcatttcaaatggaccaaaagtaagaaaaaacaatgccttctattccaataaatattgctcattgtacactgttacagtaatcacacttcttttccctgtaatcctagaaactctgaaagtcgattgtatcaaaagtttgttttcttgccccttctgactgaacattatctctactctatcatgaagagactgctgctgttgttgcacgaggaacatccacaagcctctcaagcatttccaattgatcataaggtgctatctgcagagaatcagattcatgttcatttcatctccatttaatccatctacatgaatttcggaagtctactgtacatgaaataatctttattttgtattacattacctgagaaaaaccatcaggccaagttatagaaactgcgtagtttcccataggacggatctcttcaggttcaatgtcttctggtatatcaccatattgtactttctgctcacctgtccattcgtcctgcagacaagaactacttagtttgtgcaaaacaagggcaactgtgaaaatattggtttctgaaaatacagactacatgatttagtttctgaaaattataagcactgtacacgccatttgaagtcgatgccagtgttagaataatacacattaaacggcgaaaaggtatacccaccacactttgagcagatcggtcattccttctgactgttgctggatgcaacaagaactcttcatctgaatctggtactttcactcggattgctctaattgatctatcataggaaactgctgttgaaactggcaaaatgaaaaagattaacacatcattacaggagaaaaacttggtaaaaaaagaaacatatctgttttgctgtaatacattttttgaacaaaagctggcagtatttattttttttgggaataagaaagctggcagtatttattggtatacttctttcttcgttttgtttaaattttggttagttcgaattcaccaagaaaataaattgtatgaactacttttacatattctaggttgtaatttgtgaactgctaacttaccctgttgtctgattttagcacactgctgaacaacacaaactccaagattctgaaacgtcttagcaacatccccttgtggatcagccactacttcaggaattccagtatctccagacgctgaaagctgtaaattataccaaactgtgatcattgcactcacttttatccttgtacaagataggtgggattgagcttacagttggccgtatcggcaaatcgaagaggtgaggtattccaaactgctgcacaacctgaaataattgcaatgctgacgcaattcaaaaaatattcaagagaatgtgctaaatgtgcatcaaaacttttcttgcctgagctccagaaccttgcccaaatgggtaaaatcgttttccatcagcatcgaagtagcacatgttctcaacaactgcaacgcacggaaccttcacaaagaagatgaagatgaagcagaaacaaattgatgcacgaatagtaagcacggtagattacaattaaaatgaacagtgatatgaagattacacaccttcagcttggaaaacattctaactccctttgcaacatcgatgaaagcaagcttctgaggggtggtaacaatgacagctgcagtcaatggggctacctgatgtttcagacatgttaaatttcacagtgcctacaagcatggttgatgttaccacgtgtgatttgtacaatactcaggctagaggtaccacctgacagagtgttaagtgtatatctcctgttcctggaggcatgtcaatgacaaggtagtcgagttcgcccctttatgaaaagaagaaaaaaagtcaagttttttcaacggaacccaataatattattgggaatctacgaaaggctaagctggtaaaaatgggctgctttattatgttcatcagatgccttcataaagatgtcaagtatctcttttgcataccaatcagtagtggtcagcaactgattaatcactcccgaaaccattggaccacgcattatagctcttccttgtccagcaaagccaaaagacaccatcttgacgcccaaatactcggttggaagaatacttctgctttctgggttctaaaggtaaatctgtttaccattattagtgcaaccactaattttttgttaacacaattattcaatcagcttaccatcactagcagccggttttcaggagaaaccatagttggtaagctcggaccgaagacatcagcatcaaatattccaaccctggcccccataccagctaatgtatatgcaagatttacagcaactgtagactttccaactcctccctgggaaaaaatgttttttagttacttactactaaaaaggactgatttattattatcctgaggtcttgccttgcagcttgaaactgctatgatattcgaaatcttctgcaatccttctggaagctcccctgcgtatgctggtcgtgcaggttgcgcagacattgtaacattgaccttcttgacccaaggaagtgctgcaacaacctcatttgccttctcttcaaactacaaagcaaaacaagtcttcatgcaattttgccgcaaattgtttttccaacccaggataggacagcatttttacaaacagataggagtataaaccaatcagttcacatttatacatctatctcatcagatgccaatgataagcttaaccgatactattatctcaaaaccaatatagttactgctattttgtttgagacaactgaagataaagagtgaatagttccacggagataactgaacacgtcaacacaggaactgtactcaccatgtccttgatcgggcaggcaggagtcgtcagctccagacgaaacgagacctgaaaaagcagagccaaatggagaccaaagtaagccaaatgttcgagcagtgcatccaggcttcatcagcaagtgtccttcaacttaacctcttccaaggcctcgctaatctccaggtccttgacgaacccgcacgagacgatgtccgtcccgaagtcgggatcgatgatttgggagagcgccacgagcacgtccttcttggcgtcctccaccgacgccactgccacacacaccagttcgaaaatcaaatggaaagcacacacaaacgtaaaacaaatttcgcagtttgctgagaggagttccgactgacgaaggttaccgctcgacgaagcggctcccgcgcgccgccggagccggcccacgcgccgcggcgaggggcaccagccatgcgcctgggcggccgccgcggcaggagaagccttcgccgagaaggcgcctgcaagaaccatgaaatccgtggagttagctcgccggtgagagcccctgctcgggcgcgtcagagcatgagcacggagtagaagctgaacgcgagacaaggcaaccatccaaccgccgtgtgcgctcacctcgcggggttggagtcgacggggggaggaggagagggggcgcgggcggcgcgaggaaggaggcaggcgcggcggcgcggaggttccgcattgcgggccttcgacggcgaggcgaggagatggcgggcgcgcgcgcggcgaggaagcgtggcgcggaggagcggtgggagggagtggccgtctctgggccgctggttgtgtggatttggtttgcctttgctcgcttgaagattagtggtacaggcagatggcgagagcgtggcggacacgggacaccgacgagtgggccctgttggattacattttttaagataatggaataaaaatcccagcctctgcaaatttttggattacatatgccacaagtagttcgctcgagtgtcggtacatccatagaacgggagaaggcacagcagctaggtaaattttgtcgctaagtttgtcaagaaaagtacgtattttgcacattatttttttcccgagtttatacgtggatagtaaaatgtagtggtcaaggttagtagtatcgggaaagtgaaatcatctctttcgtgcacgtcacctaaatagtcataaaaatatgaaaaaaattggcaacatagattaatatgaaatatatcactccacaaacatgcaagtttaaattcaacttctacaagttgtaacaaaaataacaaatatagttgcgaatgtgagataactattttcagtttaatttgttatttttgttgtaacttatagaagttgaatttggtcttgcatgtttgtggagtgatatatttcgtattaatctatgttgttaatttttttaaattttttgataactatttagatgacatgcaaacaacgagaggatatcctctcgagagataaaaatagtgttgtttcattttatagatggagatgggccgaaagttctaaacgcacacgaagccaccaacagctcggacaaggcacaaggtaagcacatatgtgcatgggaacaagtccgcctttgtccctcgtcttcccgtggagtttaaattctaaaccataataccagaaattttaccaccccttctccccaacttacaaaattggattaaattagatcctatgataggatggatgaccagtttcgctgacgtggcatcctaatgagaacaaataaaaaatttggggcccatatgtaagtacacatccacctctcccatctcttcctaggagctcattggtgaggagatgagcggggtggtcggcgagatgatcacgaaggcaacaatggcagtaggaggtcggcaaagaggggctccagtggtttgtggcaacacgggaaagaggagggaggcaagggagacagtgcattgtgagtttgcctgtgggaagagaagcagtggtggcggtgccgacgagcccctgggagcttgagctcgtccgcccttcagtacgcgaagggatccagtggcggcggcagccagcaagccctacgtgagctcaagctcggtcaattgcttgtgcgaagggaggcttgcccaagtcctatcacaatcagtgaaggacacccgtgaattcgacagaggatagacaaatatgcaatgacaaacatgacggcatcgcaggtggtgtgggtgggagggctcgctgcatcgaaagcaataattgtacctgcgcccacccaagatccgtctcccgtcctcgatctccaactcaatagcgttgtttgggcccttcccgacgatgcgttacaacttcaataagaaggagatggcgcctggcgacagcctacaggcgagcaccttgaggagcacatgctgctccactttgtgaacccatcacccgccaccagagacaacatcgacactgaccgcaatcttcatcaagggtatttggcgtatagcttgtcgtcgacaccgatagtattgagcaagttggcatggaggagacgagaagaagcataggaagaaggtgaggtggtcactttacttgcgagccccacaaactaagataccacatcagcgaaacctggctttgcgaattggtggtggtggtggggggagtgggggttcaggatttccaatattgaggtttagtggtactatttaaaactcgacagaaagatgaggaacgaatagtacacttattgctatgtccatgctatgtgttgcagacggtccatatacgtagcccgtgagcgtctcggccctggcccctccagcactcgccggcccattgccagacaccacaaccgcgtgacgcacctttgctacacgcgacacaacaacttgtcctcactcgcgcccgcgaacgagtgggcattggcccaagcgcgggacggagcgccgcgccggttacgcaacgcgaagcgggagccatcggttggcttccgcttccgcccccgcccccgtccccgcgcgcgcgcgcgcggccaacgccaacgcagcctgtttatccgggtaaagccaccacgaatcgaggccactgccggtcctggcgtcgaacgactcggcaagtgtacatgatccaaccggagatggtcgatcgtccaatgcagcagcgacgggcaagattgtgatggatgagtagttgaggaccaatttaaccgaccgatgcagggaaaacacatgcactgaaaatggcgcttcttccctagttacatttcctgatcaatcctgacggtgcttctgtatatgtgcacgcgatgcgttcaagaccgagacggacgagaaggcacgaccccatggcgtaccatacacttgaatacttgacgcgacgagatctcacatatatgtattatccccgccgatctatcattctactactagcttagctagcaaccttgggagttgggggccacccacagctctgcaaacttcatcaccttggagacgctcgccagcacctcatacggcgtgatatcccctatcaccaccaccttcttactctctagatctacctcaaacgacgtaacacctgcacaccacacacagaaagatacatgttcagatgcatgtaatgcagagttcattcagactaacttgaaagttgaaactgacaaatcccttccatttttcgcttgatccggcaatgagccgacagacggtggcaacaaaccatcttttttgtagagtgaagtaaagttttactaccaaaatcttgggtaccgactggggtggcgacacctaaacttctttccagaaagggtaggcaagcacaggcaggaaggcagccatgcacatgtgtacagtgcaaacatgtgctgaaacctgcatataatgcatggatgcatttggcctgcgtgcctgcacaagccgcaaccaaaacgacacgaaagccaactcatgagcagcggatgatcgcacattttcgagctccgtgacctgtaacaatactacttttcttcagaaacattttcgttttctgaaatgatagtggctttatggagcagagcacattgctgcttggttgtgttcactgttcgccattagcgaaacaacgagggaaccagagtagatcgctggggttgggttcttcgctttgcttatactgaaatcattggaggtgtacaagggtcaaccaccggggcgagtttttcttccttgcactgacaggcccgtcttcttgcagcagctacgaattcttctgaaactctgaacaactcactgccctctctgactctcccagactctgctcacatcccaaagatgcccatgtggtagcaccaggctacgttataaaattctcagatgtacgccatttcataacccggtgatttttaaaagataacaccgactcagtgattgattcgaggtcctagatagtactaaaattcgacaaatatgaatgcttcgcttgactaatactcctaagaaatgtacacacttgcatatatgcatgaagtacgttgaagagatgttgagtaaaaaagatcgaggcaggattcaactccaggatttcaggtattatcaccttttagactagcggactgtcaaattagttgtcacaaattcgagtcccctgcccctaagttattgctgtgccattgctattgttgtgtgagtcacagagtcctcaagtaattgcaacgaagaaaaacagagagaaagagaacgaacaagtgggttacttgttcagttgttcttgggggtgaagaatcatgagttcatggcactacaaataaagttcagaatgatatatcggttcaagtagttttgttcgtttggtaaatgaaaagtgcaactttatgataacgagtacttcaaaatgcatcctttttagcactagggcctatcaaaagaatctgaacaccgtcccaaaaaaaaaaaaaaaagaacagaggatcagctgtctcataccgtccatcttggatatatgcttctgaactttcttggcgcatccgtagcagtgcatggacaccctgagctccacggtctgcaccaaccaaaaaacgcaacagatggaacagagagaaaagcatcagcagacagaatgttttgcagacatgtccttaatagaacaggggagaggagttcatgttcatcacctttggctctagatggaaagcgagagtcttggctccgccgacgagatccttgagcttcacaagctcttccagctgagagctcaccagcgcctccctctcgatggcctcctcctcgtcgtcttccaccgaatgtatgcagacgcaggcgttcgtgcagagagcgagggagaagcagtcgaggaccttctcaaaacctagcttcctccccatctctcacaaagtgcaatccttttgaaaaaaaagcagccaatgtctactgcctctcgccaagattggctgggctctgctgcgcaggggataatgtgaagaatggcacagctttgcgcgagaagagacaagtagatatgcgagctgagccagtagacctaccaaagcgcttggaatgaggtcagggaagaggcatatatacaagctgtagcagtattgaagtgggctattgcccaaaagtttgaagcaacttcctagaaatattattaacttttgttcagtgcaagacatggtcaggcgccggttttacaacgagacaagctggtaagctctgcatgtgacaatgtgcttgccgattggcaggtactagaactggtgcaattatgcattgcagaacacattgcaatgtttcttttagataatgagaactcactgcaatgtgataatcattcctggtctggtaggatgtatagaagagagagtcagagaaccaaactgagggacaacacatttaggtaaatcataagatacaattatagaagtaatcatgctaaccatttggctagtaattaatatacataaatactccatatgcaagtaactgaaaacatagaaaatctgcagcaagacgtcgttgattcacaaattgccacataagtgcctttcacttgtccacatcggaataatgtatgtatttgatcgtttcattcggtggggaacacatgccaacgtaagctgatcagcatagagaatacaggcaagaaggcatcagctaccattttaccatataaaaccatatccacttgtcttgcgccgaagagaggaccaaagttataaatttggtcggagaatatgaaatgcgagcaggtcaccttcatagacgcatgccacagcggttctaatctttgtaggccacgactttgtaagccacgacgacctttagcctctaatatcaaatatagctacgcaattaggaattgatttgttgccagtcatactctaatttgctcatctagacgcgtctgatcaatgcaaaattaatcgctaaatcttacgtaatcctcccattgtcttctactaataaaaaaagaagttataaactagtcgcgcatcgtgtgttgtcacctttttactttccgaaaggcatgatggatgcatcggtgcgcatcgccatttgacaagatcccaaagggctacacgtccaattaggggagagagacgagacatgattgattagcctgtaatgctttgtgcttatgtgcgacaccgacatcttaatcggttgtactcgcaaaaggggaaaaaaaggacgtcttaatcgcgtccagctctgaagaacagtggcggaatatggtggcgggcctcgtgcgattcaactgttttttcaaggaagcgcgcagcgactggatctttcactatttaactctttttgaaaacttattttatgaatataccctaatagaatttatcccaaaaacgacttaaatctcggcagcagggttgttggtggtgctgatttccaacgtgtatgtgccaaagatcttggcgccaaaaccctggtacattctaagggcctgttcactttgatgctattttcagtcttactaaattttggtaaagttgcaaaaaaaaagtggctacatttagtttgcttccaaattttggtaactatataagaaatcccggcaactatgctaaaattttatcaatgccaaaatttgataaggttgaaaatgacatcaaagtgaacatgccctaattcttaagaaatcaacaccaccaaacaagcataggtgcatggtgtagaagtgagatatccagactgctatcctagttaattgggtttgattaatacttgttaacttcttaagagaactgatgagctctgtgccaaaggactaggatctttggtgccgagaagttagacatcggctctaaattttttggtgccaagatttgagattaattataaaataatttcgtcagaatctatctataaaacaagttttctaaaagggataaattgtgaaaaatccagcgcgcaacgatgtgcatccactactgaataccgatgcatctgatctatctgaaaggctcgtggtgggtggccattgggcaatgggcaaggaggggggggggggggggtggtgctgaggcagacatggcaggtgggcccgagcgccgaattactggctctcagtggggaggacggatcatgtcgtacctcttacccagcatggattgggttgtgccatttgctttgcctcgttgtgaattgtcctggattccaagcaagcaatgcgtgccaagttcttaggattctgcaattcgccgactccgttcggagccaccaaccaaatagagcagtaggattctgtagatgcttcggaccccatgcattatggtgattgtgaaatgcgattgcagcgcatcgatatcagagtccatgtccaaggtaaaacacagtgtgagcacccgtctcgcgctagcgaagacgacaccatggaaacggtggcactaggtgactgcactggtggagtggctctttcttctgaactgtgaggagaatacatcaagtgcaggggaaagccggaaaggccattgtccagtctccatcaggtgggcaatcagctaaaacgagttgctaactcggctagcttagtggtctgtagaagtgtagattgccctgtgccccgattttttgagcgttcgccatggtgatgactgatgagcacgactcacatcagatgtctacgtagctaccagcattagcattggtgctgcctgtgaccacctcacaactcacaagctcaggtgggctctctttgccttgtcttgaaccagacgacgacgtgaacatgttcggagggtggggcaacagtggacggatcacggatgtaggagcaagagggcctgaaaagggtgaagcaggggccaggggcttcctctctccattgcccgtttcgtccaatccagatagtaatctcagcatggtccagccggatgaacacctgggaccttgctcgagagtagttgagcgactagggtagaaaatcagctaaaggaataaaggacggcttgagagtttgggggcacaaaacttggttgaacgtctcccagtagcccaaatgagcagagaaaccatacccggacgttaaacgtatgaataagatgtgagatgcgtccccagtgccagcccctacccggacgttaacgtgccagtaagtttcctgaaaacatggcatatcatttctatttttcttgcgttgccaccacgcacgaagtgctaacgaaagtagtactaatctagcaaaggccgagaaaacaagagcttcaacagaaaactgtgaaaaggacaggggaagaagtaaagccttttgtcgagcaagagtgactgtagtcttgtaactgttgtctttgggttcgtcgagcaagagtacatactatgccatggaatctggaatgaaacattacaataattgccaggcaacacacaagcagaaaactcaaatctggatcaaactggccagcatcaggacagaaaactctctgatattctgatgcaaaaggtataaatacacaaattcttgtccttggtcttaaaagaacaaggtaggagtggcagacaaagggaaaaaaaactgtctccgtctctaatgtccaggaaactatacgctaacttcctaagcatgaaacgttttcgcaatgatatgcgattgatctatagaaatttcccaagggagacataaagcagaaatatctgagagcaaggtttattaaaaaatctgcattgaatactatctaaatatttaaaacataatcagaaatacagtacccttggcagacactgacgcaattactattctggttcaccaaatacaagctagctttctgatatgaatacatgatcgtaccctaacaatctaacatatatacgtatcagggttgaattataaaatctgcaatccaattatgtaatgtacaaaaaactttatatttaccttggagataccaatgagggcacaagttcagaaggttgggggtaatagctgccaaaatgtggtggattatgtgttgctcccggagccccagtagaactagacgatactagcagcctaattcattgaaacaatgttaaaaaagaagaaaaataaacaaatacaagttcaggcccagaaagctacatttagatgccacatttagatggaattgtgttagttataaaactgaacctattaagatacctatgaaaacatgttaaagagatgaaatccaataagtgtaatgattgtttgaatggtttggcacatgagataaatctaaactttggacaaaaagggcatcttatggtacagagcctggttcactcatgactgaagttgtgctatgttcatgcaatgccatgtaaccaaaatttaaagacatgctacaattatatgccctagagtaaactatgtaaaagtccagataacactccccaatgtaggcatgtagctgtgcagcaattggtactagcagatcataggttagacaagcacagtcgcaaatactctatgcttgtcatttgaagagacattgcaaaggaatgttcaggttaggctgtcagagaaagttgccaccaaacacattctaccaattataaatcaaagcacaagaattcgagaaaccagaatcagactggaactcagcttatctgctccactagctagcagacaacttcctgggaacccataaccaggccatattcagctggaactaaaactcactgataacttggcacaattcaaattttagcagtcctctgtgtctgcagctcatttaactaaccagccatttatcaccatttttcttaaaccctgctgggcacaccacttagcaatccaatcagaactatttgttgtcctcgttaagaaattgccaataccccaggtggttatgagcaatgcaaatttcaaaatggagtgcttggctacagcaagccacaatatttaaagaaagtggaatagttcttccaaaagttatgcaagaaaattaagtcctgcataccatgtcatttgattcatttcagaactgccaccgactagttgtcgaaccacaaatctaggcagagtcctgccaatgaaaggggtatcaggtcccctaggatgttgtccactgaactgcaaagctgtggaggaaagagaaatgagactgggaagtccatataatagagtgcctgcaacgaaaaatatagaaagaacgaactatatgccatatgagagtacagagaatctccaattatagcacatgaccagccaagaactctataggaacctgcgagtaccatgatacctagctccaatccttattattgaaataatgtcaaagagtaacccctaaagatttccataattgttgtacacaaatgtagtttgtctgttgatagataaagtcaaacaatgaaatcaaatcaaccattttttcatcctcggtgaagtgcatggctacataaagaatatctgcagtgaataacaaggatactttgcatggttgatttctttacagctttttcttcttttcatatcccactatatgttgcattttgtattactaaactgacttaccctgtgaaacaatacgaatctaaaataatgatggaggtcgagttgatgcaccctagctaacaacataaacttggaagtaatgctggggatcgagtgaaaacctttgtcactgagtgtaaggccccttgctcctgtaacaccatgaacatgaccttcatcataagtaaaagagggcccctccacctcctcttttagctcagtcttcactgcagatgacactaaagaattgactaaaccaggggacatacttgtctcaatatcttcatttgaacttgtcacatgagattgaatttgggtggtactgagaggtttcggacaaaacaccagagtagacacccttgatgtggattgaaatggtcgatgaattgacctttcctgataaactgcattataggactgtgcataagagccaattgcttgaccatttgttgaacaagaaatgctctttgtgcactaaaagaaaggtcaaacctgttcctttatcactggattttgaatattggatgtagttgtctgatgctgatccagataaatttgagccaggattatcaatttcctccatagcatttgtgctaagagaatcaagagtgttccctctaccagatggaacaacagccttcactctataaacaggacgcgattgtggcttcagagaattatgagccatacggacagaggatgtgaagagtttactaaacatcacagctcgcgctttccctctctgaataaaaggttgttcctgatgagatgatctagaatggtaaaaggatggtgaagctgaattcaagtttgatggagaagtttgcttcatgggaaagtttttttcagtttggaaacccagagtttgagagggatacttttcccccttctgcattggaagaagcctcttcattctgagatctgcaacagtgaagcatagacaacaacattgcttaatgttagattcagctaggtagtcagagtaaaaggagcaaaaatggaactttcgctgacctaatatattgtcctgaacatatctctggatcactcctccaatgagatacatacgggttagaaactccccccctgtaaccatcgtgtgcactggtgaaatctttagcattgccataataggtatgtgattctctttgaacataggcaaaattcttggtatcaccatgatcatagtaagtgtgaaatttacttggaactcttttgtagttattggcactgccatacatattgttggattctttcagaaagctaatgtggtccctggtggtagcaaagaaagtacgtggttcctttgggacatacttgtactcttctctatcatcatgatagtaagattgggataaagttctttcaagatagccatgatcataacgatgtgttctatccccaccccatgctctaaaagagcctcttggtccccttccctaaaaacaacaatacaaacatagcagcactgtcaataagaatagacacaaaaaagacatagtgacaatggcatagtacctcgtttctcaaaaaaaaagaggcatagtactcacactgtcatttggagagttatgggagttcgtctcataaagcctatcatgatgggaattcatctcataaaacctatcatgcgcccatacgttatcatctttaggataccataacttttggccaccgaaatttttcctgaattatgatcattggatgcattaggcagcaaataaacgtgtccagatcaaactgaatattgttgaaactaatttatagaaaaagaaacacatgtcaagcgctgccattgccattgcccaggaaatgcacttaccaaccagttggtgaatgatgacaataactaacaaatgaaactaaacaccaatttatctgttcaaactctttagacaaaatacattggaatatgcatgctacaggcttccagctagacagtttgaaacaatatacccttttggcattttctatgcttattagccgcaccaaattatacgatcttcactctcatagtgaataattcagtcattccagtgcacataatacatatgaaactgtcggaattttgcacacaatggggttaattgattgataaaacaatcctgggtgaatagatgaggaatctaaagcacaggttgtggctataacctctattttcagtttgtcactcagaactatactaatgtccggataaacaacggaaaaatagaacattgagtcattgaatcaaggatgaagaagctagaacctttggctcccgtgcctgccattctccgggtcacggaaacggtcatcgtgcatgtagaaggcgcctatcgttggtacggcctgggcctcgccctccttgttcaccacctccgctccttccaccgcggcttccacctccgcctcctcaccgtcgcacttaccctcgtccccaagtgccgcgaccacgccatccgcttcctcgtcgccgtacctcccctcgtcctcaagcgcttcttcgtcggcgcacttcccctcgtcctcaagtgcctctcctcccccaacaccaccaccaccaccaccaccaccaccaccacctcccgcctccaactcatcgcgttcctcggacccctcctcctcgtcgtcgtacatctccgcggcgccctgcccgtcggagtcggagtaggagtcgaggtccgaccccgccacgctccacggcgccgatgaacccgacgcgccgccgccctcctcgtcgtcgctcgccgcggcgcgtcgcctcaccgccggtaggggcgcgtcgtcgaggtcgctctcgtactcctcctcatcctccacctcctcctccgcctcctccttctcggccatgggcgccgtcgatcgagatgccgcgggggcgaacaatcgggagaggacgctagggtttaagcttagggtttgggggaatctagaaggttcgagaggcttctcgggctcgcgttgctgttccgcctccgcgcattggctcgattaaccacctttttgctttccagctgattgatcagctcctttggggggaaaagagaaggggttggaaacttggaatcattagctacgccaatgacgccaaaaaccattggatcgttcaaatgctgggaagtcgagacgccgacaagtggggccaccggtccaatttcaggtggattttcatggtcccacatgtcatcgaattatccagtatatgctcttatagtagcgtgtttttcttttttgttcttttttttctgctgcttctcatgttttggcagtcttagagcaagcttaacggagtggtatagctaactactagctccaatttatttatagccaatctaatagttcattgatacaacagttatctataagtatatactacactattaatatatggtcccatctcttatacacatataatgtattgaatccgtgctacgaatatgtagcccgttttattctctcttttctcttctctccttcacacgtgcataattattgaaatccgtgctataaatatgtagcctgttttcattctctcttttctcttctctccttcacacgtgcttaccgttattgtattacagatggtttcaatcacctgcagactacagtactatcttgacatatgactcggcgtctcagccaagcaacggaatggtcactagtgtccatctaaaaaaaattgatcacggccatgaaggcgaatttcttgactcttgagcggtactggaagcgaggatctctcggaatgcaagggttcaatcattttatcctggagtaatcataccatgaacaattcagacttgatcgtacagagcgtcttaagccgctgatcagttgtgtgacatttcatctagtaatacttggatctaggatcatttgaaatgccagagcttgtaaatttcagccgctacaagtattggacaaaaaataataataataattcagtactactaacacagaacgccttccacgaacagcggcagagacaacagaattgttcctgtcagtatgtgtgtttctcttttttaaaaatgaaataattcggtgcagtgtcatgtctatttcctttcgatagttctcatttatgtttgttgagggaggaggatgctcatacagtaatcaagaaaattgatctaaataatttattattctagcagttcaagtagtgaacaagcctttcaccctgaattgagcaatgcaaccctgaaggcctgatacatgcaaatctatgaacttctctgtaaacccagaatataaactagtctatacacgaacactggttccatcctcctcactatattccccattgcccctaatcaacaaatacctgaaattaccatgatactccacaattcagaacatgcagagatcgaccaacaatccaaagcatctagcaagtactacttaatccatgcgactgaataaactgttactagctcgtggtactttctgaatcttcctcataccctttgatagtggagcatttcgtcctgcttgccttgcctgcccattgcccaagtgtctacacctataatttctaaacagctctacgcaagaaagagctccctatacttcgtcttctcccttatttctggatatctgcagcgcgtatcgacacgccgtgatggcgtccttgaccgtcaggaagacccactcatcccctaagatgtccctgacgtatccagacagcaccagcttctctgttacctctagcctcggattcgtcagagctatctgcaatgaccaaattaagcatgtgaaaaacagatcaaattctgcggttaagtttcagacttcagagtgagtgatgagctgtgatatcccctcgaggatatcccctcgtatacctttttcttctaaattcgatgcaaatagttatgaaaatttctaaaaaaaattgacaatatagagtacaatgatacctactagtccaccaaaattcaagttcaaattcgatttacacatcgagaaacaaaaaagacaaatttagatataaacagtacgctactattcatacgctgactttgtcttttttatatcttggcgtgtgagttgagtttggacttaagattttatggagttgtatatatgtgttatatgaatgttgtcaaatttttctagaatttttcataaccgtttagatggtttttaagcaaacgagagaacatctcctcaagggattagaatagtttcccgtgatagatagctaaccgtgatccctcttcgttcgaggctcttgtgtacttctagtagcatcccaactccagagttgtcgacagaagtgacacctgcaatgttcagacatatgccaagttagttatcacttatcagtggcctgaattctaggatgagagtcgctacgctgaaatggaagagggcgaagattcagacagtcataccaccaagatcaagaaccaagtattgcagatcgtgcccgacgctcttgcacaggttatcctcatcttccacccatctcaaaatcctgcaaggcagggtaagttaaattagcatccaatcgagagagaaaaaaaatgatcagcgatgatcttcagcgtcctgcattgctgtcacctttctcgcaggtaacccgcattgacgaagtagatgggagagccgagctgcaagacgaggatgccagggatgctcttcgcttgggggtattgcttcacgtcgcggaaggtctcgctccctgctatgttcccgagcttgcaggtggcaggcctggccacgtacagcaacgccctgacaactgacaagcctacctgcaaaaatgcacagccaaggggagcacatcagcatcgtgcagagaaatgtgctacggagtagtatctaatcaaggtttaagttggcgatgctcacggatgcgctgaggcctgcgaccatggtgaagaagacgacgccgaggaaggcgaccatgcagatgcagaagtcgaacttgtcgaccttgtagaggtggcagaactccttgaccttgacgagcccgatcatggcgacgacgatgatggaggagagcgccaccagcggggtgtacttgaagaggggtgccaggaacagcagcaccagcatgatgcacaccgacatcaccacgttcgacatcggcgtcttgcacccggcgtggaagttcaccgccgactttgagaacggccctgaaacaagcagcacatcgtcagacaaaatgttgcaaaatgtatcatggttctggttttctgaacaaaggtcgcagaggccaagatttatacctgtcgtgaggtagcaggaggtgaaagaaccggcgatgttcatgataccaaacgcgatcatctccttgttgccgtcgatctgctcgttcttgaccatcgccaagcttcggccgacggctattccttcctggagaagcatcgatggccgccgatcagaaactccggtgaattagagtgtaaagtttaagtgattgatgagggagtttgagtcaagatcatgttcgtactgccagtgctaggatcccagacaagagaccagctttcactgccgtcttcatgtgcctggactggaacgttagctgcgcaatggacaggggattgatccctttattcaggttaccgacctgtcccaagttaagcagcgttttagcgcatgttgtcaggaaaacagaaaaaaaaatattgatgtttctctgaagcttgaatcgtcttggcatggacgactgacttactatcggaattccatgctcgtcacccttgacaaggaaagcgaagatgcctccgatgacgacaaccatgaatggcgcaatggccgacacccagaacaactttggcagtttctttctctgaagttttggagaaacaaaacttatatgaatataaaacggtcattctataaagaagcagtagcttagcgtatgggtacagttgtttggctagattcatcagtctcctgattcccccacttaccaggtgcttactcgacatcaagaacaagaggaagcatatgccgagaactgcactctgccatttccactgcagagttaaaaaaaaacataaacaaaaggttcagttcagaatcttattcctgcaatttttccactctgaaatcatttacccgcgattacaaagaaaaaaaaaggaacatatgctagtgtgctacacgtctggtgtttctgaaaaatcgcaatggcatgtaccattcctcacatgacattgaccaaggtcaacatggcatgtaccagtattaccaatgtactggccatataatgctggtaaaaaaaatcttcagaaagctacgggctgtacaacagaaagagagtggattaacatgcgatatatcacttaataaatatataatttaaaattcaacttctacaagttaaaaaaataaattaaactacagctagttaacatatactaacaaaacatgtagaaattaaagtttaattgtggattgatctatcatatattaatgtatcttattaaatttataaaaaaatataattatttaagtgacatgtaaggcactatttagttctccaacaaaaactttttacactatcagatcgaatgtttcgacatatgcatggagtattaaatctctactattataaaaattaaagatgtttttgctggtattttgatacgtcatccgtgtatgagtcggtttttaagttcgtttgcttttgttaatacatatccttatttgagtcggtttttaaaatcgttcacttttgataatacataagaaattatataaaaattctgttttttttaaaaaaacttgcatgctaacttgagatgatcggactcctaactgcaactcatgattttataaaaatatatatatccaagtgaactctcacagtgaatttcatcttaactaaaccatataataataataagattaaaatagaattcacccgttgcaacgcacgggtattttttctagtataaaaaaaataattatacagattgcgtgcaaaatgtgatatgaatattttaagtctaattgctccatgatttgacaatatggtgctacagtaaacatttactaacgatggattaattaggcttaataacttcatctcgcagttttcaggcgaaatatgtaatttgttttgttattaatctatatttaatattttaaatgtgtgtccgtatatccaatatgacacgccaaaaaaagatactttaaatatatgtccgtatatccgatatgacacgccaaaactttttatctcgcaaactaaacaatgcctaaatagatgaaaaggacgacccttgagatagattttaaatagtttcccgtcaaaaacaatcccgagcatttcctcggtgcacgcaaccggtccagcgcacaaactgtaggcccaacaatgattggtcttttcttaaaaagacaagatccagcgacacccaaatagtattattgtttgtttgcacgtacgcatcatcgatgcaaaccttgttttgatctgaagttgttaacgactcgacacgaatccagccgatatactaatcgagaaagtcctagctgcaatccagtcgagattccttacgctagtcgcggttatttctcggagaagtttacaggagaggttacaacaacaccctcggaattcggaaatactcaactacttcgcagtttatccctctcgaaacgtgcggctgcatgctatttatagcggttacacatccaggacagcgaggaacaatcgccgttaaaattcttaagaaaaaactccaaaaatacgtccagaaaacacgggagaagtagaagtatggagaagcaaaagaacgacccaacttttctttatttcctcctactagtgaagtgaattgttttttgtttattttttttaaaaaaataggtcttagtgaagtcattactagtactaatcacggagagatttaaattacgtgatgaaattgaactggtaattcgcattgcacctcgtgccggtaatggtaggtggagtgcaggacggagatgatgtctgtcttggtggtgaagtgcttcatccccaggaggcccttgaactgctgcagtatgatgatcatcgccgtgccgcccatgaacccggtgatcgtcgaccgcgagaggaaatccactattagccctaaccttcacaggccaagtgtaacgtaatagtaataacaggttaattaaaaacgtcaggccgggttaacgagtgatgaattagtgaagagagatgatggaagtgcgattagtttggggtttgattttaattttttttatttttacctaaagacgcctagcgcggtctggaagaggccggtgaagaaggcggcggtgtagaagagctgcaggtacagctgcgggttctcgtccgccgccacctccgtctcgatgatggacgccagcagcagcgacgccgccgccaccgtccccaccgccaggttgttggagctcccgaacaccgcgtacatcaacggcggcacgaagctcgaatctggcaaccccaaaaaaaaaaaccaattaattcatcgggtgtgcgtgcgcatacagaaacgcattagtaataaatccgagcgcgcagtacacgtacagaggccgatgattggagggaggttggcgaggcgggcgtagctgatgccctgcgggatggcgaggctggcgatggtgatgccggcgaggaggtcgaacttgaacttgtcgaggccgtagcgcgggacccagtccagcgccgggacgaagtacttgaccgcgcaccacgcgcgcctggccgggggcagcgcgccgaacccgcggaacgggtcgtcggggaagaacgtctccgcgaggtccgaccacagcttctccgcgaacgggcggcgcccggacaggttcacctccgccgccgaggcgcctcccacgccgtgcaggtggcgcgacgacgcggacgacccgcggccgggccggtggttgcggccgtcgacgtcgccggcctccgtccccatgtggatgggtggggtacgcgatcggtctctcgatccgccggggccggggccgagatctggctgctactgccacacacacacacacacacagacacacacagagacgacgatgatggagaggagcggagcggaggaagggaaccgccaaccgcgcgcgcgcgatcgagtcgagagcgttttgctctgatcgactcggtgactgctatttcattggctcctaattatggctttgcatgcagacagagagagagtgcagagcgagcagtggctacagtagtgtgagggttaattaagtattacgcgcgagcaccgaatggcggtggctgtgcgtacatgtcgcgcgttcgcgattacgtgcagcgtgtgctcagaagcggggcgcatggcgcggtttatataggcgatcaacaaggagaggctacgggccattctaaattacgttttggattggctcatttcttgatttttgttagcatattttaaactgctaaacattatattatattttgtacgaaaacttttctatatataatttattttagaaaaactaaagaaatctattttcatattttttttaattataaatattcaattactcatatcctaaggcaccgttcgatctccttggtgagagaaaaattttcaacgcacttaaaacgagaaggctcattagcatataattaattaaatattaattattataaaaattaaaatagatttatttaaatatttttaaataacttttatatagaattttttttaaaagtaccattttactgtttggaaaacatactaatagaaaacgagaaagttgtagtttgggcctaagcattcgtttgtttgcataggaattgaactttcaagaggcacggaaactggagcaagcaattaacacataattaattaattattaattattataaacttgaaaattaggttcatttgaatttttaaaggagcttttacataatatttttttaaaaaaacatggtttaacagtttggaaacgtgctaatgaaaaacacgtaggaagtaggagtttagatctgagcctaattacgtttatagttcgtttcacgtacggctaatcatccaaagtaacccataaaagggatgtaggcttatggacgcgtggtaggaaggaattaaattaatcgatcatcgggaagatgacgatgacttaattatatcgacatgtaaaagcttttacgcgttaggcgaaagaaaatgacgacggtggcgacgtggggacgtacgggcccgggccggcccggcaggggcgcgcgcggctgcgagtagttcggtggttctctcgatcgatccatatacaatgcacgtaagatgaacggtggcatgtgacacaattccgtgcggttgtacaagtttccgcgccgcttcgatcaggatcaaatgcatatcgtttttatcatgcatgcttgctgcttactcccaccttttcaaaatatttgacaccgttaactttttagtatgtgtttgatcattcgtcttatttaaaaattttaagtaattatttattcttttcatatcatttgattcattgttaaatatacttttatgtgcacatatagttttacatatttcacaaatttttttaataagacgaacggtcaaacatgtatttaaaaagtcaacggtgttaaacattttgaaacggagggagtatttagttagacagagcccaggaggccagaaatacggaagaccaaatcattctgtcgctagcgagatagagttgaactctccgatcgagctctgaagataaatccgccccgtttctttccatttcttcttcttcttttctccctttgcatgcatgcatggttgcatgtagtgagctagatgcagatgtggatatgcccggccggttgcaattatccgtcgagggttaattaattgtccatgtatatataggtgccgttgtatatgtagtgtattcgaagataagctatgggaatgatttttgtcacatgcatcaaatttatacgcatagacttctcaccaaaaaaagaaaaagtacttccaaaatataccgtctatctatctactctctcgttccctaaatgtttgacgccgttgatttttttaaacatgtttgaccatttatcttattaaaaaaacttttgtgaaataagtaaaactatatgtatacataaaagtatatttaacaatgaatcaaatgatagaaaaaaaaattaataattacttaaattttttgaataagatgaacggtcaaatatatttaaaaaagtcaacggtgtcaaatattttgggatggagggagtataaggtaagagattctctacaataatatcgttgcacgcggtgatatatggttgttaataattattgcatgggcggtattgcggatgatatatggctgttaataattatcgttgattatgtggatataggatcatatatcatgctgagagtttgtgataaaaatgggtgaatttcgttttgcccttcaatacggtctttgaagttttgctctaggtcagtttagtttctaagatttcaaatcaaccaagcaagttctcaaaattaatcatatgacttaatataatccttaacccatcaaaagtgccacataagcgtgccacgtcatcctcgcatgaatggcatggttttggaatgatcattctaatctaccctacatatgtactccctctattctaaaatataaacattttcagcataatgacaagtcaaatatttttaactttgacaattaatagtaaaaagaaaataaaaaagattaattatgcaaaattgatggtactagatttattattaaacaaactatcatattatgtaatatttttatttaaaacatcttatttttatagatattgttgattaaagtagtatatcggagaccgtgtcagagtctaaaaatacttatattttgggacggatagagcactacgttagaaagaaaatgaaaaaataaaaaggaaaaagaaacaacataaataaggctggcctattattaccctatcgggttattttctctgtttaaacctcgatagggtttgggcgccgacgaacagcgcgcggctgcgtcgttgcagcgttgcacggtgattgctccagttcagctgcactgccgcgacatggggcaacaccaacgtaccattccaataaacgttgccaatttctcctgtggtttgttttcttttctttcttttttatatggtagataaggtcagaatggtcatttcatccttactgatgcatacgaggatgacgtgacacacttacgtagtattattggtgggtccaaggaccatgttaagccaaacaattaatttcgaggatttatttgaacatttgaaaccttatggactaaaatattgcaattggttattcacccataaaaaatccacttggtaataacatgtattctttaattttattttatccaaacaacactatcaaaatttcagaattaataaatatgacgttgtatctactctcaaattagtattttattaatttaatttcgaatttcaaaattaataattaatcatatgtaagtctgtaactgacatgtctgaaatattattagaatgttaatgtttataacttataataataataataataataataataataataataataataataataataataataataataataataataataatagattattgactagtcattttaacaggttttataaatacttaaaaaataattgctggtctgaatcacaatattgtccaatggatattttacagtagagcaggtacaatagtagtctataagccaactataaatatattttaaagagataaaagaaaagagagaagagcagcgggctatagatttatagccagttgcagtacgaattccaagacataatgtgtgtatgacaagtggaactagatattaatagtatagtaagcaactattgtatgaattaactgttatattggctatagatgatttggagttcatagttgcctataatattaaacttgctcgtagtgcaactgtccaataaattggcaggcgctaaatcgaagaggaggaagttttcaacggagaaactcagaaattagtacttgcccgcgcatctgcaaaaggtggcatcaaatgtgatcacatcgatcgtccttttgactccttttggaaatgcgagcaaatagggacacaacaattttgaaacatgcttggttgagttagctagctaagcttacctcagtcaagattagctagagcattgctttaatgttgatgataagttgcccccaaccaatcatcatcaatcaagtataagaaagctttgattttgtacgctaatatctccatcgtcacaagtgagcagtcgtactagccaacttcctgttatactaacaaaaaccaccgccgccgacgagcaccagtctatgtgccgtgctgtgttgaacacgcgactacgcgagtagaaccaagtgagtcgccgtcggcagctgagagtcgtcgatcacaccgtacacctccaatcagttcttcatttatgcaatgatctgatctctgcgaccggataaaacaatgatttcgagtgatgctttccagaagcacctgtatgatcacctaacaatctgaaactctccaggaactgcacttgttcattggacggatcggaactgatcatggcctacctgccgggagggattcactgttctactacttattacagctgaatcaactgatgatgactcctatttagatccgggggaaaaaagaagtcaggccaaatgggatgttcaacagaagatcaatttactgaagataatctaatttctgcagaaataagaaatactcaagttcaggctttttggaacgcaaaattttcaaaacacaaggataagaaaataacagaattagagtgcactgatatatcaaattctatggatgaaaaaaatcaagaaaaaaaactatagtaatgactatttgaatgaagcacgaaaaacatggaaatgaggcagacatgaaattttcccaggagattaaacctcgtgttgaaaatcctctagaagttctatgactttaggcaatcctaaagaatttgagagccttccattgttccaaataccaccatataagattttgtttcccattgaaaatcaatccctcaaaatttctcaaaaatttcattgttcaaaaggagctcttactcctaacggttaggatcaattttagccaaaaccatgtcacgaaagcacaactccaccatccggatataaggccatatgatcgagtgcaataaaatgatgtaagcggactatacaagttgtcacatcatatttgtgttttgtggaggggacagagaggagagagaataaaaagtgggctacatatttgtaactaattatagcacgagctccaataaaatatataagagatggatggattaggtattaatgatgcaatatatatctacaactaactattgtattagtgggctattaggttggctatagatgatcttgtggtttttagagttagaagttggttatatttttaaacttgctctaaggtctcctttggaacaaagtatttttttttatgttttggccttttttgtttttacttttaaaagcaaactctttcaaaacttatttctaaatccaaacctatttttcctgtgtcaccctgcctgatgtgacaaaacaacactgccgcgtcattagtctggctggtgtgaccaaataacattgtgagagctttgtttcgtcacgcaatctgactgttatggctaaaagttcatatttggaaataagttttgagagaattttttgaaaacaaaaaatttaaaaggtaaaacatatattttaaaaaacaataaaatctattgaaaaattttcctacatagtcctttgggacaaagaaatggctttcccaaaatcctttgcaattcttatgtaagtacttattttaggggcaaagcccaacgaggcttagaattgaagacccattggggtgtacaatattccaccatataatttttttaaggcaagaagattgccttatatattgatagagtaagtaagcaaagttatatacaagtcataggagttatggttgtcccagaccagtcagaacactctattctcacaaagggtacatctcacttaggtttttcgcccccgcaactgcccattggcgagcttcctcctttattctcgaggatgagggatgggtgccggccaattttctgaagatacacgagttccattctttccataattcctaggagaccaaaatgactgtcgacttgagctgttcttgcgaagtgttcggagctgcggtgattactatccaccatataattaccaatatcatgcaaggtccaagtctctctatcgactgcccgagactagggccaaccccgactcatttcatatgaactttagaggaagaccagcatgaggctagacctcatgttttctttctcatgattcagttcatttgttttttctataatgctaccttaatgttatcacaaaaagatcaggataggatactatgtgcagtggtgctatactcttgaaatcggtaaacaaggatcttttattctattttgaatgatgcatacgtaatacctaccggatatgacatgctaaaatttatgtgattttagaacttcttttagttaaacttggttaaagggaattagggtttgtcccatcaccatactaaaatttatcggttgtgtgccttaagaatgaagatgtaaaacatttttattatagaaaaataaataataccttttataaaatctgttgtgccctgatatcctatttcataagttttattatttttgtgtgattcttgtgtttttagaatcatgcgttcaagcgaccggtctctattaccatgttgtctaacagaacgtaatcacgtttgcaaattgcaacacatgagacgccaccatgcatcgtggctcgtggggaagccatgaaaattaacatgtgctgtagcagtgataactgtgataatagtgtaataaccgtacggttttgtaaatcccgagctagagctccacaacagctagctctgcaggctgcagctgccagctggtgaacagtgatatcctctaaagaaacggtaacgcacgtcctcttctggggaagtagagttcagaggcaggcttaccccgtgcgcgcaaaaccagcgcagcgccgttacgacatcatggactggtttgatttaagatctaaattagttttaccaatatttgttaattttaatagtgtttagtgtctatttggtttgaagccaaattttggcatgcctaagaaaataggccatttcagtagtgaacttaggctattttggtttcaatccaaacacaactttgcattaccaaaattagtcatgccaaaacttaccaaaatttgacattgataaaatttagtaaggtctatttagggcacaaacgaaaccaacctcatatgtccataacaatggtaacacgcatacatctccatcaaaaatcgcttctgccgagcggtggtcgaccaaaagattttaatgcagatcatgcaacaaccttttctacagtctcttttatgtggcgttcatttggttggctagctagcatcagcctgtagagtgtagacgggaacaactaacgacagaataaatgagcctgtttaacaaccatagtacacccctgatcacggaaaaatcatttttaaggatgaatattgatatacttgtcctaattaatccttagaaaataatttttaacaaaggaagtacttcctctgtactcgtaaataaaatcgtttaggacaatgtttaagtcaaaccttgggaatataaattatgaataactctcgagttgttgagtttaaaaatataaaaattatatgaatagatttgtcttgaaaaatactttcataaaaatatacatatatcacatttcaataaatatttttatataaataagaagtcaaagttgtgttttggataccgtgtcgctgtcctaaacgacttattttatgagtacggagggagtagaagtactcattaaacatgacactatctatgacagaataacttaattaagggaaattgatttcattcctcgagaggagatatcccttcgtttcgtgcatgccatctaaatagtcctaaaaaaaatttaaaaaaattggcaatagattaatatgaaatatatcactccacaaatatacaagtttaaattcaacttatacaagttgtaacaaaaataacaaatataattacgaatgtacaataactattttcagtttaatttatttattttttgcaactggtagaagttgaatttggttttgcatgtttgtggagtgatatatttcatattaattaatctatgatattatttttttaataactatttagatgaaaatccacttcccttaattaagtacgcacagaagcgtccctgtatgacagggtactaacagagtagtacgaatagagggtactggccattctggtttatttgatttggatgagaacacattacatttgatgaggtgtctctgtagtctacacacctatccgcaacacaggcaagaggacattggagaatttgtgattcggtcttcagagcaactgtgggctcagcttttagtgatttcagcaaacaagcatgacatgcatcagtgttgtcatgcggagctcatatacgatgaatcctggatatggtggaacccagtcgtgattgagagcaaccgtgcttcaccaaagtacccatgaggccatgacaagcatattttgtggcattttctgctcgacttcttttgagcagtagaaaaaataaaatgtattgcatttcagagttatgtttcatctaaacaaacatgttctcgccgttttcgttacagtgcgtctatcttggcatcttgcactatctaaaagtaagcaagtatagcatgcagcatctcctgaataatcatgatggcttcacgacctaaacctgaataatctgacctctcgtatcacctaaagccattggattggttattattgggggatgcagtttctcccgatgaagaaaagcttggcgatccagaagaaaaggattgttcacttcctccttccatgtcctctcatgccaagtagagccatatggttctgttagcaactttttgtgacaagttgacaacgacgatcgcagcaccttaagccttgcggtgatcctagagtcgccaaccacctcgatctagcgaaaagctaaacctagatgggttttgataactaaactggctagcagagccgatttctagataactacctgtctcgtaggcaaaatggaaggttttcaggacaaacctacaaagaggtgtcgcactctcgcagcggcggcggacggtttacggcgcaaaccgacaaagatggataaactaagagaaaactaaaagcaatatgaaaaaacgattcgattgattgactgtagattgtttttttacaatgaaccggccatgtcccttatataggggttggtcttgccctctacaggccctcctccacgtccaactcggggtagaaactaaaggaaacccgaaacatgccttcccgagcaaggaaacctcgaaacccgacgaaacacagtcggattcagacctgccggtcagaccggcaacacactgccggtctgaccggccctcaaccggcggtctgaccgcccaacacacggcggtcagaccggcctactcggaggaaaccggcagacttccaaattttggcaatcttttctattttaatcctagatgctaaatttgggtgtaaagaggttcttgccaaatggttgcttttccatgccatgtaatcaagatgtaaacttgtcatgcaaatgcagtactgctggcaccacaactcattagatcaatagagaaatgttgacgaggctcacttacttcttcaaaaagtaataacgtaacgtaatgaaattaacaaacaaatgcatgttcaagtttgaatcatgttattctgtagcttttgtcttgtgggggtagtttgcgcttcttctgaaacatccggtgttgacaaattggagatagggcaggaaagtattgttttctcggcctatcctaagagtgagatgagctagaaaagtaaaatcccatatgttgtatggtactgatatccatgatctcgtgttcgattacaagattgggatggcttatagcctccggatatacaagtgaggttacagtcctacccctaacagtgtctagtaagttactacaatacccatgtaaagctagaaactctaaaggtgtggttgtacacttgaaggagtgtagttgaattggtccccgcagtatctttttggaaatacttctcgctaaacaacataacctttaggctttaccagccttggtcgaatggtattttcctcttatggtaagttagaataatccttttcagaccgaccggtctattagtatttatctgtcgcattatcaaaaagtatttgtcacgagtaaaaacctctctggcaaatgagtgagagtgttttggttgaattggaagtggtgtttacctcctgctgcaacatccggtaaaaatgcctacctgacatgcacatatatatggatgtaagtattatatctttcacgattcttgaggagttactgaggtgaatgattaggagttgtgaattcatttgacaaaattaaccaacaagcactcaaacatattcactggaatattactaacagcaccacttttttctttttttttgtttgtgtttgtttagatttatttttgctatcttgaactttttgtatgagttttcttctgtgtgagttctgtaataattggttgtaactctttgagtaaaggccaaaatgttatattctattatcttaaaaaaaaactaacagcactaccaacattattcaatgatctcaggcaattccccgttatgcggttccctcggctatacaacaataaaatttgtcaatttccaacacatttgggagaagataacatatgttaatgtccccctcaacgcataatggagctcagaatctccctcttttactttcaccaaagcatgttaacctcttgctagtagttaattagtagtccactaacatacacccacgcatatggtccatgcgtttcttctcctcctagctttctaaccacccctgtcgatcaatagggaggaagtctcaaacacgcgcatatatggatggatccgtcatctccttcaacaggataaccgaaccaataatgcgagcaaaagagagcctgcagtgctgcactttcttcgaatccgagtcactcgtctcgctgaaaacatcacgcacgagagctcgcgctagcccccacacgccgaagagggtcgtggaaaattttccccagcatccgttcgtggaatgtagtcactagccaccggcgaatgatacctccctcggatgaatcaaattaagctggtagtaggagtaacgaacacaccatatggcttgataccaagcctctgcatgagtgcagtctctgtggctggctgctctgctcggtcatgcatgacggcattttgactatactttgagcaggcagaaagttattagcaactgtatagttgattgatgattcgctgctttttatcccacttctgggatgacctgcagaattgccgaagcagtaggaaacggcacctgagctgaactgatttgtccttgtagtatctttctggatgactatttgcaggggtgtaggattgatgcatttttcacatttttgatctttttagaaaatttattcttcaaataggcctttaagaaaacttattatagaattaatattttacgacgccaatattattggcgccgtggtccaacatgacagcgccaataatattggcgccatccccctaaccccttggtggaaggtaagtcactaatatgaagagggatgatgttggcgcttaggaccaatttgtttttttaaatgaaatacccatagtacaaatatttacaaatagatcctcaacacaacaatattggtgtcgtccccttcacattagtgacttggctttcaccggagggcgaaggggacggcgccaacgtcattggcgctgttatgttggataactgtgtcaatgacgttggtgtcacggaactggtccatttctagaataagtttttctataaactatttatagaataagttattcaaaaggactaaggtgaaaaatccagtgtgtgggattgtgggaagcatggaccgaacgatctagaagtttattttttaaaaaaattcaggacgtgaattcggtcggtcagtctatttccagaagtcccattatattaattctgcttctgtgcggttattaaaaaagcgtgcaccagaagtctaaagcccgtaaagtgaattttgttacaccaaaactcattacgaattcttgttctgatgctaacatctaagctttggagccttgactaatgctagtatcaggctttcagcactacagtggtcaacgtatgcacaaataaggctggaaccgacattactaaaacaccatttttcacaggcacctctttttttttttggcgaaaaagaaaactatatgtgaaaatgtataggctcttcaggctcgtatgtaaaaacaaaactaaacaggtaggtctattaagagctcgtcctgtgaaaatcaagattctcgtagctagggccttatgctattttacaagcagatctctaaagaccgcgtggagtgttgtcatctcccaatcatatctgctcatcaccactctagtacatgtggctacggaaaaggcagattcatccacgacatccaagagagaggcggatctgccgccagtagcctcgggatcggtcggtttggggcttcattgaccatcgggtgcggtgatgatttttcgtgcattttctagaacttttttgttggggagctatcatttttggaattcttgtgaactttttttagcttttttcccccaaaaaacttttgtagtcggatgtcctaacgctctcacctaaaaaattaatttttatgtgtcattgtggtgcatgtgaaaatttcgattttacatacatccagttacaagcgggcaccccacctccctatgaacgcttttgaccgaatgagaaaacgtttatcgtagtgagatgagagaaattgtgactgtcaatcttttcggaaagaaaaataaatgggggatcatcagaccatgcataaacaatttgatatatgatcagacgtacatacaaaatggcaacggatcaaacaggctgatataacacgctgctgctgctcgaggtggtatagaacggcaacttgtggctggattaggtcagtcagacaagaaaacacagctgttacccacatttttatgattcgagaaaagctcggatgttcttaaaataattacagtgagaccagtctctatttaatactctactcaaattgtgacacgtaagcctaacggctaactaaaaaagcttaattttaggataggttaacgctttgaacagagtctaaacttaaacatagaatagagtgctatcataggattattttcaaccataagagatgtatggtgaaccaacctcctatatatatttcatttaaaaaaaactcctatatacacgatgatgacgaaggccaaagctccgaacgcagaatcaaatgcaaaaatgaaaaccacatcctgtaggctgtagtagccaataggaaacacaaggacgatgatcaatcaatccaaggctaagggcagttcaaattgatgttattttcatctatactatttttttaaagtaaagttataaaaaaatgttaacatttagtttattgtcaaactttgataaatacataaaaaatcttatcaaaattttaataatatttttaacttgctaaatgtttattttggctataatctgaatagccccaaatcttcgtttcgattaagtattcaaatgatgaacggaaggatctcgccacaattatgagaaaggccgaaatctacggagggatggataacacagcctgaaagcaacatgggccctcctcacttgtgtgggcctaattgaagggaatcttctactcattgcattttgtcggcctaaaatggccttctgttgaatctgccaaaccttctattttctcttctttttttcacggtggataatctgatggagaaaacatgaagaaacagctagtcatttcagcctcacttgctcctttgcagcgcaattctggccggcaattgacattgatccagacatcaacgatgtcagaaacttggagagcatagcacggccagggccagcgagcctacctacggcgcaccactgctcgttcttcctcctgtgcttctagggctttggaaccacatgcacgcggggtggttttcttttctttctttttttttttagcgaacgccggggtggtttcccgaaatgagcatccatgtgtacaacgcctacttcgacttggctgtgtttagttgctgaaattggggagaaatttagtgaaagttagtagtttggaaaaaattagaagtttatgtgagtaggaaaattttgaatgtgatgtgatgtgatggaaagttggaagtttggtgtgaactaaatagagccattgcttgggagatgcaaatccctcataaagatatgttgtcacggcttggaaacaagacttctcccatcccctcaactagatcacactgtaaatgtaaaacgctgaaaacactttgtattctttatcaaagaaaaattcagatgaggaaactctcccctctagtgatttaaaagaaaaaagggcttgtttagttcacgaaaatgtcacatcgaatgtttgacaggatgtcggaagggcttccgaacacgaatgaaaaaaaactaatttcataacttgtctagaaaccacgagacgaatcttttgagcctaattaatcagtcattagcacatgtggattactgtagcacttatggctaatcatagactaattaggctcaaaagattcgtctcacgattttctccctaattgtgcaattagtttttggctgccttagtttttttatctatatttaatgctccatgcatgtgtccaaagattcgatgtgatgtttttgagaaaaaaaatttgggaactgaaccagacctaaaattaaaatgaagagaactccaacattctaatgggcccttaaaggctagacagcgaccatttgagcccaaacatggaatcatctgaggcgttaactctactcgatagcggatcattctaaggaccgatcgaggcgtcgtcacctgtcctcatcaccgtcaatttgtcggctgccctctgccgtgccgccctctcgcagaggcagagagaccaccggttgatgtcacgccgtacaccaccatcccggtgcccgatccccctcgcgccacgcaattcagaacagccacatcattatgcttctctcgattggctaacggcgaatcaaagacgtacataccccctattgatgatacacaaataattggccatgacctgtgcatcacaatatttcgcgttctaccagtagtttcctgtagagcaatcatcagcgcgtgaaatattcatggaagagcttatcaagtacggctggatgattgatgttcgagtcaaacacgccggattatagaacgaccaaatgtcctagttatcaccttgagtgttcgccatagccattagctcgtctacacgtcccccgccctgccggacacgtcgatggcccaaccccaaacggggacttggggttgggggaaggccccccccccccccccctccccgagcgacagtctcgaccggtcccatccgtgcctatccgcctcggtgatggtcagcacgcgtgcattattactaagcttatcgcatcgcgttacacggcacggcacgggcgagatgcaagcagcgcaggacgtgggcggtggagtcccggggatacgtgtagcgtcgtggcggagactctgattccgccaaatccggccgagatttggatgaacaatggcagtatatatacacggcgacgtgtacgacagccgtaggccattcccaaccctatatatagttttcataaattctacatcatactagacactacttttttcaatacaaacatcactatacatatttaaatttaatgttagttcaaacatcactatacatacttaaatttaatgttagttatctcacgtaatatcttggatgcagtggcggaggaaaaaaaaagagatatgtctcatggacacatactaatcgcactatactgtacgtcacaacattgtatcaatattcagcaaggcaataatcaattgaatcagggagaggatagatatgcatagaatctgaaaaaagaagagcaaggattgattagggacgattgaatcgggaggaaggccacttgcttcagcttaccttgctgctgctgcttgccttccgcctcccacatcgctcctgctgcctgctggctcgccgcctgccacgcgcgtgtccctgccgcgtagccgcgccgctgcacaccagctctcgtgcccagtcgccgcttgttgatctcatgcggggagctggatgcggatgcctcccgcagttccaagcggccgcgccgtcgtcgcctcatcgtccgccgcggcggcggagatatggggaatttctgggctagggttaagtctagtgaatcacccacatatgcccacattaacacaaaacgagcccaatgggcctacgattcagtggagagtggcccagcagcgagtgctctgtctttgcccatcgcctgacgccgcacttcgcctctgcgcctgactgccgtcagcggcctgccggagttggaggttgggggtgttggtacgagcgggcggcgcgaggtatggcctcgccataccgagtcctccgtcactgcttggatgttgtgtaaaaactatgtcttatataagacatgtttttttctcttttctcatttatttacttgtcacattattttttatactagatggcagtctatttaatattccctccgttttgaaatgtttgacgccgttgactttttagcacatgtttgaccgttcgtcttattcaaaaaatttaagtaattattaattattttcctatcatttgatttattgttaaatatatttttatgtaggcatataattttacatatttcacaaaagtttttgaataagacgaacggtcaaacatgttctaaaaagttaacagtgacaaacatttcaaaacaaagggagtattatagacaacatattagttattgggttggaaatggccttacaataaagcgaatcctcatccctgttccgtaggagtaggccggatgcgcaacaggctgttgccaatgggagcaggataaggccgagattaacctcatccgcggcccactaggcgacgtccacgtcacccgaatcctctggaaaccgcgtccccctctcccccgccgtttaaataccctcctccttaagcttcctcttccgaagccactcgccactgcaaagcgctctctctctctctctctctctcgcatcgcgcgcagccttcctcatccccgtcctgatccactccacctccctaatccacagcgcgcgccagaggaaatccggcgccggtcgaggcggccgcgccgcgccgccgtcacgcccagcccactcgattcggtcgcgtgtgcgctaggaagttcgtcatacgcctcgcggttttcacttcgtgtgtttttcttttaaatttttacctgtgcttcgtttaaagcctctcttgatcttaggtatagctttgctcgatctgattataggtatgttgtatgtttctggtctcccgtgattgcgcgtggattgtgattatgactaatttgcttgatctgaatatctgattgtggtggtggtgtgtgtgtgtgtgtgtctgatttgtctgatctgttgtggattattattgtatgatttaccgtggttttatgttgtttatatataagcgtttgccatgagtctgattaattgtattgttgcggtttttcctaggtgtcatactgtcatgctcgatttttacaaggtttagtgcaaactgatagatgatgtccatccccaaaactccgtctaccagtattggttcatgtgcgagcacacgggatagttcgagttcctgtttgatattgattcgctggcgctggttgtttggttggtttattagctagagttgtttgtgtgcaaaggtgggatcatggttgcaaaggcatattgatgaatgacgattcataagcgtggaaagcaatctctgtgcaaggggttattaggattctttgtgcgtattcactctaaaccgatagtcttgtattgctatcagcaccacgttatctatttcctaaccaatgttttctgcatatggactctgcattttgcttcctctccttgtaccacacccagtaccctatgtttgtgcctctcccatggtccatctctcctgttaaaaaaataaaaataaaaataatagaatagaaaaattctagaccaaatacagggaagaaaataaattttgtcaggcaagagagcgacgaggcgatggggaacttattacttttctggacaaatccttcaatttgcctcatctatatcaatggaattgggaaagcagtggactacttaccatgtattggctactaatttccaccactccttgccagagaattgggaaagtgaattctcttatgcaggttctgtcagagtattgtaccagtcattgagatgactgtattcagtagagaagttttgtagataggttaaatttcaggtacaaaccaatgaagtaaaaaagtcttagtatgatggatgtgagaggctcaagaagttccctgattggagaagcaaaggaataagttttttatatggatgtgctatggattttaattaaaagaatggagaagtttcttttgttgaagatgaagctgttggcagctggaggtaggctcccttatgatctaacgtcctaagtaacgacgtatctgattggtgtaagctaataaccaaagccttatcatgaaaccgtcacgcttgtttttttcttttttctttttcttcttgtttcctggcatttgatgctgttacgtgttcctcttgccagagaatgggggtggacaccacagtaagtttgatgcagatggacactgttcgaattgcttgggaactcttccatggaatctggatggataccttattgagtagtaaatttcttaatacagctcgctatccagatagtgctagctgtgattgtttggtgatcaatctattgggattgtgccgactggagctgttcgacattgctttggtcttttgttgatttgcctggagttcggcagtatacagcaaccctggagtgcatgcagtggtttcctcattttttaggacctgactgcattctgtagtgagaactatcctgctaaatgcataatacttgcaggtgttttctgttgtattggcaacgtgatagtttttgtggtgcaaaacattcaagatgggcgccatggacgtacaacttgagtctactgctgttcaacatggacaagctaagataaatgtggaggaacatgctctagtttctctgttgtctgatgagaagtacgcaactgaaaagaccgaagatgtggaccctgatgattatgagaaacttgaggaagggataatgcagtatgggtatgttttttttttttgttctctggttaggcgttcttgataagctccttaagtgccaacaagtttgtgcttaatgtactatgtcaggtgtgcacattatcgaagaaggtgccgcattcgagctccatgttgcaacgagatttttgattgtcggcattgccacaatgaaacaaaggtatggttttcgagttgatgtggaagtgcaatagttaaaaagtatgtactcttttatccatactttcctaggtggttttgatgtaggaatagtcagttactcacaaaggctttgattaactgctgttcatattaatgcatatgtttgaagagcactagtgagtataaaacgtttcctttaaaaaaatcaaatagtgagcataaaatggtttaaaaaaacctaacaatgttctgatcattaactcattttatagctggatatgatttagaaatcagataaatggtatggttgtgacataaaatgaagacacagaatagaactactaaactgctgccagccgtccattatgactttggattatcatccatctgtaacagttgaaatctgttgtattttccattcttacattgaaacagtaatttgatgtatttgcttatgggctgttacatgtacacgacttatttgtattgtaccagcaatttgttggcaactataatatatccttttgttcttttcctggtgaaatatctgaatcgtcactgttttggtttatactgcatacttggaccttccttgggcagttcccaagctgaactatacaagtatctattctttatcatggtattaactgttggtttaaaaatgtggaaagttgttgacatccaaactgttttgacagaattcaattaaaattgatgctgtgaagaggcatgaactcccacgccatgaagtgcagcaggttatatgctcgttgtgtggcacggaacaagaggtacagctgagctatccttgttgcttgcattgtaacattattaattatctggcatctagtgtaatcacgataactcttttatgttaccaggtacggcaagtatgtatcagttgtggtgtatgcatggggaagtacttctgtgaagtgtgcaagctctttgatgatgatgttagtaagaagaataactattttgattgccttgtctatttgtaataagtagataggaaagcataatgacacttctttctacaatgtcaggtttcaaaacagcaatatcattgcaatggttgtggaatatgcaggtttgcatctcttttttgttgtgcaatcaatatgaactggaaaatatacttacattcgactatgtttgcagaattggtggcaaggagaatttctttcactgctcaaaatgcggtaatgcctcttgtctccaacgttgcattccgaagtactataatttaacatagcgccatttaaggaataaggattcttttagtccctgaactcttaattgatgggaaaaggatactgattgatataatgagagatcttgtttatgctacttttcccgatagagatatatgcatcatgcatgggttgtatggacttctgctatgataagattgcagttttttttcccaaaattttctctgttatacactgtatattactagatgaatatcctctacctttctggaagtctactaagatcttgcatcgttaacgttgactatttaaccctgttagctgaactagttcaaaccctcacttgaattttatgacttgatttctattatttatatgcatatgaatgaattttgctagtcacttctcttgatttgtgttcacctttgttatctgtttcatgcaggatgctgttattctatagtattgaagaacagtcatgcatgtgttgaaggagcgatgcatcatgactgtccaatctgctttgaggtaggcattcactgttcttttatgaatggttatatgcagcatactgtggattatattgttgatgagtgacttatcaccttgttttcaagttgtttcttgagtgctgatcttgttacacatatttcagtacctttttgaatcaaccaatgatgtttccgtcttgccctgtggtcataccattcatgtcaagtgcttgcgagaaatggaggagcactgccagtaagtcaatccttcttggccctttgttactatttgtaatgatattatgagtggttgattttgacagcttaaaattgatgctcagatttgcttgcccgctttgctctaaatctgtctgcgacatgtcgaaggcatgggagagattggacgaggaactagcaacgatatctgacacctgtgacaataaaatggtaatgctctcttctctgctcttctgttgtcagtaggaactaag

SEQ ID NO: 5539 - DNA, 23988 bp, Oryza sativa
ttagaatccccttttcgagaaagaacattcatctcatgtgttttcaattttatataaagtgaatccaaagtcaaagtagacatgtcaacagactcctgaatagatataactttcatatcccaaatagacatatcaagaccatttaaaaagtgacgagaaatctcagattgtggataattagcatcataagaagaattaacagatctaagattactcaaaattttattaaacctaaaagatagtcatccaacgcttctccaggtttcatctcaaatttaatatactcctttttgaaaatatcacgacgaagttctttaatgttatttgttccttgataaaagttactcaaagcattccaaatttcatgagcagttcgaaagtgcgcaacacgatcataatccgaacgagaaataccactcaaaagaatgttgcgagctttgcaattttgctcaaaagcagttttttcagcggcagtattaatagcttcaggaatcacataaggataagaaacttttctccaaatatcataatcttcagtcataatataagattgcatcctactacaccaatgagaaaaatccgttccgtcgaaaacatgaggcttagttgaaaacctagcaggagtagccatggcaaaaactttagatcgataaaaatccaaagaagaaaacaagtctctgataccacttgtaggatcgaatcaccagaactaagccaaccagagggggtgaatggttggtatacccaaaaaccgaaaacttttagcggaaataaaagttaccctctaaatcgacggagatcggtctgaccgcagttgccttgccggtctgaccgctcagatgccgccggtctgaccggtatagatcaaccggtctgaccgccaaagtcgttcgccgtgcctatcgccgccgtcggtcggaccgcccgaatgccgccggtctgaccgccggtagatcgccggttagaccgccgaaacccggtaaacacaaatcgaagaactcttaaagtagatgacgactttattgattctctctgtgtttacaaagtgcaccaacagcactccttacaaaaatttcgactaaacttgaaaccctaactcaaaactcaactcaattgctctctaaagcgataccgggaagcctcacgctccccctctatttatacatgaggtaggcagcctaaagccacgaaccaaactcatattaggagtcctaaacaccttaggaaaccctctagtacaagaaagaaactttacataaccaatcataccaaatttggactctttccaaattcgactccgcatcccacacgcacacaatacctccattgtatgccatatggaatctccatcaaccaagtacatcaactctagaattagtatcccgcatgatctctgaccaccacggacatcgtcttatccccaagccgactcccggtccatcaccgcaaatactgtcccaagacatcgagtcacctacacatgaaataaacaaagaaaccatattctgagaccaagctatctccaacttgactcattagtagcaaacaacagtattacatacgtatagtattcatctagaagccataatcatgaaataatcacggatatccaaacaaacaacccgaaactgaaaccgacacagcgtcggccggtcaaaccgtgtcacagcctgattttcgttttaggatttataaattatttaataaattattaatagaatttatattaaatgttctttaatttacaagtgaagttaaatgtgggaaataaaatttcctaaatttaaagcatggcaggatttaatttttattaaattctccatgattaattatactctctgaaattttctcggttttttcagagctcaattcctaaatgatacaaagaacagttcaataattagttaatcaataatcattaatgatctagttataattatgttaagtgcttttctcatttaaaaatccttaaattataaattgttgtttaaaaggaattattagaaataatcttaaaagcctaaaagagaagatctaattttaatttgttaaatctcaatataaaagtgggctagataaaattttgttaaatacttctcttgtttctatagttcctagatttttctgggatttatttgagccaaggaagtatttttaataaatggaattgcatttcatgaataatttaaattgaaaaatgttttaaaattctccttttagctttgggccaaaagtcagcccaagtctctctctctccctctcctcggcctgcttgcgccggcccgttcggcccagtctgccacgccctccctcctctctctctctcggtgccgctgacaggtgggacccacatgtcagtcgtcttcttcctccagccgctcctagccgcgcaagccgccgccgatctccttccaaattcgcccgcccctttcctcctccggctgaattgtttgaggggaaatgatcctcgagatctcctcttccttttctcttttggaaacatcggctaatttcgtttggaaatcatcggattcgatctcgaatcggattcgtctctctcccccgaaccctaaactttccatcccgtcgccagcctccgtgggcctccgtcgccgcctcctagcccctataaaaggatccccgggacctcctctctccgtcgccaccctcgccttagctcgtcgccgctcgtagcgccctagccgcgagagctcttgtgccgccgtcgccgccgcttgtccagccgtgcgccaccgccgctccggtcgtcgtcgtcgctcgggaaggtcaccgccgggttcgcgaagtcgtcgccgtcctcgtcccgtcctccgttgctgccgaggatcgccggagcaccgccgtcgtcgtcgacccgatcgtcaccgccgcttcaacctcgtcgccgtcgccgtccggttgccgtccgccgccgtctaagccctcggtgagttcgcgcgtcgcccgctacgcgttggttccctccgtttgcgccaccgcgccgtcgttcgccggcgagcatgcgaggccgagtcatcgccggtgatgacgtcatcgccgacgtcatcgtcgatgtccccgtagacccgcgatagatcaagatgatctcggccgttcgttttgaatcgattagatcccggtcgttcgtttccgtaaaccgccgccatgcacccggtccaccatgagccgagcccgctgatgcaataattcccttttccttttcaaaaataattctttattgtgtcataattcaattaaaatctatataaatgttttaatccggtttaatctttaaaaattcataactaattcatcttagctcggatttagttggttcaagtttctaaagttgtataaaataaagatctacatattaaaattatccataaattgaattaaatttatttagttctttttaaatgggctttaattagattaaatcttgtaaaattcataattaattcatatgaagtcagaatggggccgttcaagtctcataattcatctaaaattatgatttacgtgtttgtttactttttatgtattgtttgtttggagtttcttagtctttttccttgttttgcgttttagcttgtcgtttccgtcgtttcgaaggttcgcgagtgcgccggaagtattcaagaagattaattgaagacccgttattgcaaggcaagtcacacagatcgcaaacacaattcctttgagcatgttgatcctacatttaaattctctatttatttcaattgtgcatttattttcgaatgtcactaggtggtgtgaacttattcctttgttatggcctgtttgcattgattactctattccttgataccttgggttattataatttgactagttgagctttatatattggttcagctagatgttagacataattgcttagccatgcttagaaacattagcacacaattaggataactaatgtttcactgttacttaatgatggacatgataatggtagctcacgatggctaatcgtgattggttaattaattaatgtgccaactaaaacttgataatggtgggttgtgagcacatggttttgatggtcgtgctcatgacaattaaggaccggttcacgagtttcggttgtgaaacattaaccgtgccaaccacaagccagaatgggcaacagctggacactttgtataacaaggctcattgcggagcaccagactgagaagtggcggagataagcccacgggggtagctggggagtccatgcctctggttttttagggggtgactacgatccaggaacggtgcactgctttgggttgagttatgcgaagggtcttgtcacaatcattcgtcatggtgacatgtctgcgcagacacggtgacatgacggtgggttgtgtcttgtgagtacagtggtacacctctggccagagtaaaactattcgaatagccgtgcccgcggttatgggcgggtcgaacaatgtctttcgtgattagtcacacgctactcattaataataatgtggtaattgatggtaattaatttagctcctggtttggaatggtatattcctggtttggagatagatctgtgcagccgggtatggttgttcaggatggttgggcctgtgcagcatgggtgtgctgttcagtgttgattaatattgatgattaattactctactgttttacaattctcaattatttgctaaatgctgcttttgcaaatgagccctatattatgccattctttggtatccttgtgcacttgcatatttgctgtgcagcttgctgagtatgtcatatgctcaccttgcaataatcaatcaaacctcagttgaagacaagttgcgaaggagaagacgtttggtttataccccagttgagctgcttgtgggagtggagccggagcttcgctagattttattttccgctgcagttttcttcatggtaaggactaagtgcctcttaagtaagtatttatcgttttagttaatttgatgaatctgtatattaaattatcagtttgtgtatctcggctgattcctggacgatgatttaatgcacaaataagttctgtaattactagtgaatttctgggcgtgacaaaccgcgggctagccggtctgaccgacaatacctgcccggtctgaccggtcgcatgaaataacagcagtatctgcagattcacctgtgaaatccaatcatctccaaaaccacttcgtgaataaattccaaataacaaaactaataatctccaatgacaaatgttcatcacagaataataatcaaaaacacctttgattttgcaccatctaggtctcatgctaactcaaccgactctattaccgtcaactcgcaatatcagtcaaaaccaggcataatattgttaaggtctcaagtaatccggtttcgtaaattaagaaatctgatattacggttcaaatgacgtgatctaaactcgatattactgtgaggacctgaagtgaacatttctatgtttaatgtagccttagatttcaggatatagacgcaactacaacggtggcgttgcgctcgggccagcccatgcgaatcgcatccaacacggcgagaacgggctgtttgaatccaatagcgccaaatcgcatccaaagttaggagtaaagcgtgtgcattccttactgccggtcaccctgttttctcttactctgtttgtagttcgctgtaaagaacacttcaaatcaagctcacacccgaagccttccactcgtgcaacaacttcaggagttccatggtgtgattggtgtcatgtcgttcatcttttttccttgtgatgttcgtacagatttggtcttggtagctcaccttctttacccttaacgcaggctcctaccatttgtttctcgttttcttttatgaaaaatcctcggaatattttggcgtggtacgtgatatttttggccgtctgtgcttttgcttcttccagaaagcgagcaaccgttcgttggctgatgatggtccatttttcagtgttattcggccccagctctggttcttgttctatgtttgtgattatgttctctggtcctgtttctgaatttgttcctttttctctctaagaacatctttgtgaaagttttcgatgtagtagatgttacaaggcgatgtcactgtgcatgtccaagtttatgtcgctttcgtgacattagagcacgtacaatgcctagccctaggtcattcccctggctcacgccatcggcctccattgcctttcgtgcgtttgctcgcgggggacgcgcccttcgcccacttttggctaagccacggagccgagctctgtgttgggcgcacagtggctaccaatgtagctcatggtcactgctcccaccccaaaatttcccaaacgactcctcgggactctcccactctcgcccctcgttctcatcgacctcctcggcggccgcctcgccttctcacttcaccggccgcaatcgtcgtcgtccccgtgagagcaagcttcggggagggcagatccaccgtcaaagcgtagagaaagggaggggggagaaagaggggtgagcagcagggaaggggcaaatctcgttgggctacctgttcagcggcggcggcgaaggcgaagctggctacggtggcggagacaatgccggtgccggtgaagaagacgatggagccatcaccgtcggatgcagcgcgaggcgggaggttggcgaggacacggagccacgcctcgtgcgccccatccatcggccaccagcgacccggggatggagcgggcccaccaaatccggggacggcgacgatctgcgtctcgcccacgctgctcgccatcggtcaccagcggagggagggcggtggcagtgcgctgggacagagacgacgggcggagggagagagatgtgggcggaggaagagagaggcgaggcagcgacacaagggtaggataggaaaatattacaaacggctttgtgggttgggacacacattgtgggctgtagcatcttcatataccctcagttttttaagggtccaactgagagtattctttattgaaaggtgagtgtagtcatatgtagtggcttcagtcaacgaggacactactagtgtggcttggattgtagatgtccctatgacgtttaggcttcgtgttccgatggatgtgcagcgattacgcgtcctgtgatccccaaatgatcgcgcatctcgctgtcactaccggtctaccactccaagtgaaataataatggtcacttggctgtaaattggagtgcgaatgttgttggcttgttgcagggaaagccgtcaacataggccgggaatgcctcttccctttgctgctgcttcacaccttttgcaaaggtgagtgtttaacagaaaaggaaaagaaaagattaagaaatacataaattaacataagtcattagcttatgattaattatatattaattactttaaatttaaaaacatattaatatgatttttcaaaattattttttcatagtaattttttaagaaaaatatattgtttaatagcttggaaaacatatacgtaaataacgaatactcgaggtgccatggtggatgtatgtcgaagatgtgcagccatgaccacgacgccatgaggcccatgatgcatcgagccatcgacgcatcaacaaatatgaaacatcaatcaactggcaaaaaaaaaaaagtgctcagcaactagtgctaatgctatacagactacattagacccgttcactttgatgccattttcaacaatactattgtttaagttaccaaaaaaaaatatctacgtttagtttgtcgtcaaatttaggtcaatacataagaaatcctgctaaaaatttttagcaatatcgctattttaccaaaactttgacattaacaaaatttgataagatttattttggctacaatctaaacaggcctagtatgtttccttcagcaattcaatctgctcatcattccgcgaggcgcgaccgcgcgagcccatatattccgaacgctcagcgaatcagaatactactgtttgccgctgatcgcgtgctgctccgtttctgttttctttttgccgcgaaatgggaccgaccgaaaggtgttcttctagggagggcatagtttcgggaccaaccaattaccaaccgtctcagattctcgctagtcgctcggacaaaaaaaaatatcatatcagctcgaaccgctaaaaagcagaggtccgagacgacggaattcggtgtgggggagggacggcgacatggttggcacagagacagtcaaccgatcgcctatgcagctacgctatatagtacagatcgctagtactacagcattccatggtgaccgatcgaggaattggatctcttctctctcttttttatttccagcggatggtgcaggacatttcgccaaaaaagggctcgcgtttttcagagaccggtagaggccaagttgagcccaagaagaaggcgaggagcacaattcgtaggcattagtacttctatgtcaaaagaaaaaaaaaactaaacatgagaatgtttttggataacatacatatatacagatactccctccgttccaaaatataataacttttagcactaatgaattgtcctaaagtataacaacttcttcaccaaccaatcacaaccctccaccattcactttttttatctacttacacttctcaaccaattacatatttaattctatcacttttcttaataaccatgtccaactctaaaactctcactgctggagaatgcaactacactcccggtttgtaatccccttcaatcacgggtatacaaccgggatctcgaatccggaactaaagatggtaacgccacgtggccggtgctaccatctttagtcccagttggtgttaccaccgagactaaagttattttttcttttttttcattgttttttgctatttgcatattgatttctaacaaaactcaacaataaaatcatccacattcatagaaacatcacaaaattatccacaaattcaccgatcaaactgacatcacaaattcacaattcacgtcgcagatttacagatccaaaaacatcacaaattacaaatttacttgtgctaggccactcgctgccgctgcccccgtgcgggccgccgccttcgccccgcgctagggcgccgatgcccctgcgctggccgtcgtcaccctcgcgtgggccgctgccgctgcctccgcccgcgccacgccaggccatcgcctcgctactgcttctgcaagtaaagaggagaggataagagcaagaaaagaggagaggataagagagaggaggaagttaaaagatgaggataaagactttgcgatagaagatttgaggataagtgcgagggattatatacgacgggttgaattttagtctcggttattaataccaaccgagactaaaaatagtaaggggtcgcacgctttttgacccgggacaaagtggcgttgggtttttcaaccgagaaaaaaaagatttttggtcaacccaataaagatgtttctctagtagtatctctatattctaggacggaggaagtacatcttttcaattaaacttattttggaatggaagaaatacttcattatattctatactactccaggaaatacttcattatggagtacatttcacttgaaaaaatatatacctgttcatggaacaccaggttgtgtacagagaaggctatttatcgaggggaagattcggtgcgttgcactcgatcgaggacggtgcctgcttggaatcgtagtacaactctagtagtagtactagtaagctgcaccggtcacactcacacctagtacaccgctacattacgtgcgtatgggagtgtggccacccacatccacctgtcatctgcatcgccccttggaattgttgataccaatccatccaccgctcgcctcacctgttcgtcacgacctcacgcctgactctttaacctggaaccgcccgtctgacgagctcaccgtctttgtagttgcagacaaaagtctacgtgacgcacacccttatacggtcatacagtgatacgtactgtacgcattggtgcaacgcaaacagggtggttcagacttcggagcatgatgggtcactcggcccttgtttttatttcccaactttttttttcaaacttctaactttttttatcacatcaaaatttttcaacacatatactttcaacctttttaaatagactttcaattttaatcaaacttttaattttagcataaaactaaacacaccctctgacttttaacttgagattttgagaactcgaacgcattagcaggtactgtacttgatatagcaatgtactactccagcatgctgactcggcgccgacaccggcgacgtgtgacacgtcttgatggacagtatagcgaccgggagtcttgatctttttctggaacaagtggctctcagcatgtaggctctactgcggccgtgtttacttccatggatataaatttttaaagtatacggacacaaatttaaagtattaaacacagactaataacaaaacaaatttcaggttatgtctgtaaactgcgagacaaatttattaagcctaattaatctgttattaacaaatgtttactgtagcacaacattgttaaattatggtgcaattagactcaagagattcatctcgcaatttacacacgagctctatgtatatgtctaaatatttgatgtgatgtttttgttaaaattttttaattaaacaaggcctacttctaaaatagttactgttgaaaggaccttgcttctgtgctgtgcagtgtgcagtttctggggaacttttcaggaaagcgatggcgtatgtagctgttgccttccctaaaaaaacgaagattcctacatcgtttataagggcaataacaatatatataataaaagtagtatataaaacccacttatatgaactttaactattaaaacattcataatatatatggatagcaaatagtattggaaagagagaaaagatagagacaaataatatattttattctctatgggcaacccatatgcttatgggtagcttttgctatggactagttccacaatgttgttaggtggctgaaacaaatattttattacttatggaccacttttagactacatcgtggatgccctaattaagtaaaattagcaggtacctcgtaaattaacttctaggttacctattgatttatatataaatcggttaatgggtcgacccacctacatctctaaatacatgggttatctttatttaatctataagcgggctcgtgggttgacccgctagcatccctagttccagataaattaatcgttcatctcgctggttgtctcaatgtctttgggcccgactatgtgagtggcccttgtacgggtagctgtcttttccctagctattgtcactagcaagtgggctcgtagctttacccattctaccataggtgtacatgcccttactcaaatccatgggcttgtttggatttatgctaatttttgttcttctaaattgttggtaactttaatactagtattataaggatgtttgtttgatgctaaattttatccacactagtacaaatgatactataacaaattttataacaaatttggtagtttcaaaacttatcaggattttggtactaccaatatgttggtagggtgaaaattgtcatcaaaataaattagccccaaatttctctatctccatggatcacatgggaggaagatggtagtgtgaatcaagagcaaacaaaaaggatcatgctctataggttctttattaatctatcgtatgtactgccggtgaccccatgacctatcccaaaacatataaatatattctcgtccccacgtaaaagaacatttgcatatccagcgttacggtgtaaggtcatattgctcttttttgagaggaaaatagctttccattaacttaaggactcagcataatcgttggccaccaaattctccatgcccgaagacgtaccatcccattgcaattgcatgacgttattatgaggacactcacaagttacaacctaaaatttctaaagcgtgagctactttattccattctcggggagctaaaggtcatattgtttggtgcgtaacatcccctcgcatagacaatgggagatgatttgcttctggaattaactaatcacagcttcacaagaaccaaacaagcaacactgtcaaacctagggagggacttatgtttttaagagagaggctaaagtttagcccctctctcccaaacacccccttagcagcaacaccgtatcatgccatcagcaagcggtcgcaaaagtcagagcacgtgtgccgtgtgctaaaaatggaaccgtgacttcgccgcgggaccgtgggtccaaatgttgctaacaaagaggcaagtgttagaggtcaatatcgatcggccatccccttatttgtttcgatatacacatattcatactacaggataaggctcgcaagtcgcaacgaatttgtgacgtggatttgacaaaaacgcctttgctagcttctctataaaatcgattattatataggctcgaacgaagcaaaaacacggcgatgaatttgcccacgcagatcgcatggccgtgtgcccgcgtgctcctatgtgagaacaagtttaataataatatagctaactactagctccaattcatttataatcaatttagcagctcattcatataatagttatatactacactattaatacatggtcccacctgttatacacacaatacgtcttagagtctatgctaaaggtggctacaaatctgtagcccgctgtttttctctctccttatttatttttttaaaatatatttacagctggcttatagcctactattactgtaactgctctgaagataatcaaatccccaaccgcccgcaccacgcgtgtgagccgcgcggtagacggcggccagcgcggacgcgagtcgccgctgccacctccacacgggatccgccgtggccggccgcgggccgtacaggtggcgctcgctgataggtgcagtgcgatgggtcggttgttgccttttcatggaatagaccctggcttctgaaagaatggagcgtgtgccccttggctcggccagcctggaatatatggattttttttcattagctggtttattattttgtaacgtggggtactcgactctgctatatggatcgatattatggtttttgtccaaaaatgttatgggtaaggacaactagtttggtttctaattttgatccctggtcactttagtccttattgctcactttaaattgataatatttatcgttttgtataaggatatagtctgaaaaaaattaaaacgacttataatatgaaatagagagaataagtgcaatagctagcctggttgtagggacgggagggcagatgaggagcctggttgtagtactaattgtgaggagttgacaatagacatgtggtttggtttgtgagtgacttaaactcgtgaaggtaacaattccatccaatgttattccggtcaccttacttgtttgaaatgataagtcggtggaaaataaagggaagatgaaattgtatagcaaagatgctatatgtcaaaatggagtaaactttgtgaaaaataaggacaaccaaggagaagcttggttatcaaatataattataagaaattgtgagcgcattaaaaaattaaacacaagatcttaagattaaagtcacacacctcttgcaactatactatggatgtgttcgctagttccggttaggaacccatgtcccacacacagaaaacggagcggcccattagagcgtgattaattaagtattagcaaaaaatattcaaaaatagattaatttgattttttaaaacaactttcatatagaatttttttggaaaaaaacaagagaggggagttggaaacctggggaaagaacacaacctatatagtgcatctctttagactctattaaggtaaatcaacaacttccgtcaaaaattaactagttactttgtttaattgatataattctatttacagctatatattaagagtactcggcagttgaaatttaatgaagtttagtcttatattttaaaatgtatttgtataccgtatagtcagaaatatttttaaccgatcaatagtagaaatttagtcttggaaaccttatgaaatagggtgaaaacggtctgattcggtagcactttttcggaaacgatgctcgatcggctggtaattgaccatatttatcatttaaactactcaatatcgacattaatacgatgtataaagaaattagaaaaaacaaaatataaaaatagacaaaaaggtaccccttaaacggaacggcgtccggtcgatcgggaatttctgtgacagttttcaccccttgaaatatgtataccgtatatcgtaaaccgtacaagaaaaaaagaagttgctgacgacccagtgactttgtaacctgtgagacttccaagctaagcaacaaaaatacgctaggtcaacagttgtttgacaagggaggccctggtatagaacgtagataaaacttggagggggcatctacaaaatcccggcgcagcggactctatttatacgcggccccgctccttgatccccgagggtgaatcgtagcgatagcggatcagattggaggaaaactcgctagtacgcttgttacttgcaactctttctctaatcttgcttcggaaagatatccaaatcgaagaaaaagaaaaaaaaattagaaagcgtgattagccattcctcttctcatctctagccacttcgcttcagcttttcttctttcttgatcgcgagcaaaaagggagagagaaaaaaaaacggtaaaaggacgtgattagcaaggatggtggcgatcgagaaccagagccagggccagcgggcggcggaggcggcggcgcagccacggatccccagggaggcgcggcggctactgcacgagatggcggcgtcgtgggcggacgttgccgactgccgggcgctgcaggtgattccgctcaagggcgccatgaccaacgaggtgtaccaggtgcgctggctcaacggcgccccggccaccgccgacggcggcgaggtggaggcggaggcggccgcaagggagagggaggtgaggaaggtcctcgtgcggatatacggcgacggcgtggagctcttcttcgaccgcgaggacgaggtgcgcaccttcgagtgcatgtctcgccatggccaaggcccccgcctcctcggccggttcaccaacggccgcgtcgaggagttcatccacgcaagggtaggtgcacatgaatatgatatgattccgcgctgctgtagccaaactgtctagccttcctcgcgccacggattgtgttttctcctcccgttttttccctttagttttcctctgtttatcttcgactctcttgaactattaaattgggtagggatttttaggggattttggtggtaccttttgtgctttggacgaataaatctttgttgattttaccgcgttagtgaaaagttattttcctaagtttattagcaccaaaattaggcagattttggagtttgttcttgcatactgataatttttttagctgaactcgtagcaatttgggctttaacgttcttcttgatactttaaagattctacaggcactattccgacttatttattgcagtctggttatcgttttctaaaaggttctgccgtgggaatctgcaattccttagacctttcttatctatcagttcataaaatctctcttcatgccctagtcaaatatctctcctacttaacaggaattgtttatgcccacaccaattatctcccaaaattatttgcctctgtggcatgaggcgtacaatcttatttttaagggtattgtcaacagctggaatttagttttctttgcactctttcctgtattgtcagtaaaattgtgatacaaagtcaatagtcggtgaagctattaataactcgtttgaaagatttttttttctttcgtttgaattagtcagctagaattgataattgtccattcgacaacaggagatgtctctttcagagaagctgttgattgaaaacaatttattggacttgagaaaagcaagatagctgactaaactggtgtaaagtaaggactgaatggagtaaatctagaccatacatggtctatttctcttgcggaatctcttttagaaagtgaattaggctatagctgttaaattgcgagtcgaagcactttctggattcttcattttgctttaatacatgtgtcactctcataaaagggatatcttgtgttgttttcttggacgaacaaaaggaaaaaaagaacgaaatttcgtgcaatactcctactatcagatttttctcctcaagttttctggtgataatgaaatgttatcacgatggaataactgtccaacctgttacgtcagcaactcaagcatatacaaaaattaatgcaattactttctttcagacactatctgcagcagaccttcgtgatcctgaaatttcagctctggtggcgtcaaaactgagggaattccacaaccttgacatgcctggcccgaaatctgtactcatttgggaccgactgaagtaagagcattttctcagataaatatacacttggcacttttaataagtatataaaactaaacctggccgtgctttttctagaaactggctcaaaactgcaaggaacctgtgctcatctgatgaatccaagaaatttcggctgggtagcctggagaacgagattgctgcattggagaaagaattttcaggggattaccacgggattggtttttgccacaacgatcttcagtatggcaacatcatgattgatgaagacaccaacatgttgactatcatcgtgagtaatattcattcacaataatgtccctgtgatcatatttgttttttgctgcattttttttgcgtgtatctattatgtgcaaatgtgaaatgtagaagaggctattgaacgtaggttgtagaacttttaagtttcttctctcatgtgatcatctgttgaacaacaagcgatatgggatagttggaactgccgtatcattttcactagttggaatagcgccagcccttttccctttcatacaacttgttttttgtttgttgcgttcccttccccctcgacattttaaattgtcacggctctgctaaaaaacaacatagttttggttttggacactacctaccttatggaggactgatgctttgctcctttttttttcccttctgtataccaatttgtcacgactgtttcttaaggaaatctgattcctttttctttacatatatgacaagccccaattaattgttggcaatttgatcctttctgttcttctcatatatatacaggattatgaatatgccagcttcaatccagttgcgtatgacatcgctaatcatttctgcgagatggcagcagactatcattcagagaagccacatagactggactacagtaaatatccaggtacccaaaaatactaccaatgcgctgttttgcttatgttttggtacttaaatcagtttacacaatcttggtccaccttgcttatttgctattctacatgtggcagacactgatgagcagaagcgttttgtgaagacgtacctaagcaattctggtaagtgcaaattcatttctcgtttcattatctgaagatttctttggcactaccatgattatttgactgcaaccattctttttggaggaatatttctgttacaaattcgaattcagcttccattgaatactacttttttcacaataactagctaagatatgctcctaattttgtttagtaagtgaagaacctgatgcggaagaggtggagaaccttctccaaagcattgagaaatacacgctcgccagtcatctagtttggggcctctggggaataatatcggtatgttcatatttctggatgtccattgcctgtttcttttttcaaaagaactatatgaatccattctgtcactgtaaacctgtgctattatctgacctctatcttctgcaggatcatgtcaatgatattgacttcgactacaaggagtatgcaaggcagagattcgagcagtattggcagaagaagcaagcacttttaacttcatgaattgcctgaaggcgtcaggtcgtacctgaaggcctgtgctgcacataacttgtgcgatgttactgacacataactccctgtgaaaagaagaaagatgaagatgataatgaagaagaaaccctttcgggatcaggagttctcatcccgaaatttccgtaaggttcagcttcaggaggaagctgtgggctttggttgctttgtttatagtctgaaaggcagcgaagaaaaagcccctggttgcgtgtttgtttgctcgacaaactagaggccgcttgtggggctagtagtgccgtcgtgtttcatgtgtatgtatacctaaatatatgttacataatggatcttgctttcgtcgactcgagagtcgagacagtgcctccatttagtccatattgtactatgcttacatgactgccctgttgaagaaatagcctatacagctgcactgttattttggttgttgatactacctgataataatatggcgtgtaccaaagctttaacgtggccatgttcagcagttcaggtcatcttcgttgctctctggtgcagacgagctacgaggtatgagctgcctgatgttggtgatacctgacgaaaaatccgtccgaacggctgtgatggatatcagctttcgctgcctcttcctcctgactttgtttcatcggctcatcgccatttcgcctttcgtcaatctctaaccctctctcctttctccttccccacgctgggctgcgaagaggaagatcgatgacgcgtggaattccatgacgcgtcgcttgtgagcccggaacgagatctcaatacccgtttatgacggcccatataagtggaacgggattgccgctaacaagcggcccatatgtgttggctggaacacgacgtgcggcccaagtccggaggtggaatcagatggacgtggtccatgtggagaagggcaaaagttgcccagtccagttttcgctgcccgcaaggctcctggcgaggaataattctagggtgaaaagttttggtatatattatcggataggaaaaagtacgaattaccctcctgaactatcgtggtcgtccgaattaccccctgaaccataaaaccggacatttttcatccctaactatgcaaaccggacgaattaccccctcgacccaatctgcggtggttttagtttacatggcgtacgcgtggcagtacagtcagcattctatttattaaaaaaatgtgggacccatgtgtcatcctcttccactcttcctctctctctcactcttctctctctcactcgctgctcactcttcctctctatctctctctcactggtcgtcagcggccttcctgtccacctgctgctgcgcgccaccgccggccgacgccgccgagtagttgtcgtcgccgttgttcgcggcgaacgacgagtcggtgatgcgaccgcgatgccggctcggcgccgcggggccagggctgtgggagtgggagcgggctggcgtccacagcggcgtcatctcggcggtggccagcgccacggcggcggcgtcgtcgtcgttgaagaggtgccccgtgtaagtaagacgcgacacggtgacagtgcagatgaccgaatctctcagagcagcagagcagagctgcactgtgctgctagctgcttggtgcgtcgagacataggattcctttaggcattgatgatggacggcaggttggcccctgcacggtgcgacgccggcggttttcccggccacaagttcgtacgcctgcctagctttgccagccgcctcgttgggccgtggcggaggaagaagacgtgctagctcgcctacacacgccgtcgtcgtcttctttcctgacaatgggtaggagtagtatgtgcactgctgctctgctagcacgaattcttccaccgccgccgccgccgcccgcctccatccgtccccacgccgaggggcggccgttcgtcgtggccacggccgccgccgccgccgctccgcgtcccccgcctgccgctgaccggcgagaaagagagaggaagagtgtgagaaagagagtgagagagagaggagagagaggggaaaagtgagagaggagtatcacatatgggtctcatattttttttataaataaaatgctgactggactgccacgcgcaaaaccgcttggaattgaattgaggggggtaatttgtccggtattgaaagtttagagtgaacggtgtctggtttttgggtttaggggggaattcagtcgatcgcaatagttcagggggtaatttgtactttttcctatcggatataccgacacatatttaaagtattaagaccctgtttgattcagtttaagattattataatctgaattattaggaataagctgaaacaaacaagtagattgttatgatagattattataatctaataatctcctgtgaaggagcttttctcagattattgggtggctaaaaacccactaccttagatgcctccaataatccagagaaacaaacaactcgcagcttattctatgccagcttattataatccagtttagagtaatctgatttaataatctagattacaataatcttaagctgaaacaaacatggcctaaatatagactaataacaaaacaaattacagattatgcctgtaaactgtgagacgaatttattaagcccaattaatttgtcatcagcaaatgtgtactatagcactatattgtcaaataatagagcaattaggcttaaaagatttgtctcgtaatttacacttaatctgtgtaattagtttttgagtaaatttcacaaaactacaggtgttttgcacaatttatcacaaaactacatatttaagagcttgtttcacaaaactacatatttagtgtctttgtttatcacaaaactacaggtattttctacaatctatcataaaactacatatttaagaatttgtttcacaaaaatatagatttagtgtattcatttatcacagtactacacatttagtgtctttatttatcacaaaactacagatttagtgtctccattctcacaaaactacatgttttagcattgttaaaacgtgtagttttgtgagaatggagacattaaatctgtagttttgtgataaacaaagatattaaacctgtagttttgtgaaactagttcttaaatctatagttttgtgatagattatgcaaagtatctgtagttttatgaaatttactctagtttttttatctatatttaatactctatgcatgtgtccaaacattcgatgtgacagggtgaaaaagttttgcgtggaaactaaacagggccttagaacatcccctaatatggcttcttaaaatttagaaaaactctccaaatttctatttgaccggtttgctaaaactaaagaaagtaaagagtcaaatttatcgtttattccaacaacctctctttttttatataatggaatgaaacattctggcatttgctcaagagatacagccaattattacaaggttcacacaaaagtaaactcatacagtgagtatgtagccaaagtaacaaaaccaaaagtaaaagcaaactaatcaaaaaccaagcaaggtaaagaccccacaactactaaattctattggtgaatctccacccgaagttggcaaagagctacatgatgagtgggttccacgtgtcattctctttttacttctttctccctccctcatcttccttctccccacccgacccatccttcccctctgatgcctattctcaggtgctccaatgttggagagtggagatggtggcagacatggaggtgactagaaggcgaggagtcgacaacgatgatggtgatgacggagaggttgaaggggaagataaggcatgggttccaacgatgccgtcgtgacgaccactggagcttggtggactgatctagaacctcgacacagagggttaggactcggtctcaagagggcagcttgggtcaccacgacccgccctcggatccacccctggcctatcctcacgcgccgcttgctccatccttgccttcacctcatcgtcaccgccgtcgctcatagggaggagaatagacacgtagagctcacgcttagcaagccagttatgccaggccaaaacttggctagttggcaaggttatgggagagcatttttttttcagcaagctggttaaattttgggttatagagtcatttgacaactctgttagggcctcttcggattgagggatttttagaggatttccagaggaatactgtatataggaaatatttcttcacatgaatcaacccaaaggaaaatcagaggaaacattcctttcctgtggaatcaatagagaaacaaaggaaaatttacatctagtcctaccttattttttccatttcctacgtttttcctctgtctatccaaacacatgtttatctacagaattcttgtgtttttcaatcctctgttttacccatgtattcctatcatattcctatgatttttctattcctacgtttttataatcccatggttcgaataagcccttagagttgcttcataggatttggtcgcaatatttgtcatgtgccatgtgtgccgtgctgtcacgcaaggatacgtgatagcaggcgcgtgacctacgacgggccagaccaatcaatcaatcaattggagcgggccgcaggctgggacaggatgccaagtgccaacctagccacgtactccgtacgcctgatcccaccggaaggcccgcgttgtgcgttgtgcgttgtgcgttgtgcctccctttctcgtgcgccgccgggctccgttccatcacccgcggtgccaactgccaactgccgattgcggaagtggaacctggcatcggcggcaacggcacgagcgcacgaggcagccagccgcgcatccaccgatccacgggccgggggaccccgagcgtccgcccacccagcagggcaccgcaggcagccgcgaccgcgagcctcgtgtaatcgtgctggatttttcacattttggtccttttgaaaaacttatttcgcaagtagatccctagaaaaacttatcccaaaaatggtcctttttggggcgccagagtggctggcgccgtcgttcaacaggacggcgccagcctctttggcgccgtcccaccgccgacgtggcggggcgatgctgaggtggctagggggagtcccacaccacctgtttgacgctgtgccgcgcccgacccccgccctttggggtacgctcatcttcgctctctcaaggctctgctcgcaccaggagcttctcgacgccttttcatctcttcaccgcaggggcttctacgttccgccccgctgtgtgcccctcgttgttaagtccttccccatcttggacccattacctcaaggaaagcaggtgcactgtcaccccattgttcgtggtctccttggggatatcttttgtcatactgctctggtggatttctattcaaagaacggcgacatggattgtgctgtgaaggtgtttgaccagatgccggtgaaggaccccatacccatgaactgcttgatcactgggtattccaagaccggtgatgtggtgaaagccaagaagctattttatggcatggtaagaaagacatttgcattctggaattaaatgatccgctgttatgcgcattggggggaataccaggaagcttttaggctttttcctaagatgtttattaaggtgcaaggtccaatgccatcactattgcgacgaggtttttcatttgtgcgcaagacttggtgatcttcaacaagaaaattggctatgttctttataccact

SEQ ID NO: 5540 - DNA, 60973 bp, Oryza sativa
  unsure (1)..(60973): unsure at all n locations
ctattttctgtgtgggaagataccattgtgggccaccagtttaagaggatggtctgttttgacatttttcacatggtaaaagtccattatacatccctcaactatagcctttgtctcatacccgtcccttaatcataaaaccagatacctccaactttctaaacctgtcttgtttaccctctttgagtagtttttataccggttttatcctaagtaacacccacattattaaataccaacgggataccgtagtctaggttttttgagagggctgctgcagaacgggatcctgttttgtagcagccctcttattaaaacatgtttttcatctaacatggtattacaaccaggaaaataaattaaaataacatttgagacccacatgtcaagtgtactttttctcttctcctatcgactgcttcagcttatagggacgatgtagcaagggcccctctcttcgtctcatcccatccactgagtagaggtggcaggaagcggcgagcttactggcctcttcccctcggtgcccacctcctcctcaaggccctagagtttgccggtgacgggtgcggcgctttctagcaatgtagggaagctataggcggaggaggtccatgaccacaaggctgttgtagtgcaggaaccaacctaagtagccgataatgttctcggactagaggtggtgacatcattgatcctgggctcacacccacctacctcccactagcgtcaccttctttatcacggatggcgatgccaagcgagcctcattaggctccatcacgggtggaccgtcgttagcgtcatgctccttcccgtcagcggttcttcctccttccacagtgcctccactttgactatctcccatctaccacatttgctctagccaacgtcgggggtgacacatgtagccaagggcgacgaagaggaggtctcctcgacctgtggcatcctttaccctttatcctcgcgcctcggcatccttgcgctattacagcacgaggccctcgtcggcaacatctcctcccatggtgagggagctaagcgcgtgaggattctaccgacgcaacaatctggttgtcgcaagcctcctagaccacgacgcattgggggatcggacgggacattgggggtggaagacagtggatagtgtcgacgagatatattcgcaaacggcatttgtagagtatggggatcgtcggaaccaggatgtatgtgagatcggatctacggaacacgagacaaagatttataatggtccaggctctcaagatgagtaataacttttaccctgctccaatttatatgtatatatggattgaaatatcacatggattacaaatgtggaataggacgattagacttatctgccgactaaaagttgttgagaacggtccgatgagataaattcagcgaataggacgctagcttcctttggattgcttctgggtgtggatttggctatgatttgtaactcgatgtcagggtctgttatatgtactgtagatcatcttcttctctatggcttctaaggagaccttatcttccccgactaagattctggcaccttctatttcggaaagataatttccttctttctttgtcatatttcccgtatctcccatattctggtttaaggacatataacaggacacgggtttaaggagaccttatctttcccgactaagattctggcaccttctatttcggaaagataattccttctttctttgtcatatttccttaactaaaggatactttctcttataatatcaggtatatagtattatcgtatgccacgaacatgtgtataggaggtatgccttatccttgacactgatagatgggacaactcatcaggggaggaagacgatagacgggatggcacatcggttgaggaagacggctgacgggatagcatatcggggggaggaacatgatggatggaacggagagctcgagcttgtcacctcccttgtcaccgcccctttcccttgcctccctcctctcatcctctgccgtgaaccgccttcctcactagctgccagctcgttgaccctgcttcaactccagatgggaaggcgagaaggtgtcgagtaaatcagtggtggtggtggcggcggtcgtgatcaagtgcttgtgcaggatgggagggggtggcaacagttacatcatcgtcgtgggggcatgggatactgggatgcacgcggtgacatgagggagtgaaacaagcagcgggtgcactgcggaagccaatggtgaagagtcgcaacgacatgctctcgccgggcctccccaactctaatgttgtcgtcggcgtctcctctccccaagcttccccgaatgctcgaggggttcggctagccattgccaccaccctcccgggctccactaccactggacagtgagaaaggacaaaggaggaagatggaggaagagagaatatatgaaagaggacagctaggggatggaataccattcatctgacggtatagtttatgatcttgatcgtgcacgacatgctgctcccccccccccccccttcccggaaaggacgtggcggtagtgctcatgtaatcaagtctcctatctggattagtttggttgaactgtaaggaagcgggactggttggcctaggtgggactcaggtgggctgatactaagaaaagagttttcctattggtctaaacgctgatatggactaataatagtctagtagtatctcgttaggccatatgctgatgagattaggacaattgatattccctccatttcaaaatataaggcacaaccactcttaacctaaagaccaagaaataattattatcatcttgtagtttggatcatcctaataaatataatggcatgcatccaatagaattagataacatgagagtggaggattcaaaaaagtaataatttaatagagaaaaggtcatagttaattgtatgcttgcatacatgccttatgttatggaacatctaaaaaaagtagtcgtgccttatattatggaatggaggaagtacatatcttcacaataaatattcttgttgggtcatgtgctaattaggttagaccaataaagatacacacatctatgactaattattacaaagtatggagaaatcatgtacttatcatctatgaaatcccatgatacttggtactacatagtaccgtatatgttatgaacctacaaggtaacagacctggtactccatatgtatcatatgtggtatctaggtatcatacttatatttatatccaatatctaggtatcataatttgtagatatcgtgagtatcatatatgatacttgggtaccatatttgataattagacctggtacctaggtactagatttcgtaaatatcgtgggtatcatacatggtacctgagtatcatacttgatacttagacctgatacctagggtatcatatatggtacttgggtatcatacttgatatttagacttgatacctaggtatcagatttgtagataccgtggatatcatatatggtacctgggtattagacatgatacctatatatatatatatcagatatgatacttaaaacaagataattaagaaaaagataaacataaaacaagataattgaccatggctctttcctgcaggcccagctagcatgtgagcacctcttgcgtgtgtcctacgactaatggaagaagaagtcacgttcacactcggcaagacaatgcgataaaagcccaacaagttcatcatgtgggtcgtggggagcctatcgacatcttgcatatgaggcagacaacgattcgctctcattaatcgtcccgtgacgacgggatatcgttctgtagcttttcttggaaagagagaggaaggagaggtgaggaagaagataagatgaggacgtcactaacatgtgggatcccacctgttaacttagcgagtcaaaaccacagccaacttgccacgtcagcaaaaatcactttccaaaccatcgaaggagtcaatttacacgttttcaaagatttggagacgttatacctgattttgcaattaagggaggcgatttaatcagcactaagagatgaggaagagaatacagacttatttctttcctgctcttaagttactacatgggctttaatggcccacctaatacggctgtggcaaacggtgcagcccatcaactagccacgggggacgttttactgcggttagtagctcgatgatccgggcccgcatcgttccgctaaagtgctgaacactctctgctgtgaatatctccctacccagaacaaatttgctatgaatcaccccaaaacgaaacgattcaagtaatactgtacctcgtagtccgatcttaaaattcgctactccagaaatcgctttggagaaccgcaggagaaaaagaaaaaacgtcgagaaaggttgtcagagtacgaggcttcgtacgagaccagataggatagaagtagtacaacggatggcgcgccgcggcacctttttccctctgcagccgctacgcgtgcccctgcgccgagcgttgttccccgtctgattctgaccactttggtcactccgtgctgtacctgtaccctggaatgatgaactcgtgatgttgatgcaccagcatgcatgcgcgccgaggccgatcgagcagcgagcccgcccgcacgcacacacgttactccactgttcatggcgaccgctggtcgtagtactcctagctgcaccagttggcatcgatgcacgaggccacgagccacagaaacgaggccgtgcggtcgtccgtgcagtgcacacgctggccaatggccatgccatgcgtgcgcgacgtgatctcggatggattaatctatgatctcgaatagattaatctatgatgtagtagtacacttgatcgatcgagcccctctctctagtctctctacccaggacagggccagcttgcgtccatcgaggcagcggatgcacgcacgccacccgccgcaagattccaaagccatcagttcccgcgcgtgccaagccgcatcatgcgcccgtcgcacgtgcgaggccggggctttagctgtcgcctgcctggtcgtcctcgtcagttcactgctccgtatcacggagaggcccccccgccgcggccttttcgttggttgattagcgcttatcttgtcgcacgaactgatttaatatctccccaacttgtgttccgaggcgacaagagaagacgaaacaaaaaaaactcgagcatccagtggcagatcgatcgagaaaacgtacaagtcactcgcgttgccgtgaatattcaaatatgcagcgtgatggtgttggggttcatttcagttcccgtcctggctgtccggctccgctgctggtggttgctcgatttgaccgggcagattaaggttcggatcgaggtggcgttgcatgtgcggatgatgatttgttaaggtgggcaatagctcctaccagactccctgtactgtacgtgagtacgttactaatcctgctacatcccggaagctgcggaccagcttcggttcctgtcaattgcatgccccgatcgatcgcgatgcacgtacgggctcggatcgtaccccgtcgcgtttaagttaataatcgacacacgtgcaccagcattaatatgtcatcactaactccaacgacgtgctccacgtacgtacagactcctaaaccgggtactgtagctggcatccgccgttcgattttgctcgtcgtattcgtgtgccagactgccagggcacatattcatgttccaaaaactgatcgatgtgtgtacgagcgcgctcacgcgaacgtgtagccggctagccgctcgtgcgcacgcggcctgcgtgcaccggtcgttttcagttgtgcgcaagcgcacacgcacgcgcgcacggacgtgtcgcgcaccaaccgcgtcgccttttttgccctccccggctttccctccctcccgttttcgtcgtttcatgtcgacgtcgccttaatttgaggcgtatgggcgtatggctaccgctgagatcgacgtgcgcgttcgccggccgtcgctgcccacgagacgttcgtacgagaaatggaccgccacagcgcctgttctactttacccgttcccaaatttttggacgaaatgcagcggtggtgtcacggaaagccccaaaggataatgttaaacagatcgccgttaccgatcgcagcttatagtagagatctgatcccagcgcgtgtagttcatgcatcacgctgcacagctgggcgagctggcaacagactagtagtagtcctcgactcctgaccacacctaacgaagcgacctgttgtccggttgagaccggagagacgggcagagggtgtgaaggacaggtcatgtgatggtgaggaccgaagaggagcttgaggtgtgtcgcccggtggatcgaggcggtcggtagtcggtacggtacctagctgggctgagtattcgtctcatcttgggctttctggcctgtatcagtaggaccgcaggagtatactagtactagtacgtacgtacacaatatactagtaccactgtactacgtacggcacatggcatgttccccacttgccctgttcgttcatgggaatcggatgagcaactttaatacaactgcaagtcagtcttaaacaaatactgcaagtctactactgtcggccggagtagcttaatactggagtactccactatttacgccgtgtttagttctaaaataattcatcaaaatttcaacttttccatcacatcaaaactttcctacataaacaaactttcaactttttttatcacaccatttcaatttcaaccaaatttttaattttggtgtgaattagacacagtccgtgtcgaagtagtacttattacagtactgatctacagcattattgttgtagcaggcacctgcagatgcagccttcctgatgccgccctgatgacggatcgtcgtttggagaagggggattggaactgatcatcacaaagaaatacggagtagagtaactgcgatatgtagtgcagtctcctaacctcgagttcttttgagcagtctgaacaagacagataacatatgaccgtgttccagagtgcatcggtaatttgtgaaagttttcagaaaacagagaactctatacatactaaaaacacacaaagcctgttgataataagcacgtgaccatcagtgcctgttgctagattaattctatttacatgtgtatccatcagtgcttcacactacagatcaaattggcaagtcgatcgatgccactcacggcgcctagctcggcgcacacttgcacaggcaatagattcacccatcagccatatcagtccatcgcgcagcggcaagttgggcctctttcttgcctgcctcgtaccgtcgcgagagggacaactaaccacacgagcgcgcgcgcacgagcaaaagagagcacaggagataagcacgtagtagctaccagctagcgactgccatcccattgaaaggggccgagatcgatgcgtgcagcatccaaagcatatatgcatgcatccacctgattattcgtcttatcaacacacacatacgaaagataaatcaattaatcatgaacaggaacgcacgaacgtccatgatcgatcacgagctgatcaaaaatcatccatcactcagtagcccggttgcattcagtcgacactgatgatcgatgatccatgggcgcacgggtcgctcgccgcggtacgaacgtgtacgcgcgtgtggcagaagggtgtcgcgggtgagccgtgatatgaccgcgcgcgcgcacatgccccacgtcgaccgataaggggcggcgccggccacaccgcggcgcgacggagaccgctgcgtggcgatatggaggcagcggcgctttcccgctggggccgagtgcctctctcgtccaaccgcggtctcgatcgacggcgacgtacgcttgtagatggctccgtcggtccgtcccaacaatgcaccaccgtgatgaaatcaacttctttgccgttcataaagttcgtattctaccgtaccgtacaccatcgggattttacactacgccagctcaggttatcagtgatgggttcaaatcgtcacttttgatggatttgacccttgtcagatattagtggttaacgatgactcctctcaccttttacgagtggagactcttacgtggtgaccataatatgtgacgggccacaaaatttcacctgttacacaggagattgttctctaacgggcaatatattatcacccctgtcactgagctacttaatgggggcaaaaagagattcaattcacatgttagcacagtgtcactgatatatattaaccgtgagaaatggttaattcttgttcatcgttgtcatattaacacaatgtcaagaaaaactacaaacctatagctgattgattgagatcctatcgatattggctggccttgctacatcgcatcagcctgttgaccaatcggctccttgatcttatatgatctatctatttatcttgttagttgcaggatcaaactaattagcacaccgtaaacccgattgataggaccagcattggaactaattaaatagtcctcctaggccttcgtgtgtgacgaatttcacgtaacaaccaacgcaagctcgagccaccattaggtcatgactagtcagatccggcgtctcccgacctcggggatactcgtgggcgacgacggcggtggcttggggattgaagttgcagcgacagacagtgctcagggatgcaggaggtgggtgcttggggacgaaggcaaagcccacgacggcgagtgctttggactcggcggctggtgcactcgatgagggtgaggaggtgtgagagagagagattgtggcctctggtctcaagttgttggtgggggatagaaaagaagagagagagagagatgagagattgtggcctctggtctcaagttgttgatgggggatagaaaagaatatggttcctctggttttgtgtgatgggacttatctttgatgggtgcatattctgtacccgtcacagatgaagagtcgcctctaacgggtctatgtttgaatctgttaaatgtgagttgtgccgagtatgtacaagaggcatgtcacagatgtctacgtgtgatgagccatgtctcatagccttatttacaacggaatttatttggatccgttagagataaaggtcgtttgggacgagacattttggacggtaagatatagatcatcagtgatgtgctattctgttgtagtgttattcagaactgtcagtttgattatattggactgatgtggaccaacgcttcaaagtgatttctattgctccagctagcataagagtagtactacactatccctctgtctcataatataagggattttaagtttttacttgcactgtttgatcactcgttttattaaaaaaaatcgtacaaatataaaaaacgaaaagttgtgcttaaagtactttggataataaagtaagtcaaaaaaaaataaataataattataattttttttaataagacgagtgatcaaacagtgcaaacaaaaactcaaaatctcttatattatagaacggagggagtatatattagtgcacaacttgaataaattagccacttaattaagcccggcccatgcctccccctcatttccataccatcgccggttctctttctagcgggcatggaataatatattgagatagcaatatagtaggacctaattatagcgttatgatagcgaaaagttccgattgcaccgaagggaaaggaaaaggtagagatttggtgcataaatattgcctgttgtcttcatgctcccatccttagcccatgtttatttgtctcatccactccacttacaaaaaaggagggctagctaatgaaatgatacgattaaaaatgatttctcgaaaagaaggagcggctatacttaaaaaatttcttgagggccactaactaatcatacgcatcgatcattatagcgggccagaatagctttttaagtacatgcatgcatgatccacggatcaattggatatttctggtcagacgcacagtattatattttgttggatcctttcagtactggcttttctcaaactaacactgcacggaaagacaatgctactaccgaacggagaaatcgttgaagatgaatgcatcgaatatccgacgaacggcgccgggtttgccacaagcagagaaatcaattatgaaagagctagtagtactccccaatttcttttcgtcaaaaaagaaaataataaatctgcacacgtgtgtgtaagagctactcgtcgcttaacagcggatgatctttcatgacttgatagatggttgttgttaatttgttgactgtgcattgtgctagcatgattggaatgttcaagatgaacctagctaacttgataaataaatggtggccactaacagtacatgaaggtgaaatgagaacgatgcaccataatttttccccgaaaaatgttccttttcttttcacgaagatatgcaatcgtttgtgcacaatactagtactactagcactatttacctgcccggatactgcgtcactcaccatgcggcataccagtttttggacggaacggcgttgcctgccgcgcgagcgtggcgtggcgccggggtccccatggcgagttggcttggcccggccgcacggggggagcattaaacccccgttggcctcttccgccccgaaatcccgttgcccccgacggaaatccggcaaggtagagcccgcggagtgcgaccgtgacggcgaccgcgaccacgtgacccaacctcccctgccccccctagcgaagaggccgagcaaaaatcagcaaacggccggaccacgcgccgctctcacgcaccccgtgggcagtggcggatgcgtacgacgcgcggcgacgggctcgggctagctagtgggctagcggctcgatcgattggtttacagttttagcccgcgcagcacacggcgcgcgcggcggtcggtggagcgagcgcgacagcgcggtgcgggtgcgtgtgcgtgtgcgtgtgcgagttggggtgggtgggtgggtggtggtggcccgccaggcatgcccgcacggttgggtttgatgccaacgtcgcaccgttcagttgatgtgtgattcttgcctctctgttttcctttttctttcttcttctctcggtttgctggttgatttatggggggtgtttggttcgttcttcatcgtttccttgtgtactgtttccttgaccagaacctcgcttgcttgcagttgcagactcggacaaagctaaaagatcctcgtacttgttggtgttatactactacaaaggaggccactcctgccgactgtgtccaaaacagtacacaagtagctgtgactgcctgtgagggggttcaaatcccgtcatcatctctacctattactttcttcaagtacagtatgttttaagaaaaattaccacttgattaatttggtaatcagagcagccagcttgtgaaattgtgcttctcccatggtggccgggctaaactagtagagcttattttctgtagaatacctcctgatgatgtaaccagaaattatctatcaataaagatgggttaagcatgatttcgcacaggattgaccctctccaaccaaaacccaaccaaatccagggagtcatccaaaaaatatttaagagcaaagctaaccacacaagcagatactgcaacaagtggcctttttttgccggttgcaacaagtggttttcataagttttttttagataaagtggctttcggaagtaaatgtgaggcaatgaggcagtccagattcaaagcaaccctatcaagatcgaagctcaagtccagatgtcttaaattaggcagccgtacgataggagaaaaactggaggtagcagctctccagctggctggctaagagctggaactccatactccatccgtcaaaaaaaaaaaaaaaagacaacttctgggaatgaacctggacaagcatttatctagattcatcctcagaagttagttttttgtgggacggagggtgactttgcgagctgaatcagctgctaaaaaaatggctttgtgattggttttcctccactccttgaagccacactaaacaccagctgtgtaataaagggtgcgtgcctcctgtcacaccagggtccaattttgtcaaaagatttttctttaggccaggaggaggagattagtatggtactagaagcgatctctcgctaatctgtcaaggttcgataggctctttcaataaagggggactagtatgttgaccaggatacgtaatactactagattttagcaaagcatgtgaatgggggtctagttgggattagttattagcttatggatgatctgttagtagtaaagaattcagagttctcgagctgaatggttcagaaaagttggttgatcaattgctacgttacatataatcgggtgggtactccatagtataattaaaccatcaagttgaggaaccttaattggatcaaggaaaagggggttaattaagatctgaccgatcagcttcttaggcttttccgagttatcagtgagttggtgcaggtgttatatgtcagaaaattctgtcatcattggttatttatttatatctgcttctattggctcgagcacgctgtcatcggctgttctttatagctgctttaatttgttagctcaagcacgaatcttcactacgtcatattggacccgtccagttgtagggtcccttttaaattatagggttgaaaaaaatagagaaatagaaaaaacacatgattctgatagggattgaagggtaaaacagagaaatacaaaacacagaaaaaacactggaatggtcgtttgattggagcgcatgaaaaatacaggaatcggatgagagagatagactcaaaggaaatttttcaagaggttggagctcttgatatatttcctctaaaatccacatgcaatgtgccattccataggaatttcataggatttagaaagcttcaatcctttgaatcaaagggccaaataggaaaatttcctataggatttgaataatatgaaattcctgcataaatcctttgattgggcccctttgaatcgcaggaatggaaaaacggaggaataggaaaaacgcaggattctgacaggaatgcatgtgtaaaacagaggattggaaaatacaggaaaaacacaggaatgaccgtttgattggaccatataaaaaacgaaggaatcggatgagagagatatactcaaaggaatttttccaaaaggttggacctcttgctaactttcctctaaaatctctctataggattacccattccataggaattttaaaggatactataggattcaatcctttgtttcaaagggtttcatagaaaattttttcataggattaaaatccttcaaatttcctacacttttcctacaaatcaaaagggaccctaagtttcgtgcttaatggatctacatccagtacgtatacgcaggtcctcaatcatacggtccaagtcaatagaacaaaagaaaaatatcgcaccagctgccggtacgtacgcaggtatatgattggggtacatcttgcacgatcatgcatatgccccatgatagacacttgtatgtgacagagaattttagtagtattactccagcagcaggcagtactagtcagcaagcagctgcctgggcatcgatctgcagcaagccaacgaaccgtagccgcgcagacgtcgatccgtcacgcaatggcactatggcaggtatgggccgtatggcgccatggcaatggcatattggggtagcatgcagcgatacatggcaggtggtggtgactctctcgctgggacctagctagcgagtgtgcgtgtgtgcgcgcgcgcctgtggttggtgagagcgacaggtacgtgcatgcgcgcgcgacgcaaccaccggccgggccacgcgtacataaaagcagggggccagccgcgggcaactaaccgatcgaggaggcgcccggcctccgagcctcggacggcgaccgtgcggggcggccacggcgcagcgaggggacacgcggggccaccccggcctgccggccgaacgcgacggacgaatcgatcgatcgatcgatcgatcgcccgcgcgcccgcgatcgaaagctacggcggtgacggccaccggacgagccacggccacgcgcacgctcgtgctgactgcggaccgcgcgcccgggttgcaaacggcacaggaatcccttgttgcaaccgacgaaccgagctaagacaaaaacaccttgcattggaacttggaagtaatctttgtaggcacccttgacagagttttacgcagtagtcggtatacaccgtagtagtaacttttttgcgggtagtgtcttgagatctgcaatcatgtccaaatctattggaaaggggagagcaaggaggagtaataaaagacaaaagaccggtaacacctgaagtgtcttcgcacaagtagcggcatcaaaaagaagaatgtatggtgatgccatgattgcagggggcctaaagacggaatggccatcgcacgttgttggtgggtagtagtagaagctttaatctaagctaagttcacaactatgggtctatctggtagaggctcaactcctaaatttagtttcagaagataagtttgtagtggagttatgaagctgcctaaacccaacttcacctatctagctagttcgttttgtgagagagtttcacccagctctactcctatttcagatgaaactgaaactatttggataattgaaagatagaaaaaacatcatcctatattcacgaagcaattgcgggcatagaaaattttcattgggtgatttaatctgagcttgcaaataaaaaagacgtgtttctaatctcactctcttttctttctattaaaataacgatgcacacgtgcacacccataaatatgtctcttaacatatgctaaaaagagacggagactaaaaacatattcgtcaccccactaaactcctattgaaagtgcactcatgtctaggtaatatttcaagtctaatgaataagtcacgtacctgcgacacttcaccatcagtagtggtgaaaaaaaaaaactcaactagtggctgggatcgacttatatcatgcttagttcagatcagctctaacttgtagtcataacaagttgaatcaagctaggcttttagcacgtgaacggcttgttagtataaaatagggtaaattggctataaaatatcaccatatgttcatattcttagtgcatattaactagcatttagtcgtttaattacatgttaactatatttaggaaaatctttagtaattagtgtttattattatgtcaatacctactaaaattgtaaatttaaaattacaattcataaccactggaaaaccaaatacaatatcataaacgttgctcaacagagagctacttgaagatctaatgagataaattattgttgggattattctcatggcaatcaataacccagtgaagctgaaaagaacatggattcatcgcaacagtatttttcattgtatatcctcttctaaagaaactgtattgcactttaaaaagaaaaaagacatggtactgtattggcatagtctttacagttttttttttctttttgcaagacgatgcatgcccggcgtacacggcactaatatattatatactaaaagtccattaaactccctacaaacgctcctaagccgtcacatggtgtttctacaaacactcctaaaccgccacgtggcactatctaatctcaccgttgattttctcttaagttggtgcacccgttaatttagaccattagattagatctattattaaaaaggtgatagtttttcctaaaaaaaatatgcaactggtggctaggaaaaggaaagaaaactaaatttccatacgcaagtataattgagaaaaaaaaacaaataaagcttcctactgttaggcggaagaaaaagaaataaacatctaagtacgataaaaaatgataaagccaaaaaaaagtgtagttagtaccggtggaaaaaacgaaggtctaatgtacgattttgtataatataaaatataatattacataatatacagaagtacatgcatgtaatctagatctataatataaatatcaaatatcaaatatcaaatcaacggtctctaaacattatcttttaatttatttttaattgtatgcccaatttatgatccattgtattcgtttaattatataaagtaatgatgtataaaagtaatattatgatcttaaatacatcatgacacgttgggtcgacatacaataggtaactttagacactaaaaatctattaaatttcctacaaacgcttctaaatagccatttggcgcttctacgaacggttctacgccaccatgtggtgctctaataaattagagaaaaccttacaaattgtgagaaaaaaatcatgcaatcatttttattggttgacctactattttaaaatattagattatatttatttaaaatacatctaacctgctcaaataataaaaatcacgtgaatagttgtacgtatatatacatacttccgtactttgctagcttaaaaaaaggaaaaaatgtaattacgattgaaaaaagaaggattagccctgccacggtcccacctaattgttacgagttacacgtacataggtacctttcatccaaaaaagtgaaaaaaaaatctcaaatgtacaatgcatactactattcaccagattgagaaaaaaattctcccggatatgtacaaaccctgtcatcggctttcacttaaatcatttagaaaaattagaaaaataaaatctccacctcctcctcactctcacatctacgcaacactgtcgtcccctccctattgttttatctattaaattaaaagagaaacaataaataaagtttgatatttttttaatacatagtagaaacgtgggcactcacaacgcgcgtacactcatatctatgaacgcgcacatgcacatactcctatgagtacttccgagagattaggctgatatatattgagattgacaaagtcactatgtatgtctcgctgtcgacgggtacgtcacctactactgaaagaatttgtcaagtctgggatatgaacccgagtgggtaaattccatcacaacgaacctaaccagttgagctacattcacttcacaataatattggatattaaaccgaccataatttgtaagctacatttctagaatacttatatgccttttaaaccagtggaaacattatttctaacagttatatctatcttgtataagaaaaaccagatgtgtatacatggtacatcacatttcaaaaatattattgtgcaattatatttcgatttcacattagcttgcatggaacttctgacccactctacatgaaatgttcatacatggatcatggatcggctctcaaattatatcaatcatattagcctatataaacccatatatttaatggagcatcatgtcccacccaattaatccttgaataaaccatgataatatatatgcaattgaaaatgaaaaatagcttagttttactttacacttacttttcgttgacatgttttctaaagaaaataagtctactttcttttcaagtgatgaagaagattataaataatttcttatagatattacttaaatatgatataatataaaactaataggttagaaaattataaaataaattaatgtcgacgaaaacaatttatggacaaatcgtggtagatgttcaccggttaatattttgctcttatgagtgtctcaaacttagcatgtgacacatgcccgcgcattcgcgcaggctaccttcctagttataacgaaatgtcgtatggccgtaaggtgcgtattttgttaacaatgtataagagatcaagaaaaatatgagagaaacgtatgtgccaaatattgataacgtataaccattcacacatactctctcctgtttaaaataactcaatttaagaatataatatgatatattctattataataaatttggataaaatgcatgattaagttattttgtgatagagaaaatacgtcggaatatatattaacactatacaaccattttgtcaattgaccacgtttgtaccggtgaaatgggatcaactttttgctggtgatgggcaacagtagccattcaagaaagctgcaactttactgctccacattcatgggcagggcgcattcatggtgcgtggtaaaatgcctcacaaatatgaatgcacgaacaaccgaaccacttaggtcgtgtgtagttgttttggtaaaaaaaaaaaattaacgtacagggacacacatttgaagttacatatttcgtctgtaaactgcgaaatgaatctattaaacctaattaatctatcattagcaaatatttactgtagcaccacattgttaaattattatgtaattaggctcaaaagatttgtctcgcaatttgcatataaactatacaatttattttcttttccaaatatatggtgtgatcgaaaagttggaagtttgaaaggaaactaaacacacagccttagtcgcatgtaatgtcacctagagagagagagacccccgggggggacgctgttatcagtgcagaaagtcagcaatgcaacctgcgcttttgttttgctagattttcacatactcctggccgatgatactactgctagatcgctcagccggtcactcgtccagctacccagtcactgtgccatgataactctgtccctggatgccctacatgtcctctcccaacagataagggtggaagcattaggccaagcacagccatcctggggcccagacttgatgccctccttttgaacacaagcacaaattgagaaatacaaatggtgatacacaaccatacacgcatcgcgccgacaacaatgctagattgctaggtactcctacacttcgaaacaattaaagtgccatgcatgctgatgcacgacaaatctttaagcatagttctaaacgcagtgcaaaaataggccgaggaacatggcgcattttggggctcctaggaattaaataattcagcaaaaataagtgaccacacagtattggtttgttgttgtttacgtgtagaaatgctaccaatttgttcgcgtcagaagtgcattccccacatctaaccaatttcaagcattaccatccaattcatagtatagtgctataatctagtctttttggtctttcaaaattcggtcctttaaattggaagaccgaacttgtcaatggaagtatttaaactggccatttggttaaccgatagttttggtctaaccaaacattcatcttccttgtaggattgtaggtgagcaagccgcacacttgcagatgacttagacgcaaatgtggtacttgcctttaacataggcttccggctctcccccaaggagatggttgccatcgaccatcgtgcactgtcttttttggtgatgctcgaggacgtgaagtgcacaaaagaggagacatcctcgctagctatggtgcgtggagtggagaggctcaacggctgtcaccgttactccttaggtgttggtgcggttgtggtggctcgttaccaccaaacacccggtaaacatattgttctccaagtctggtttatctcagatctgatctgaaacatgtgacctcgatgttcaacaaatcacaatctccttgtcatcccctaccttgttattcctccaaacctcaccaccaaacactaacaagagaagagattgttctccccttcctccctctctatgtaccactttatttctagcaccttgccgttgaggcagcggtggccaatgagggacaaaagccatggagacattctagccagagaggtccactcaagaagttctgaggtgaggagaggggagaggagcgccaagataacatacgaggcgtcaagtgctatcgtggatgaggaagtggaagggatatattgatgaatgaggaggggattaggataaggcttgaatagatcggtaattcaagtatccgatgcaataaactaatcaaataattggtcctgtaaacatgagacctagaccgagttagggaccaatgatcgatactatgttttttcaggtttggtctcgggttttcagttttgatttttgtctcaatttttacccatccctagatatagttcgccatcgtcatcacctattaatgtcccttatatagcgtgtttccgttaaaattcttcctgctagatatgttttgccttttctttttcagttttgcgttttacctccccatctcatcacctccattgcatggaacttccttgctatggcgtgtcattgtcactctccacacttctgttatcttcgccaatttaaatttcacttgatctcttgtattacgtccaacactgtattttttttctttagaattgcattattttgatatcgttttagtttgtgacattgtcataagaacaatatcaaacgcatctgttactgctgccaccaataccacggtttcttttttccttaccatttatagggcgaatgaatgattttttcttgccttcacttcctttatttgccaccaagcctgctgaagttgcacctcatgttctcttctatcctatgttgtgttacattaaaatcaatggccaaaagcttatattggtactggcgtggatggtctttctaagattgtcttaaatgtgtatgaatgataaatgtgtatgaatgtaggcccgcattgctaacataattcaagagtagcatgtaggcccacattgtaagagtaatttattctagactaaaatagtgtgttatatatagttatttttaaaaaagaaagtctcttaactactatctccttcgtttcatattataaaactttctagcattgtccacattcatatatatatatatatattaataaatttaaacatatatatgtgtctagattcattaaaatctatatgaatgcgggcaatgctagaacgtcttataatatgaaacggagggaatatgtactagctacttgaaagttgaaattcctaacaactttgacatagtgatagttttgatcgaaagaagtaattcaaaaaatccattgtgctacagtaaaccaacagaagtcatcctaatcctctgtgggagcatttccaagtatcaaatggtccgtagattcgtataatcgtatttcagttgattctacacgaagagcgtgtccaattacttttaacgactcagaagttgtaacccatcaagccacatggtggtacagatgcaactattccaaggggggataatgatagcactgggcgagcaaaatttaagccagagcgctaacgctatgcggacaggcagagggcccactcccttgtggtgatgtcagagactccattctgaggcacagtttgtcaatgtcaccatggctcctgtagcttttccaggctttgtgtttgtgttggatgtgtatgtgttccactatagttgcacccaggggacagactccatggggactttttttgagctcctcgaagcctcaaaggtaaaaaaaaactgaagaaaaagaaaaactcatttggcctagagaaaacgacctgtctagactgtggagattggagaagctacttgtggagatataaagaccaaaaccagaatgcctttcagcaagttcatgaatttttacccaatgtgactagctctgctctgcactaaattctctcacagtaaaaggaatgggcaaaccaagacaaggagcacactgcaagctcaaatcctgaacttgaaagcaaccatacgtttgaacaaccatcttgaaatctgggggaatctgcatgcatgccagtgtgccgctcactttgcggacacacacatcattagtttgacaacgcccaagcatcggacacagcaccatgcaagtataatagtgagggtggttattataagattgggagccatgttacctaggcgattaggataatcagagaggacaaaaaatgcttaggggaacctttgaccaactaaaggctaagctaagcccctcttatgaaatgatttgaagacaaagcaagctagccccccgaaattaaagaaaggtgcttgtgctgcgtgagtgcgtcttcttgcgtgggtgtgtcactggctcactgcacctgaccccacgcaagcaaagccatgctctacctcacatggaaacaggagctgtgtcagcctcttgactggccatttgctgttcaacctgtcatgtttctctctcccacaccaccaccctcctccaccaccccctccagtggtgcttcttctcagattcggatgccatttacttgcaatgaccaccctgcaataatatccatctgcaataaatattcattgcatgtttgatgaactcatgcacatttaaaccattgtcaagagacaagagaaggggaaaaaatgacgaggagcaacctaggcggattttgattttgcgccaaagaaaattcaacatttatatatgtacatacacagctcttactgcgacgcgacgggaaaaacaaacagggagacgaagaaagctgcgaaaaaagaaagaagaaaagatctactcctataggtacataacaacttcgactgatcaacctacagctggaaaattcttatcttgtagcaccatcagaagcgattgctaagcttgtgtggagagttcaaaatggcatccatctgattctgaatgactgttgtttctacgggcatttcgccgccgactggcctcgttggtggccactcaccgccggctgtttctcctgtgtgtcggtggttgttgtttctaatccttctcctccttggcttccctgaggggcatgtcaaggaccccatagcctccctcatcgatcgagcccgctgccgccgacgaggtcttcgagtcgaccgtcgacccagcttggatctccttgaacattgccatcaccttcagcatcgtcggccgcctcgacggccggtcatccaagcacgcacaggcgattttcaaatgctccagcagctcaagctcgacggatggatcctccttgagtagctcagggtcgaagacatccgtgatcttcaatttggtgtgctgcttgacccaccccacaaggttattgtcctcgccaaagtctgccgagtccgtcggcggtttcccggtgagcagctccagcaacacaacaccatagctataaacatcacccttggtggtgcatctgaagctctggtagtactccggtggtacataccctggcgttccagcaagagtggacacgctaaggtgtgtatccaccacgctcatcagcctcgccataccgaaatcagatacccttgcttccagttgttcatcgataagcacattgctcgacttcatgtctcggtgaatgatgtgaggaatgcaattgtggtggaggaatgccaaaccccttgctgctccaacagcgattttccgtcttgcctcccaattcagctttttaccgatctttttgcggtcatgcaacacatcctccaagctgccaaacttcatgtaatcatacaccaacaaccgctcctcaccagccttgcaatagccaagaagtggaacaaggttacggtgtttgatcttgccaatggtctccatttctgcagtgaactcccggtcaccctgcccgctcacatgtattagcttcttgattgcaacaaccttcccatccttgagctgtgccttgtagacatcaccaaacccaccagacccaatttggcatgcgatgtggaagccatttgtggcctcaacaagatcagccagggtgagattctgcaatggcttctcgaatgcagccaggttgatgctaagaagatttgtaccggagagattttgcctccaatcagaattcatagttgcagaatgtgacctgctatcaatatatatatcacgagaggtactcgcctcctcattcttcagcctccgccgcttgctcccaatggctatgatgatcacaattatacagaacagtgagaataacagtcccatagcgatactgcttgccatcgatgcctgcctccggtgggattggtggtcattggaagatcttggggaactatggtcacatggtggcagtgggaagccacataaaccagtgttattctcatactggctcttcggaaatgtggcaagggaaccaagctctggaattgttccattcagctgattatttgacagattgatctccgacaaggaaagtgccgagaaagagttgggtattggcccttccaactggttatacgacaggtcaagcaccgcaagcttcttggcctctgctagccgcgatgggatggtacctgacagtaggttgtgcccaagattcatgatcatgaggtagaacatgtcccccagctcgccaggaatcgccgagtccagctgattatatgacaaatcgagaaatatcatcgaaccattcttgttgaaggtgtactccgtgctccccacatacattcttgtgaagttgcacagcttcttgctcggcatccgactgaggtcatcaggtcggatgctggtaaactccagcaagctccccttgccacggcactcgctgctcagctcgtcgttgcgaagataaacgtaaggccgtccaactatgaggccaacattcatcttcccagactgtttggccagctctttgggtattgatccattcagctgattgctattcaggtccagccacaccaagctctggcagtcaccgagctctggcggtataggccccgagaaggaattgttgctgagcttcaagatagccaagtagctgagcttcccaagccatgaagggattggcccggacagccggttgctcgccaaagaaatccagttcagcttggtgcacttggctagctccggcgggatgctacccgtgagcccgttgtagtcgaggatgagatgctcgaggccctgaatgcgcgacagggacgccggtatctcgccctccagctcgttctgccacaggatgaggtcctgcaggttgccaaggtcgccgagggatgccgggatggacccattgatgtagttgaggctgaggtcgagggagacgaggctggtgcagttggagacggcgtctgggatgccgccggtgaggtagttgttctgaaggtacagcagatggagcttggagttgggatcttggcagagggacgacgggatggtgccggagaaggtgttggagctgaggtcgagctgctggagctccggcagcgaggctacggtgtccgggatggagccgttgaagtggttgaaggagagggagagcgccgtaagctgctgcagctttgcgaaagcctcgccggggagctcgccggagaagttgttgttggagaggttgagggcgttgagcgacgtgaggccggcgatgtccggagggaacacgccggcgaggtggttgaaggagaggttgagcactttcagaccgcggcagtcggaaagtgccccgccgggcacctcaccgacgatgaggttgccggagaggtcaaggtactgaagcccggagcagttggtgaactccgggacaccggagatcctgttcagggcaaggtccaaccaccgtactgccccgactccggcatccaccatccaccggaggtcgctatcgtcggtgatcttgttgttggacaaatcaagcgagtccagcccggcaaagcccgggccaccaccgccaccgaccttcgccgcaccaaccgcatcgccggagagattcagcgtcttgaggccgccgcaggcgctggccagggccgccacgtcggcgacggagccccggagcgcggcattcccggacaaatcgagcgcctgcagcttgctcccgcacctcgcgccgccagccgccgagagcgcgccgctgacgttggcgccgcggaggctcagcacctcgacgctgccgagctgcagcagggtggccgcgacggcgcggaactcggcattgagcggcacgccggcgagcgacagcgacgtgagcctcccgttccggcacccggcccccgggaacctgcacgcgccgtcgccgccgctccaccccttgagcgccgcctggttcggcaccgcctgcctgaactcctcgagcagctgggcgtcgtcggccgccgccgcccccctcaccaccaccgccgccgccacaaacagtgccgctatcgctgcccacaaggaatccatgtacgagcgagctcactgcctcacgaccattagagagaacctggcctgctgcgagagcggcggtagagagagaaagtagagagacagaagggggagagtgggaagtgatgaggaggagatggagagagagagaaagagaagcgaagaagaaagacgcaaacacagtagagggggagagcaattaggccagtcacaatggctagtgtcattgcacggctacccaaaatattataccatcttctctcaaatgaaatcttttatgaaacaatccccacagtggaggggtttcactttgacgtttccaagactaagcaaagcatttaattgatacaagttgctgggatcatttgtacccaaaatccggcgcggcgcgggagaatgcggaggtcgcacggcggaggcggacgcaagagatccggtgaatgaaacgaatcggcctcaacgggggtttcactctgttaccgaggacttggaaacgacgctgacgagtttcaccaggatgaaactctttccttctctctcatccccatttcatgcaaataatcattttttattcagtcttacccctattaaatgtgcatgacacaccagtgaaacccccattgtgactggccttaacagctgtaggtgagggaggagtggtggggtggggtcacatggcatgtgctctcgcctgcgaatcgcagcccccccgcgcgcttaagccgggtgaggaggagagcagaggagaggttaagtattctaatcccccgcgcttatccgcggcttacggcgaggttaaatcccgatccgatccgacggccggggacagccggtggtctgctcgaggcgcggtcacgtgccgtcgcgagggggagggttgcgcgccggattgaccggactgccctcgcgcggcgctgcggcgggctcgtgggcagcgcggggatttcacgcctgtggtgtggcctcgcgcggatgggctcgggtcgcgttccgagcgtgcggaatccctgggcgggcgtggactcgtggagggaaccggacgcgtgggcttgcgttgcttcgcgaagggttttttgtctttaatttccgaagtggggtggtagatccgatccgggagccgaagaagcgtgcggtggaggctgcggcgtgcgacctttttttcagggtgctccgcttccccaatatgcccacgacgacgttgtcacttgtcactaggggtggaaacgagccgagcggctcggcttgcaatggctcgcaacaagctagtctcggcttggctcggctcggttatagcaatgagctaaaacatgagcttggctcggctcgtttgtggctcgagctagctcgagctggcttgcgagccttccattaagctatataatttataatcattaaaaaaagtaataacaaataattaatatgtaaaattaaaataactttatatattcaattcatcaaaatataaatgataaattacatattgacaaataataacttcactagaaaataaaatcacccatataattaatgatagcgtaggctcacgagccaaatcaagcgactcgcgagacagctcaggctcggctcgtttcagaaacgagctagaaaggacgcttaggcttggctcgtttggtatttaagccgagccaagctaagcgagctcgagccaagcccgagctgagctcgcgagcccaaactttttttccacccctacttgtcacggagccgacggtgcagtgatcgcctgatcaggggggaggggatcgcgtacgtacgtttccctgccctgacaggcatgagatcgtcacacgccgcggatacactgcgccgtgaaaataaagataaaggtttcctacccgcaaaagaaagataaattttggctagaaaaagattaatggtacatgcactttcaggttttactgaccatttacaagatattgtcgtacagtgttcaatggaatcaattgtgtgacaataagatcttccttggtatgacctgagacagtaagaattgtgtacgcatgttagaggtacttatcagatgtatatgtctatgaaaaggaatgagaactctatatcggagcacatatcataaaccttgattcaaaataatgaattgaccatgagaattgcctgacaaaatcaacctaaactatccatgcattgggggtcagatcgacaattggttaataaatgtgttaaggatggtaaaagaagcaaattttgtttatgtactctatatatactagactaaattaaaccagtggataagggggcagtccaatgctgcactgggtttcaaggtagagaattttacgtatacactgtattagtataatatctatagtcggtataagtgatcaatgggtttagattaaattgttatcacatcttttaatcttgtgacaaaattctaaattgtccttattataccgacaatatatattaacaatatactatgtattaagtaaaagttctctcgaggtattgcttaccggcaaccgcacctcaatttacttcatattcaggggacatgagaaatcaagaattaagaaaccattgagacggtgtttgatatgaagataaaaattaagtgttttatgtaaaacgaggtgataataacgtgtgattaatcgagttttaattattataaatttgaaattggattaatctgatattttagaacaacttttatataaaaagttttcacacgaaacatgccgtttagtagtttgaaaaacgtgccacttttatccaaaaaattatccactttttttatggaatctaacggggcctgtgtagctttggtgagaatttgatgggtttatcaagtttctgcttctaatccctttactatatattatgactacatattcttgaaaattatgagagaatctaaacagtttaagggaggtagatattatgaaataagttacggttattagaaactctcaggcaaagcttaagatggtacgatctccgctactgaaatatctctcctcagtgctgtagcatctactcccttcgtcttatattatattaagtttattttttctcctctcatttatcatagtataaattaatttttaagtaattattgtatcaaaattgtgaaagtagagaataattgattatgcggcttaattagctagagtaagttaaactcaacaacgaaacatgatcaagatatatagaaagcgaagtgtgcgtactgatctcgtcacaatcctattaaaaaggaaaaactaagtatgtaagtaaaactttcctttataacggtgctcgttttatagctatgtatattcacttatgaatatagagaggctgacttctaccccttttttttttcaaaaaaagaaatgccccttccaatcaagtctgcataggcatatactccactgcaagtatatgcttatgcatcaatgttgcctagtatgacattggtgaagaatacaatataccatatttcttttctgtattccactgcaaaaggcgagatagccattcaaaattcctcccatacatatataacatggctagaattatccttcgaatttttcctgcagtacaaacagccgtatacagaacaccataaaacgtacgcagctgctaattcatgattagcacagcaaaacccctggctcgaggtgattaagatctagtaagcctaaacaaaacaaacgtaaagttcgaaagattcagtcaaggcgagaaggggaaaaaaaacaaagcaaaaggagctttattagaagtggctccatgatgaggttacgggcacacccgtgcgtctcatccgagcgcgtcatattggagctacgaccgggagcacaatacccgtgtggcgtgccatgtgggccccaccactcatgccacagccgatccggcccaagaccatccctccctcccctccccactgacgtgtcggccccacgatccgtgggtcccgtcctccagtgagacgagcgtggccgtggacgcctgattggacaagtcactgggagatgtcgggggatggattggcggggcccgcgccgtgacagtcagcacgtgcgcctgtcccgggaccacggccggggcgcgatcgcagccgtcggattcaggttccgggagggggcccacgcggctgtggccgaacgcagccgttgggtgtgggtgtggtggcgtgggaggggtaccgggtacgggcaatctgccgttagatctctcaccgcccccgtcctttgcctctctccgatggagaaaatggtcacaacatacgaaccggccattcgtgttgttttcttccccctgccttgaccggggtggcctcgaagcaaaaccggttcgcttattaccggattgatggcggccacaagccctacacatcgtactacgtacatcgatgatcgatctcttgtgcatgcagctgcagtgctgcatggttatagcaccacagtaacaatactagtatggctcatcttaccgacaacgacaaggtgacaaagctatcttaaaaaaacaaattaaaaatctcgcgaacagtttggttcgtcttgatgtttttactggaccttggtgtgctagtactacgtagcacgaggtatcgacggaagccgtgctgcaatggccgcaacaaattaaagtctaacaaagagccgcacgcgtgggtaggaagtggtagtaaacacctccccaccgtaccgtccgcgcgcgtcgcgtacctacgcgcaattgtcttgtacgcgcgcgggcggggcgagtaaataccgcgacgtaccgtggcgtacgtggtgtggcaccgtgggtggggctagccgccgcacgtgagagccggatagagagggcgcgcgggccggcgcccgggcaattatttagctccgtcgcatgagtacgcggcgtaaaccgtggggctaagccagtagccaccaccactccccatcgttgcactttgaatgctgtgatggcgaggtggtctgctttgcttgctcctgcttaagcttaaatacacgaccctctcctcctttccagactccaatccgtcgacgactgggccggcctggcgcggtggtcaccatcgtccggtgcttcgacttgccgctgggggtagtaggagtagctaggtttgtttgattgttcgtatgtccgtcccctgcaacagatgtctgttgcgtcgctaggttggggtcgcaattaaactctctcgggggacgggactttgttcccgttattaattctatcgtctttgcttttatcgtgtcgtctatctaatctaatctacgtagcccgaaaccccccaacattgccagcgcccagtgggccacatcacgtgtgtgggttgcgtgggttgggctggcaaatactacaccgtgggcttccacctttgcagagcactactggtctatgggttctgttccgttctgttctggcgctcctctctacgggtgatcgctaacttgccgtcttgccggattgcccgctggaaccattgtggggtaggatatgttcggtatgatcaaacgtcagctaaaatgtttgttgaaaaccgacgagaattgccaattaggcagtgctgaccgaacaaaccggccgggtcgagtgctcgagtggattgtacttccacacttgtgcttataaaagatttagagatgatggagctagaaagcagcacatccacgctaggattgctagctatagaccactgcgaacagtaactgtgtgttccagtgcaattattttagacggcatacctgacgccaaaacgcatcacaggcgcacacatgtgtggcgtgcgcttgaacagttgcacccgctttcctgccggccgagattggcacacagcattcattctctgaaatttttcccatggattcaaatccggccggtggcctaccccaactgacggattcatcgttttttcctccaaccgttcgatcttcacgtcgctgccaatccggcggataggagagctacacgtggcagttgacgagacggacacacagaggaagacagattagtcagaagtggctggcgaccaaagtcaggtcagatcagcgaaaggctaagctaaactcaacgaagacgtgacgaatgtcaaatgacgccggttgttcgttgctccctgcgtttataaatccgatcggaacgctgcactgcaagttcgcaaccaagaatctccagtcacgctagcctttctgcaagcgtagcctgacgagatcgaccacaggacaacacaggagccaacggagcgggacgccatgaggcctcaagctctcgtgctcgccaacttcctggccgccgcgctgctgcacccgttgctgtgccaaggcgccgccgccgcctcgcctgcctccatcgccgggaagctcgccatggacggttagtgcttgtgactttatacgcgcaccaagatttgcgcatcgcggcgtcgcggctgccagttccgggctaacattaggtgagttgcctgcactctgattgaattggcgcgtgttgtttgcacctcttgcaggaatggccatcgaccaagggatcgatcacttgctcgtactcgcggcgatcttcgtcatgtgcctgttccgctgagtggagggctggaggcaactgaacagctcttccctgaatattagcttctttatttttcttaatttgtacatgtacatgcatgtgttctttaaaatcttgcccaaaggttgtagaattttatcatgccgaagttcaacgaagacgttgaaataagagcgaattatgatacgtgttgtgctccatataatttattactaacggaagaaatttctaaattgcaatttttgtacccattatgtgtccagtaattcgtttatgtgccaaccgtgaagttcgttcaaataaagttcttcccaacgtactcccccgcaaaggggaaaagaaaaaattacaacatagtactgatttgtgtgccattgagctaaactaagtccagtgttggctcttagaaaatacacgttaagactattctaaaacaattgagataataaaaactctaaccattaattaacaattgataagcctccagcgtcgtcggcactttctaccacacatctccgccttgccgccgccggagtgtgctgctgaaagttacgaggtcacatggaaggtgacgtggatttcatagtagaggccacaatttatttatggggaagctcttatgtgttagggcacccacaatggttatctataggctctctacaagatatccatgttagcatattttcttacttggaagagattaaatgaagagagagaacaaagctatctactaacctgtagatagtctatagagaaaaacgaggcaatggattagagagttatagatacccaagtagacataccattaaagtggtttactattaatctagtctattgctgagatgtacatgttttataggtagcaccttactttaccattgcggatgctcttagagctctttgtcgagccgcctgtgtagctccaggggatccgtctctaccgttgccccctctccaccataagtgccatctggatctaatccactgtggttcgggcatccaaccaccccgttccacttactcagatatggcgttgctcgtcaccgaccgctggacctcctctcctgcctgttccaccaccctgttccacttactcagacgacaatgagaaaagtgagagatagaggagaagagagagaaaaggagaaagagatcaagagggtgttgatgtgggtcatcctgacatgtgggacccacgctaactcaaccattacgttggataaaactgttgtcaataccgtctaaggatcttaagtgaccggttttttaagttgagagatgccatatatctaatttttcgattgagagatgatttggtagttcggtgacagatgagggacctcgtatgtactttttcctgctgaaaatatgtgaattggacctgaacgatatcgtattgggatttagacgcgggtggttgaatgggctgaatcactatgcaacgtacgcaacgtgccgtatgccgcctcacggttccgaacctctccaccatgttggatcctgggaagcccacacacgatggcttacaaaccaacttgcaagttgcaacaaaagttacgtacccagcatcgctgcgacgcgctcctctgcgcaccggccagtcaccaagcggtcgtcgccagtcggctgcagcaagcgttcgcagcttggccgggacaaccgaaggccgtatggtgtcaaacgcctcggacacccgcgcgcagctccgctagcacgtaccccacgcatgagtgaaccaccacccggtcgtccgtgttatgccaaacgcaagaggcagccgcacgtccgcacccctcgccgcgagaaccgatcgatcgatcgatgccaagcacttgccgtttcttcgaaggagcgctcaaaaggcagcaggcgatgcgccccgcccggtttgcgccatctacgccatgccagattgccgatgcgcgtgtattaatcaacggaagggagcgacggatcgagctagcgccaatgcaaagtaaagaacgagacgatcgcagagcatggaattgatatatatctggggaatgaaatcgcggcatcatgccgtgacagagttataataatgaaatcaagggcgccaatcctggtctttaatcctgacggtaataagtaaaagaatcgcgacggaatacaacgcaaccatgtatgtaggcatgcttcttatccgatcctgcaaggaattggaaagagtttcccagtgaaagtccttgacggaccgtgcgagaggaagatccactgcctacagatacggaactgcctccgtggttacagattcatagccgcatgtttttctatttacctagctgttctcgtggcatgcatgtttagctcgatcggccgtcgagtcgtcgaccaccacgacgagcatctcttctgcatcttgcgagcatatggcctctctcgatgctgtcctgcgttcagatagcgtcttcctatagctccctgcaggtacgtagcagcactactacgccgcctgtacatgttcctttttcctacctaatcaaatgcagcaaaatcttgttcttcgtttttacatatttgctagaaaatttgattcccttcgtgtatgtgcgtgagcgtgatatatatacatgacggcaaggcattttgtttttaggtttacttactagttttttatgtggcgtgttctaatggcctcactcaaatactgtagttgaactcatggcactaacagaaaagttttgttggattagcctcatgtggatttcggttcaccacgggtgcagagccgcaaagtctacttctctagtcggccggcctatatacttttagtaagtgctgaaatcctgaaattagaaaagtgaacattaatagctctcgtactatatactcccccgtctcatttttaattgagtccagttgtaagtttacgtgttcaatatttaaccatctactccctccgtcctataatatagcaccctagtaccaaacgagatacttgaacgagatacttcatagtacaacgaaacatgacatatttcatgtccagattcgttgtactatgaagtgtctcgttcggtactaggttgctatattatgggacatagggagtatctaatttaaaaattttttataactaatatttttattattattagatgataaaacatgaatagtagtttatgtgtgacttacttttttaaaattttttaaataaaacgtacagtcaaacgttgaccacgaaaatccactatacttaagataggattggagggagtatatagtattacctatgtcccataatagatgtcgctttaactttttgcttgtaacatttgatcattcgtttaatttgaaaaattagtataaatataagaaaagataagtcataattaaaatacttttaataataaaacaagtcacaaacaaaataaataataattctaattatttttaataagataaataattaaatattaaaaactcaaagcgacaagtaatatgagatggtggtagtacgatgctagagtactacagtaaacacattatcaggaacagtcccgtgcaaagctggtacgtcctggtgccaaccatggggggtacatacatataggccatacgaaagtctgaatttggcttagtttctgttcatgaaggtatcgtcaatgttgcagagcgtatatgtatgaaaacagaccatttattggagggacaccatccttggcaagttataattaaccattggtttcgtctctatcatgattaagccccctcacgtactatcatcagtacgcgacctgaatataacatcaatatatgactttgtatgatgtcaactgtaagagctactacatatatatattttatattatacagtacaacgcactcataatgcacgtgcacttacctctataaacacacgcacgcaaattctatttcaaagactaggccggtaaatccttgagataacttgtgtgtttgcatgaactatttattttatatactgtgcataagtgtatatcttgctttagagtcatcaagatcaaaacgatttagtttaattacaatattagtattgaatacactataatacttaattatttgctgccttttatcttcttaatttagtaattattaaatacattcattaataaatacaaggttgtacttgtcatgaagtcttaatgaatttttgaatttagaattaataatacgtagctgcactcggtttggaatcttaatttagttttttcttgatataataatttcaaaatttagaagcaatacattttatattaccaatttaagaaatttgaaactaaaaattaattggcacccagttatacatcgtaactggtgttgagttttcttctaatatcatactaccagtttttaataagtaacaccattaactttttgacacatgtttaatcattcgccttttaaagaaaagtttacataattatcggtatttattttgtttataatttggttttagctataaaagattgccagatttatttattattttacagtgccgattagcgctacaacaccaggaaatttactacagtgtgctgcatatcagcatatatatgtgtacattaaggacttaggaaaagttttgggtttggctatcacatcggatatacggacacacatttaaagtattaaacgtagtctaataacaaaataaattacagattctgccaggaaactgtgagatgaatttactaagcctaattaatccgttattagcaaatgtttactgtagcaccatattgtcaaatcatgacgcaattaggcttaaaagattcgtctcgcaatttacatgcaatatgtgtaattggtttttttttcttacatttaatactccatacatgtgtcgtaacatttgatgtgacagcatgaaaatttttgttttggaaaacaaacagggccttagggtaccctttctctctccctttatggaaactaccaagaacgaagagctagctagatatttcactaatagctagctatatcatacctatagttcttgacccaattattgctcaaaagaaaatattatctctatgttttattgaccataatctccaccattgctaaaattttagtccaattattaaagttacaaaagaaggcactgatgcttctcaaatcaacgcggataacattgtctgagaagcgaagttggaacctatccaaggttttccatatgagtttaggcaccgatctataaccgctaaccgctagtctatgattttgtttttcattatctgaaaaaatgattttaaaatgattttgctgttgattgtcataacctagtggttttttttatagaagtaataaccgatcattttattttgaaaactagtaagtctcaaaccattttgtccaaaaaattttagtacaattaagaaaaccttgtttgaactattgagcggtttctaaatgcaatgccccttgtatgactggttattgtgataaatgactggttatgtcgatactgtaagagaaaatccaaaatatactattgacaaacaaccaattataaaaaatactatcgataagtgtgagttttataaaatgtcattgcctaagtgactttgtaatagaaatgtcatcgtcgttaaggttatgtcccgctccattaaatgtattgtttatcctatagcacttgacaggggttgctaacggaacattaacgacgatgatatttctgagataaagttacttgtataatggtatacattaaacacatatttaatgtaactcgtactttttgaaattaggcgcttgtaaatgccatttatcggattttctatattataaaccctgatcctaactctagtggattcctgattagtggactgtggcacacaccctttcaaaacttttggtttgaactctttcctcgcttggtcgtatcctgcagatttgagcccacgtcaaaagctagatcaccaacttgacgaggtaacaaaggagagagcacgcagagtcagtatataatataggcatagccagcagaatggcaagacaaagcagcactgcaggggcatccatactaccggtgacgaatatcggcatggccgcctccagaagcgagcttctccggccggcattcggcgagccctctccttcgctaggaccattcgtcgttaaccctcacacctgcagctacaggtgatcgaacaacctgcatccattatacatcgatcacgaactgaactgaactgaactcttgtacatcgatcggtctggtttgagtggtccactccaggtggtggcagaagttcctgatcgtgctggtgctgtacacggcgtgggcgtcgccgttcgagctggccatggagaagtcggcctcggccgcgctcgccgtcacggagctggtggtcgacgccttcttcgccgtcgacattgccgtctccttcttcgtggcgtaccgcgacgcctccaccggcctcctcgtaaccgaccgcaagaagatcgccaccaggtatacgtgatgctgatccgtcactgcatgtccatttttttttcctttttgctgctctctctattttaggttgtaagacgtttttactttaatcaaagttaaactgctttaagttgattaaatttgtaggaaaaagtaggaatatttttaacccaagacaaatttattataaaaatatattcaattattaatttgatgaaactaatttagtattatatatattactatatttgtctataaacttagttaaactagtttgattttaaccaaagttaaaacattttataacctgaaaacctgaaatggagggagtatctccgtcagagagttcaatatttatcgatggacttgcatttttaggcacctggcacgaccatgcttggcgctggatgtcgcctcaacgattcctttacagatgatctaccggatagtgagcggcaaaagacaagcattgtatgggttgctcaatcttctccggctctggcgattacggcgcgtcagcaagctctttgcaaggtaaatactccacatccaatggacgatctcggtcaaatagattgtgtgtgagttcataacttcatatacgcacgaatgattagtacgtgagtgtgcagtactttgtgtgagtgtgtattgcagacttgtagagttgtgatcaagtacgtatggctttttgtacgcagcatgatttaattagctcctttgaaatataggattctcaaaacataggaataggaaaaaatataagatttgaatatcatgctcttgtaaaacctataggatttcaaaacacaggaataccagaactagtgccttcgaataattcacatgaaataaaatataggaattctagaggaaatttatttgagtgagagagagagagagagtagagagagaaaggaagagagtgcttattttcctttgaaatgaggcataggaaattaaatctataggattttcaaagttgtagtattctttcaatcgaaaggacactataggaatagaatcctaaggatttggatcctttgcaaatccaaaaagaaaccctccaaatccaaaggaggccttagcactactggcctgacttataaggtaatttattatcatagtactcccaccattttcaaatataaacatttcttggatttaaattttgtacataatatatgcatttataagcatttgtatatactaactaaaggttgtgttcgccaattcgagttgagaactcttccaccattggacacaaaacgaaacgacggtttagtgcgtgattaattaagtatgagcaaaaaacttgaaaatgaattaatatgattttttaaaacaatttttctatagaatttttttttaaaaaaatgcagcgtttaacattttgggaagcgtgcgcgtgaaaaacaaggaagatgaagttgggacaatagattaaagaatatagcctaattgtgccatcgttcacgtcattcaaattcctttctattttaataccccctcccactctcgcactcctatcaatctctcatttaatgacgagcaatatatattttcttaatcttaatatctgctaaataacctagaaattcttatgtctttggaagaacggagagtaccttctttcatgatatcaaccttgtaagtgagtggaccaagagacttttctttctttgtctttatcttcagtgcgagtgtgggggaaaagagctcgtttaagtggcttggtttataattgctgtagctccgagcctccgattgatcagtttttttaagctaaaattattcaaaaatttgtcagttccctagctcttaacaaaaaattgtcttaaataattcagaaaaatacaataaataaatttctagaaagcttggccgcctcaatttccatccctgtagtacagtagtagtgcagatacactacgtgactttgagttggtagcatgattcaccaatgggtggcatgtaatgctatatgaataactacagtatgcatatgtgatcatcattcatcaatgaccgatatgaaattctgaatcttgcaggttggagaaggacattagattcagttacttgtggaccaggcttatcaagctcctctacgtaaggccacgccgttccacccggagtactatatttcggcagagttcatacaaataacttgctacgaaatcttgtgtgctcatgattgcaatgcaggtgacgctgttcgcagtgcacttcgcctcgtgcatctacctgtggatggcgttccaccacaaggcgaaggagctgacgtggatcggcagccagttccacggcttcgaggaccgcagcgtgtggttctgctacacctgcgccgtgtactggtccatcaccacgctcgccaccgtcggctacggcgacctgcacgccgccaacacgggcgagatgttgttcagcatcgccttcatgctcttcaacatgggcctcacctcctacatcatcggcaacatcaccaacctcgtcgtccacgaaaccaccaacaccttcaagatggtaaatattggcaaaacctgatcatggttttcttttctttttgacacgngattggtgacatggcattggtgcaagggacatgggcaagactcggtgttcggagaacaaccgctgcgggggatgaggacagatgatggaaagcctgcagctagttcaggcggagagcactgcacagaatgctgccgactgccaagccggcggcaggctcgccacacatgtcagaggggcggccagactgctacctgttcaggcgtctcgacaagctcgtcctgccgctggtaattgaacaccagtacaaacgccttggtcggaatagctctgcgtttaccggtgggtgactgactaaataacgtggtaaattcaggtcgcggagatgaaggcagagtcatttccccccaaggcggatatcatcctggagaacgaggcttcgacggactgctacatcatcgtgtctggtgaagtggtaagaacatgcctcgtgtgacgtttgttctcttcgctgttcatgctctgacaacctgcatttctcttaatcttttattttgtatcaggaggtattgacaacccttgaggatggtacagagaaggtaaagcacacgagaacccagttgacgcacttagtatatcagttataccatttcaagcttagggtgtgtttagattctaaaattttttggtaaaaaaagtcacatcaaatgtttggacacatgcatggagcattaaatgtgggcgaaaaaaaccaattgcacagtttacatgtaaattgcgagacgaatcttttgagtctaattgcgccatgatttgacaatatgatgctacagtaaacatttgataataacagattaattagacttaataaattcatcttgcagtttacagacggaatctgtaatttattttattattagtctacgtttaatacttcaagtgtatccgtatatttaaaaaaaatttggccaaagaacgaaacacggccttactcttctcagtatactgaactttttccggcatttgcatactgacctgaaaaggttctgatcaaaattgtgacatttcagcaagtgatgagaatagggccacggggaatggcaggggaaattggggtgatgttcaacatcccacagccgttcaccatccggagcagaaagctcacgcagctcgtccgtataagccacagccatatggtctcgaccatccggcctaacactgcagatggggtcgttgtattctccaattttgttctggtatttgattttattcaagaatgcaatatagatatttttttctcagttcacaatttctcacaacgtttttcagtaccttgaatctctgaaggtgaaggcaaaggaaacagcctttgttagggatcatcttcgcaatggctactccacggtattaggaagtgcaaccatgtttgatgtagatgaatccaaagagtcagctcacaaaatgttgccatgcaaagaacccaaacgggtatctattcatgaacacctcttaaatgggactggcacagcactgaacggctcatctgggaagctcgtcatactgccagattctatgcaagatctgatgaaactttcaggtatgtaaattgtgctctgcataaagattaacatcgtcagatgttcagatcaagcaacagatttatcatcgttgtgaatggatacccctttgcagaaaagaagtttgggaaggcagcgagagggattctcaccgtgggaggtgccgaggtagaggacattgaagtgataagagatggcgatcacctgttctttagttggtaggataagccatattgccttggcagaacattatttagagaacacttactctctcaacaatttttttttcttgagagcgtactaatgtgctcctgcagaagaattgtattttcacatggtgattctaggcactcttctcgatcttgcagtagcctacgttgcgtactttgaaaatgatactaataactgaatgagactcaacctatagttgagagacctaaatgctaaaattgacctttttcccgattccatgggtctaaacccagaatcttgctgtagccccagcacagagcgtgccgtatccgtccatggctgccgccaactcgcgtcaattcgtaatcgtattcttatcgcggtcggcaacttggaatctaggacccattgtccgattcggacttacagttatttgccataaatacaaaaacactcggtggaggacgcggcgagcgtcgtagacttgtagtaaactgcataactcaaacattacgttgagcattccgtgagcttgatcgtctcgaccatggcggcggcggcgccgttgacggtcggggaggcgcggtcgggcgtgtcccgtgcccaggtgtgggcgtgcgccgtcgtcgtgccgtgcttcatcgtcggcgcctacctcgcggagtcgtacggcgccgccggcgccgcctcctccttcttcggcagcgtcccgtggcggctgccgctgctggtgtcgttcgccgtctacctgtccacggtctcctgcgtcaggtcctacgtcagcctgtacctgcggccgcacacgccggcgcacgtcgacagggccatccagagcgtcgggttcgtcggcgtcggcctcgctctcggcgtcgtccaaagcgtcgtgttggttgccgccggcgacaaccgcgtcgtcatggccctcacctgcgtcatcgccgtgttcaatgccggggcgatcgccttgtgggcatggcttattgcgatgtaccgccgccgacgggccggagtatcatctagctgtggcaagcaattctactgctcctgatgaaagaattctacgcctgatggaagagagaatctagcccgtagttgcaacgctgagatttttagttgtaattaatgtttttgatgtttctgttcctgtaattgatagggatatttggttagttcgttcagtgatgtgtttggtgtttttctcctgccatcttttgtatacgataccgtcagcaatatggcgagattcctagatagatatacctatcaataaatactaacataccctgtcaatggtacaaccgcaggaagcgccaaacataaccctgggttgacacgagatttacaaatgcagctgtacaatgtgcatttgcaagaagtacaaattgcctatgattataggtccaaaacttaatgaacccaatacatactgatttgtcatagtaatggactaattgtatcaatcccaaagagacagatacaacaattaaatgagaaccactattttgattacaagaaatacaaaggagacctacaccacaatctgcactgggtgtagtcgtgtaagctgatcaaatcaatctaaaatcaagggatctgaaaatcatataatatctaaagttacagatgtaagttcgactaccacagcaatccttgtggatccaactactaacacaaaatccatgttttagccctgaaataccaaaattaaacagtttattctcaacgtccaagacatggggtgcttatattacaagacttgcttaagcaagcatgcattccagtgaaaaacttagatactagataacaagccaacaaatcatgttcccaaagttatctttttaccaccaatatggcaatagatgtatggaatgccaccaaactctaacaggacatcggcatggcaaattttagcaaccatccaaataagaccaaattcaaggggtagtatcaaacaattgaaaaggcaagtcgaggcatacaacaaaaacaccctaaggacctgctgaaagaatattaacatgatgtttttcctaacatactgccagcagaacaattgtgacccggagattaaaatcaaggacacaactggcatgtcaagccacatccacaaacgaaattaaaacataggtttataagtatgtgtacgatgcttgcaggtatcagaattcaaaaaataacaattgaaaagcaaccaagggacagcataacaatgttagataaaagcaggatgtcaagagggactgataaagatacattcatggatatgtgcccgcaatgcgctcacaaagcaacaacttccaaggaagactggaaacttaaattaatatagtttccaacagagtttacagtataaggatttatgagcagcaagagcaacaaaaaattaatccaggaatggtatacagagtatgttaacaactgcatttctgaagtagctatcaaatagagcagtccaaaagagtgctgacactacataaatcctatgtgcctgcacaacttcccgtttaatgattgggtaacagagtcaaattgctactgtgcaaaacgttgctcagcctcagcaacatttcaaattcactgctaaaacattgcctcaatcttttccataacaataccagtacgaagcttatggtttagttgcaaagggtatttgccctattttctaccacaaaaatttcaaagcagtgtattttactaagtgaacatccttcttgaagagatattctgtaccagaaaagttttcctcttaacatgatattctaatgacatatacaactataagagcttggatgctagttcaacataaccacataaagcatgcaaaatatcaaacacaacaaatctaagtgtgatgctagaatgaaacaggcctgtcactaaattcaagatcacaaactatcttggatgggtattcaagatgagtgataatcctgtatgagtaaaccaacctgatttcccgaacttacagaccctaggctaagaataagcattcacggcgacattgctctactcttcgccaccaccatcatccccaaacctcttgttatcatcaccctcaccctccttgaggtcaccctcctccccatcttcctcagtgagacgcgcaatctctgcttgcgccttctccaaaatctccctcctcctcacctcaagatccctttggagatccctccgcaaccactcaacctcagccatgtgctgcctcttgctactctccaccctctcatagacatccccaagcttccgaatcgactccacgagcaactcaaagtcttcccctttccctgcaccagcctcgtttggctgctcttcacccaattccgcaccagacccagaatcccttgttcccgcgttctcacacccgcccagcacgtactccgcggcgtccagaccccaagattggcgcggcaccggctgcgtgtctcggcggcgcgtcactacgggtggctgcaacgggagcggcggtgggcacatgagagactgcatcttgtcgaagtagatccacttggaaggcgaggggcggtcggngcggtcggngcggcgggcggcgaggcgcatcctctccttctccttcctgtacttcttcctgagggtgtcgatgcggttgcggcactgctgctccgagtagtacccgggggggcgggaggccgcggcggcggcgaggcgggagacctccagccactcgtccgcgcggaggctgcggcggccggcgcgcacgaagcggtcgccccaggcgtcgaggagcgcgaaggtggagccctccgaccactcgggcgtgccgcgcgcgggcgtcggcgccggagcggtcgcggtcgcggtcgcgggggcggggcgcggggcgaactcgaagccttgcgcgtagcggtcggtgcggcggcgcttggagcgcggggagggggaggtgccggaggaggagggcgacggcgagggtaattcggcggcggcggcggcggcgggcgccgcgccgtcgtccatgagcggggagctagggtttggttccggggataggggtggctcggcgagatggatcggccgtcgagtttgcgggcaggtcacccccattgcctcggcgggggtcagccggtcaggtgggcagtgaggatgaggtgggggcactgtacggtatctttttttttcttctttcaatataaaaaatattgaaaaactgaaaacaaaactatataatgaacaaaatacgttaatataaactcatactggctcaaaatataagtatttttagagctcgatacggtcttcgagatactactttaaccaacagtatctataaaagtaaaatattttaaatataaagagttagatattatgataattcgtttaaagataaatatagtaacattaaatttacatgattaattgttttaattgttttctattagtagtcaaaatttaaaaagtttgacttagcactattctaaaaatacttatattttagaatggatggagtaataaataaggcaaaattctaattataaaaccgcacaactttatataactatataatatgatgagactaattcaaggttacactacataaattacaaacaaacggtcttcttcgtaatcatgcactttagttaaggatttgattccttttaaccatgcacttttgttaaagatttgattgaggagttgatgggtatctacactataggtcaaataaagaaatagaggatagttatagatgcatttagaaatacgttaattttcttaagaatatggtaagattcaaaaacagccagtataacgtgaaataatttatgtttttattttcatattatttttaccattttcatcttagttttcagggttaactattttcacatggtcgagcagtaaaagtaaaaaagaaaacgaacgtaggtcgatcaggaattttcaaaaccattttcacctctaacggtactttcaaaacggacatattccctccgttcctaaatataagacattttggttggatgtgacatatcctagtacaacgaatatgtataagctttatgtccaaattcattgtaatatgatgtgtcatatccaataaaaatcccttatatttaagaatggaaggagtactttatactagtataaaaggagtactcgtggttatgcatatacaagtacatttcggtggccaattcctgcgtacatctcgatgattgattatgcattttagtggtgttcttttctcatgaaaataaagattaagttttttttatacaaaataaggtggtattaacgtctgattgattgagttttaattattataaacttgaaaaatagattaatatgatattttagagcaactttcgtatagaaagtttacgcatgaaacgcaccatacatctcgatgattgattatgcattttagtggtgttcttttctcatgaaaatgaagattaagtttttttttacgcaaaacaaggtggtattaacgtctgattgattgagttttaattattataaacttgaaaaatagattaatataatattttagagcaactttcatatagaaagtttacgcatgaaacacaccgtttagcagtttaaaaaacatgccatgaaaatcttaatcttcattcaactcttgctggagaaaagaacgggtcggagtcatcagtcatgcatgactcatgacaacactaaagttccgtagagtgtagtcctatatactgttgttcaactaaccattgattgatggaagagtcctacacacgtgccagcgtgcgcaccatatatgcatatgaaaatgggcaactatacaaagacgtacgttctcgatcaccgaaagagaaatgtacatgaactaaaacattcgtacgttctcaatcacacacacacacacagagagagcgtgcgctatatatgaactagaaaacatcctctatcttgcagttacgttgcactacatgttgcacatcgcgcaatgaccagggccgagttgttcggcgtgcatttggatgtatggacacagagagtcacagcggtagatccgtcggtgtgcacacatcgtctatacaacaggataaattataagtgaaccattatttttcatgatttaaatatattctaagtgcacgtgaaggtgggccaggcgtgacgtgaggactgaggaggctgaccgtggtaaactagtcttagtttagagtagcacatacgcctacttatctccgggcctctacatgctgttgtactagtagtgctactgtatactagacttttctactactagcttttcttttgtactccaaatgggcttgattgggctcttctaacttcatctgggcctccctcgtcacgagaacccatgggccgtccgcttgacgagagtctgtcttgttcaaatggaaaatgaatctgtcgtgagttgcaacgtatgtaagcgcaggctgcgccgcagtggcacagaccacagagaaagcaagcgacctgtagacgtgtgagtgagctggccctggtgccactactacagcaccgattgttccgtgcgggcgagccaatttttgcgtgcaggtggacagcccgcacgcacccagtcatctgagaaaatcacgattttcacgtgcgtgcgggcccacacgcacccagtcatctgggaaaatcacgattttcacgtgcgggtggcgcacccacacgcgaaaaccgattttcgcgtgcaggggcttaagtcgctcgcacggagaaacaaaaaatcaaaaaaaaagaaaaaaaactaaccctaatctaccgccgtcgctgcctagccgaggcccgccgccgttgacccctcctgccggcggccactgacgccatcgcacctcctgccggcagccaccgacgccatcgcacctcctgccgacggctccacctccacgccggccgctaaagacacctcccaaccgccgccgccgctccgatctgcaaggggagggggggcgcgccgccggatccaccgcccccatgcctcccctccgccggatctggaagggtagggaggggagggggtgttgtggtcgcccgccgccgccaccaccgccgcctgcgcggtgtcgccgcggtcgagggagagggaggaaggcaccgtgcgccgccggccgagcgacagcccggcaggagtgggaggagaggagagagggaggtgggaggagaggagtggggagggaggtaggggcggactgagtgcgtgcacggttataaaatgcgcgagctgattttcgcgtgcggttggcttaagccgcccgcacgggataatgtgttttcccgtgcaggtgatatcccggtaccggtcccctattttttcgtgcggttccacttacggaccacatgaaaacaaaatggaaaggtgttcaggaaaataaatcatgcagtagtgtgctggcattaagttgcatatgcttcttcttggagaccaaggcagagcagctagcatatctgcatatgcgagtttcagatgcttcttcttggagaccaaggcatgcaagtgcagtagttgcattagtgcttaacccctcctaccatattactcttcgcttttcactttaagacgaaaataagcggtttcaccgggaggcaatgatgttaattcagagcatcagaaattcataagtgatgttaattcgtctttgacccgttgcttatacctaaagttatgttaattcgtctttcgggaagtattaatagttactgtaatggtagattattggtacttcagtactactgatgggctacgaacctggttcttcgtagccaaaatgatcctcagaaaaacgacctgaaaccgcatgacaaagagagccacctgtgattcttcagccactgaattactgaacttttccatgcgatgacgatgtggcgtgttttcccctgctccaagcgaccaagcatgcatcagcacagcttcttgatatgcaaaagcaagcgtgtagctatctagctttggatttttggaagcactcacaagttaagccatgtaatggtaggagtacatatcgtccacttgtttcttcagttacttgtagacatcacccgtaaaccaagggcagttttcttgcacacttgcagatcgagctgaactatttatatttatgcggttccaatcattcctgcagcagcttggcaatttgtttcggcaatctgcaaagctgtttttatacctatactcctactactccctccgtttcacaatgtaagtcattttagtatttttcatatttatattgatgttgatgaatctagatagatatcaatataaatgtgaaaaatgttataatgacttatattgtgaaacagagaaagtactgcacttctgttattgctttgattaaagttgttgttttttgccatggctgcactacacaccacacagccatgtcctcctccagcaaccagagagcagcatcgcgttgtgtgcgagcccaagacgctactagtcaaaccaccaagacttctcgatcagcgctgcccaatcacttcgacgtaggagtacccctacaacgccatcgtgctaagtgcaaacaaaacacgaggacacagatcagatcagtcttcaacctcctcgctgagaacacagagaaaggccggccagccaatccgctcatggcagcatctgaaagtgaaaccaaaacttgaaaactttgcaactgcaacgttgcatcgatgccatttacgtgcagacaactgtgggcttgaaaactttgcatcacaaacaacgcgttgctgcaggtagatgcagagagatagatatgtcatcaggctaaataaaatatactgcgcgcgcgcgcacacacacagagagacgcagtgacagcgccaatgcagtcactgctgcagcctgtgtaaaatgtaatcaatccaaggaaaagttaaaaaggccactgtaaaaaacgagtaattaaagtggagggtggggagagagggtacagggcgagggctccgagcgagagggaatttttcgtggctgccgacatggatcgggttaatctaaaccggccttgccttaatcatcgtaccgcacgagagggtttagcacgaaggtaaaggcgattttactgccgctgatacacggttaccgacgcgataacgacaggttgggaatcgacacctgccccccatgacctaatgcacggacgctaatcaccatgctacttggcatctagtctgaatctcaagaaaccataggacagtacgtgcgtactactgcatttgcccggttgtaagctcaaaacgaaagaaaaattattaacctggttagggctttagggcgcctctaaactatgtatgggcttggttactagctcgatttttagcgtattttttaaacggttaaatggcgtgtttcatatgcaaactatatagaaatctcattcaactaaaacttcttaggctgtgtttgaggagaggagatagaggagattggtaagatacgtaaaacgaggtgagccattagcacatgattaattgacaattaagtattttaaacttaaaaaatggagtaatatgattttttaaaacaactttcctataatttttttacaaaaaacgcaccgttcagtagttcgggaagcgtgcgcgtggaaaacgaaataaaactcactcacaatcacctagatcacccaggaaagaacacagtcttataatttttttacatatgaaatagctaatactcaattaatcatatactaattatactttcattttcattttacatgtgactaatcatctgttctaaaacagacctaagaatgcaccttcagagtggcttttgttagaagcatttcaacctaacacaattttgtgcaaacacaggtgaattccacccatgtcataggggcatccacaatgtactctaaaagtggtccataagcaatacaagtataatatttgattcagccacctaccaacattgtggaactagtccataggaaagaaataacaaaagctacccataagcatatgagctgcccatagagaataaaatatatcatttgtctctatctcttctctcctactaatactatttgctatccatatatactgtgaaggttacaatagtttaagtttatatatgtgggtcctatctttatagactacttttaccatatatattgttgttgcccttacggtcaggatagacaagtctcttgccttagttgcctgcttgaaatactatcgccaacgaaatcaaatgacgacttgtattttccgtaaattgatcaattgaaagaacaaaaggcaacgtgcaaatgccacgaagaacagatgacacagcatgtttcaaccgttaagcatgcatgtcacgcatgcttaattatagaattaaatttgaaaatttactgttcatttaatttttttctcagaaatattcgggatgcaaaaacttatcgcactttcgttgagtgaaaatgacgcggggatgacgtctcgggcggtatcgctcgacgagagcgagaccgttcggtctcgcagaaacaattagcgacattgtcaataggattcatttgattagtgattaattacttaattaacaattaactaataataattagtgataatcaggataattaactgctaattaaatcggcaaggcacgctatcgctctttgcttgggcgatagcgttgtttgctggagcgttatcgctggttgcttgagcgagaccgtgcggtctcgcaccgactgtgcggtctcgcactttcactgcacgataccgatcgtgatgtcatttccacaccattttcgtgtaatgattgtgcgagactgatggtatatttatgtaaaagattttgtatcccgaatatttttttttaaaaataaatgaacaatatattttcaaatttaattccttaattataccgtagagttcacaagaggacgagaagatgccatgttctacgagttttaacttgtgtggggtactgggggtacgaattctgtctcgcgtcagacacagaccagcgtaattagcatgtgccaatcgcttttattagcggtaaaagatgggaaaagtaaaaaaaaaaaagggaaagcaacgggtccctactccacagacgtacgatgctcctcgagatacacgccaacgtcgtacacgcgtcgggcctagctgtccctcgccacacaaggcgacaaaaaatacgtattggtttcaacgttttcaccgtggcggtcaaaataggacggaaaaaagaaattgtaacgctgcccgtttgccacctcccgtcgtccacacgtgcaagcacaattgcttttcagataaagagtagtacaatgtttggtactccgtcaagcacattgtatgagtattatactggagtaggagtagttattttaagcaaagcagtatctgtcacaggtaaatcactgcaattagcgagtcatggctcatggaacaaacactgcaagaagtgcgggaacttttttttttggtcatttttgtatgacgtgatacttacgttcatgactcatgacacgcaagagagcttgaaaagcaacgcataagtacaaaattatttgttctgtattgttttgttttactatatcttctcatgaaacaacccaagtgacaactgacaaaccgggttagtaagggggtgtttgagaactagggactaaatttagtccctctcacaaaagtataagtccctataataggggcttatgtttttgtgagagggactaaagtttagccctactttagtcctccaaccaaacaccacataagtaggtgtttgggagagagaggctaaacacaaaaacataagtcccacttaaatccctccaaccaaacaatagagtagcacaagtgtagacccaaagaagaaggaaaaaaaaaggaacaaaaatgtctcacacagtcacactaccaaagagtagagagagactgtctttttttttttaatttagagagtgtcttccaagaaacaaaaagaaaagcaagggaaaagaaaattcaaagacgaaaaaatatattaaaaaaaaactaggagagtcagagacagacacagagagatggtagtggtaaagcggaggaggggtggggtgttgagccctggagaagccaccgcaccccccgcccgttgcctttgcgctgcatgccgccccgcgcggggacacttgtcttcttcccaataaacacacccacgcacacaagaaacctcacggaaagcagagcagcaacccagccagcggagggtcaggactctggagcggagcaagaagcagattgctgtgcaagccgcctcctcctcctcccccctgcctctctctcctcgcccttcttaaccccgtctcgcgagagaggagaggagccaccaccaccgcctcgacgccgagaaccagcctcgccgtgacccccggtcgccaggtaacaaagcactccaccaccacagcctcggtttggtttcttgaagcttctagtgctcgtttcttggactgttgcgttgcctgttcatggatgttggcgcactgggatcgatgggatgtatgtactagtttgttggtcttccggttgggttcgtcttcgtttccggcgtgagattagatgggttcatcaggtggtgatttgggactgcatgcggttgtctttgtatcggttgggattcttgggtcggtggcgctggcggtggtgatgtaaattccctttcatggtcgccgtaatgcacagcgttgtattgccgccgcatctctccatatatgaagtcctctttaaagcgattgagattgatctgggctgttatggaatagggaggggatggtggggagaagttcgtgttgatttcttgttttgaatgcttgtttgcttgttctagtttttctggtcacgatcatgttgatcaagtgagtgttatacacgatcttgtttttagtttgcaatcttgattaatgagatgagaagatgagatagatgcccgttgttgtaaccagtgattttttttcttgctttttggacctgccgcacagatgccatcagtaaaccaaaccacctttttttcaagtactaacttttttttactattgtttatgtacttatgatgctcatagtcatagatcatcatcatcttttctcttctttgcacctttgacttgatgagttataaaaaagcacaaaagctggaatttcttttcacttttgttcgcttccatcatcattgaccgacctgatatgcaacagaacaaaaattttggctattttcagggacaggttactctcatctttggtgcttgtgaacaagacgacagccaccgctcatcaaagagcaagccatggaggaatccaatgatcagggccttgcacagaagagcactgcccccactgggttcttcagggtccccggcctctttgtgaggctgagcagcaaaggattgaacgcagtggaccctgattctgcctggagcccaacctctccattggatttcaagaacctgtcatcgagcactggaagcacaaatctcaaatcctctgggctactgggtgtcgaggctgatcagaagttcagaactaaccctcccagagtcggcctcggcctcgtcgacgccctcaccgccgacgagagctcctcgtgcttgggtgtcacgagctcgtttcttgattccatcaggccatttcttgagctcgggttgccgaaggcggcgagtgatgctgcaatgcagaagaacggttcaggtagcgtcactctggacgagattgcagactttgctctgtctgaagagtacacctgtgtgatcgagcacggcccgaacccgaggacgacgcacattctgggagacgagacactggaggtgtgcaagggtgtcccaaggagttccaagaagtcaatcttcaccatcgagcccatcggcgagctgccgtcgacgctggcgtgtgctgtttcccgctcatgctgctactgcaggaagaggctgcagcaggacagggatatctacatgtatctgtgagtattcctgaactcgtctgtagcctgcatttccatgagatacttgcatgtttatatctcactctcagttgctaaacctttgtgctggcttgttgcaatgcaggggagagaaggcattctgcagcaacgagtgcaggagggactacatcgatgaggagatcgaggaggtggaggagctcatgatgctggattctgccggttcttctgccctcttggcttggtgaaaatcggcagtagatgactagaagtagtagtagtagtgctggtgagtggtggtgcaggaaagcgactactacctcttttggatggagattcaggttttggtagggaaaggaaggaaaacatgcttcccgttctagtttttctgaatggagaagtttttaatttagccggtttgtgcaaacagaagtgcaacggctaaatgattttcatggattgtgtggggattccccattttgcctgtaagacgagcaaaccccccataatttcacagcaaacagttctccctgctgaattctcactgcatcttctccttgtttctcagcatttttctttcttttctggttggttcgtcattttactttctgaatcttccgtcggtgcgcttgcccatcatgccgatgtttgatgatgggtcactgtgcccttcgagcagtgaaaaggagagcttggaggtgttctgtgcatcataagcagggatcagactctcccaaagggaaaaggtggcaaaagctcagggccggcctcctggtgaggcgtcagaggcactaactacagtcgcagtgcaattatcggcatcccattcatcggtatgtttggatccggaaggctatctagaatcctactatttaggagtacggaaggctatttagaatcctactatttaggagtactaaacgtagattactgacaaaactcattctataacctctaatctattttgcgagacgaatctaacgaggtatattaatctataatttgctacagtgatgctacagtaatcaattgctaatcatggattagtatacattattaaattcgtctcgcaaaatagcctaggggttatggaatcgattttgtcggtaatctacgtttaatacttttaaatagtaagattccagatggctatttaatagcccgaaggatccaaacaagaccattgtgctgtagtgcctgttggctctgctcccctgttgagctccagtggcttgtttacatcgacgcgaggacacaacgcaaaaaacctgcctgcttggctcaatcagtagtggccttgcgccgtactcgaaaggcctagaaggtatccaatgggcaatggctacggcaattaacatccgggtaagccgaaccacttcgatgaagtaacatccaatttttttagcgcggttttattgatagagcataagaaaattataagattacaactctaaaagatcgtaatataccactacccacacactaacaacgtcaacacacagactcaggaaaaggctagcacagaactggccgcctagaccaacgacggaacatagccaagatcgtctaaaacccgatcctaacaatcaatacaaaaccccactctatctaagtctttacgatttagggagggtgagagaaaaatggaactcctctcccctcataggccctctgacgtggtcaacttccagaagctaagacaccgacacaagagcatatgaatctagagcgagcttgcaccaattgctcgacggaacgccaccgatgtcattcgtcaacgttgcaaagagaaccgagactgggctttcgcttgacagccacacttaaggggtgagacggcacgacaacgccctcaagaggggaatgacccttgaacgtcatcgttgctggtccgcccaaggccgtattaggttttcacctgccgtccatcgcctgccgatctaacactaatgcaccattgctccaccgccatctaaacctcagccggcgcacgggcaccattgcacaatgcgccccgccggctaatctccacgtgatgtcacctcattgggctctgcctcgactggcctcacctcccgctgcgcaggccaccgcgccggccaccaccaccacgcgcggccgaccttgtcatgccgcaccagcacacacttcgtctcgccgtcgatgacgccacgcccgcactgccgtagcctagatccgacgacacgcttcggccgcgggaaggcgggggagaggagggaagggtggtgtcggcgggggctagggttcgtccccagttgcccgcgcgaggacgacaggaagcgctttcacacagcaagtaacatctaaatcagttctgagtacttcttcgaaacgcaagatttaagaaaacaaataaataagagaaaaaaggactcacaaaagttcaagggcaaaacagataatcgtcaaaagataaaaatataagatttgattataccgcaagaaaaacgtatgaattagataagagatagacacatatggaacttctcataagattaaacaaaaatcctctacaacttgtatgaattgagacatccttataattttcatagattcaatagtttttaatcatttatttcaaaggaccatataaaaaaatatagattagaattctatcaaatttaaaatttaaaactttcaaagttgcttatatgctacatgctacaagtcaaaagatagaaaaagccattatccctactagagcccagatactagcaccatcaaagaggcaaacccaaagaattcaatacttggccctctgttaaataatcagaacaaaatgaactgaggtagatttgccatttttctcaaccgagcaaggtataggaactgaacaagaccggcatatgggaccggcattgaacatgagaaatggtggctactgcaagtaccacagttcctaccagtaaataacacccacgtcctgcaatccgccatcctactacacacgcacacgagcaagaagtaatactatgccactaaccgttacagtgtttgcccgagactcaacaagtacacaccataacacacaagctagccaccatttatgcccagaagcttgagtagacgtgcacttattatctcggctagtgctagtagaaacttaagctgaacaggactctgagtctgcgacatggtgaggtaataaattgaacacaggagggaacagcatccacttcatagatgaatttcagatgcgagtgatttgcctcggctgaggcatccaatgagcaagaaaacgaccgagagctcatcagattcccagaggcgttagcgggatttgtgttgcaaaatgagcatcccccagggctctcttcccatacaaaatgaatcacatcaaaacttcgccacttcagatctggcgggtgttgtaggacttgcacttctggcacttgtgcgcaatcaaatggaactgcacctctgatgttgccccacaatcgttgcacaatatgcgcaccttcagggtaatgcaaaggaaccaaattagcaagtgtcaacaaactcaacatttggatgaaattcaggcagctaagactcagatttctgacatgaggcaaatacaatt

SEQ ID NO: 5541 - DNA, 40153 bp, Oryza sativa
  unsure (1)..(40153): unsure at all n locations
gactactatagggcgaattcgagctcggtacccatgaagaacttgaaaattttgagagaaacaaagtttggactttagttgaaccaccttctggacataatattattggaaccaagtgggttttcaaaaataaacaaaatgaggatggtttgattgtgagaaataaagctagacttattgctcaaggttttactcaaaatgagggtttggattttgatgaaacttttgctcctgttgctagaattgaggcaattagacttttgttggcttttgctgcttcaaaaggttttaaattgtatcaaatggatgtgaaaattgcttttctaaatggttttatacaggaggaagtttatgtcaaacaaccaccaggttttgaaaatcctgattttcccaaccatgttttgaaattgtctaaagctttgtatggtttgaaacaaactcctagggtatggtatgataggcttaagaactttttgcttgcaaaaggttttacaatgggaaaggttgacaacacactttttgttcttaagcatggtgataatcaactttttgttcagatttatgtggatgatatcatctttggttgttcgactcacgctttggttgtagattttgctgagactatgtgcagggaatttgagatgagcatgatgggtgagttatcgtactttttgggattgcaaattaagcaaacacctcaaggtacttttgtgcatcaaacgaagtatacgaaggatcttttgagacggtttaagatggagaattgcaagccaatttcaacaccaattggttctacagctgtgttggatcctgatgaagatggtgaagctgttgatcaaaaggaatatagaagaatgattggatctttgttgtatctaactgcttctagaccagacatacaatttgctgtgtatttgtgtgcacgctttcaagcttctcctcgtgcttcacatcgtcaagcggtcaagcgaataatgaggtatttgaatcatacacttgagtttggaatttggtattctacttcatcttctatatgcttaagtggatattccgatgctgatttcggtggttgtagaattgatagaaaaagtactagtggaacatgtcattttcttggtacatcgttgattgcaaggtcttctaggaaacaatttagtgttgctcaatcaactgctgaatctgaatatgttgctgctgctagttgttgttcacagattctttggcttttatctattttaaaagattatggtcttacttttgagaaagtacctctattttgtgataatactagtgctatcaatattgctaagaatcctgttcaacactcacgcacaaagcacattgatattcgttttcactttttgagggatcatgttgagaagggagatgttgaattgtagtttttggacacaaagttgcaaattgctgatattttcactaaatctttggattctaatcgttttgcttttcttcatggtgaattgggaataattcatccttttggcatggtttgagggggagtttgtacctcatggttttatcaagcaataatatgacaatgaaaaaattgataaaagagagctttggttatacatatggtattttcttgtgcatgctagcaatactttgaaggtttatttgtctctagcatagcttgtatgtattctagtcttttcataagatttagattttgcttttaagggagatgatgcatgacacttaaattctacttgaattaagaaaatatgcaatgttgatgctagcatatggtttgatttataaatgctctatatatatatatgctttattgacttgttattcctcaaatagctttaattgctcattgtgaaaaagagaataaaaaatatgaaaaaaaatgaataccgaatccttggaaacagtcttgacgacaaggacgtattcgatgtgagcaaaataatgggtgccgaatccctggaaacagtcttgacgacagggacgtacccggaataaaagaaaaaaaatatgagcaaaaaggctctagaaaagaaaaagttaaaaaattctcttggttattttgtgctaaaggttatttgagaaagagtgataaatgcaataggtatatatgtttagtgtttattcttcaacctatatgcttgttaagatgttgcattataaatcgtatgaaatcatgaatttcgattgttgattcaagcttaattgtaaaatctttggttcatggttatactagatgggtttatcttctttttattgcaacacatgacttgatatgctatatatatgctaagctcttgaccattaatgaacataattcctatgcttgatgacatcattgtcaaaagggggagaagtaatgtgaaatttttggatttttggagaagcaaggtgaatttttggagagttgttgagaagagcatgtttttggttcaatagggaatttctttcttttaaaaagggtgagaagttttcttttggatttttgagcacgatttttgagcacgatgtgtacatttgtacgaattgtgctttttaccactttcgtttttatttttccaaacaccaaaacattttttatgagtttgccaatgtgttcatcaagggggagattgtaaaatcaaaggtgtttttgattattattctgtgatgaacaattggcattggagataattagttttgttatttgaaatttattcacgaagtggttttggagatgattggatttcacaggtgaatctataggatattgttgttatttcatgtgactggtcagaccgggcaggtgttgccggtcagaccggcggtgatcgagcggtcagaccggctagcccgcggtctgaccggccgacgctgtgtcggtttctgtttcgggttgtttgtttagatatccgtgattattttatgattatggcttctagatggatactatatgtatgtaatactgttgtttgctattaatgagtcaagttggagataacttggtctcggaatatggttttttgtttatttcatgtgtaggtgactcgatgtcttgggagagtatttgcggtgatggaccgggagtcagcttggggataagacaacgttcgtggtggtcaaagatcatgcgggatactaaggctagagttgatgcacgtggttgatggagattccatatggcatacgatggaggtattgtgtgcgtatgggatgcggagtcgaatttggaaggagttcaaatttggtacgattggttatgtaaagtttctttcttgtactagaaggtttcctaaggtgtttaggactcttaatatgagtttggtttgtggctttatgctgcctacctcatgtataaatagagggggagcgtgaggcttcccggtatcgctttagagagcaattgagttgagttttgagttagggtttcgagtttagtcgaaatttttgtaaggagtgctgttggtgcactttgtaaacacagagagaatcaataaagtcgtcatctactttaagagttcttcgatttgtgtttatcgggtttcggtagtctacccagtgatctaccggcggtcagaccggcggcaagcggcagtcagaccggcagcatttgggcggtccgaccggcggccgcgacaggcacgacgaacgacttcggcggtcagaccggttgatctataccataccggtcagaccggcggcatctgagcggtcagaccggcaaggcaacttcggtcagaccgatttccatcgatttcgagagtaacttttatttccgctaaaagttttcggtttttgggtataccaaccattcacccccctctggttggcttagttcttgtgattcgatcctacagacgggccctacatgtcagtagccaagtctttcttcccgccctttgtacctttcttacccatcttttcccaggggacaaccaataaaggataaggaccgcgtgtggtgggcggcaaggagaagggcggtggctaacaagacaacccattcacccccatcttcttcaaggctcccatgacctccgtgtttgtcccccaactcgattcccccatccttgaccggctcgccttcttccgttccgttaggcggctggaggagcacaataggttcccgtgcttcctattcgagaagtccatgtgcagggccatatgcctccttaatcacctccgcatacccccgaaggagtggcccgacacctggtggcgcccatgtgcaggatctcctaccagatccacccaccatggccactatcgcaaatcctcatcttcatcatgcggttcgtgctgacgctccctatcgtgcctgctgccaaccttgacgctcctcgttcgtcaaggtagccaagcgcctcctctctacgtgtaaccccatgcgctacaatgtccggccatggattgggtcgttggtgcacaccgacggccgccaccattaccggcgctgctcaggagagagaagtcgaggaggctggtcgagctaagtgcgctgctcaaggcctttacgttgttcgggccgttcagattggaaatcatcaacccgtcggtttgtcatgcaatttcctcttgtcatggtctcacctggagaaaactatccgtgtgtctgcgtccgtagtgggcctttgaagtaaacacacacacaatcaacgataccaactgaccacaacagttgggcaaatgagtggtcgagggggccatcaaccagaccggctatgtttcagagagtgattggcgaatttcgtaacatatactcttaagagtaaatatatttttacttataatacatatttttttataaaatatatatgatctaaggcgatacaaataatcattactaacatgattaacacctaaaattacgatgtaaattaaacaacaagaacaaaacaaaatcctatcctaattttcaaactaaatagatgtaaatgagaagatgaaaaaaaaaatagaagacctcactttaaacctttgccatgataaatagtgtggtcgggtgggagtcgattgtgaggacggacaatgacatcctcctggcttggttggttagtgatgggttccctaaacccttaaacggtcctgccattaaccgcacgcgcatggttctcggatagcaaattggcagcttgggaaagcagggcgcctcaacactacagacgtgcgattttgagaatctacgagaatctcttcccctctatcgctgtccagctggtatcatttagctttcaggagatgtacggcagtactactaggagaagggtgagtcctggattcctaactgccagtattttagatttttagatgatattttaccgtgcgtctggtatagtctagtccccatatagaagtaaatataagtcttagcaccttatttacgaaaaaaaatatatttaatatttaatgttgaaaaataaaactacgttaaaaggcgtaaaaaattaatcttaaaatcaagttttaaaatttaaatcttaataacgacttctatagtgagttgtgtgtctatattaaaaaaaatactatacaaagatcatatatagatttttaataaagaaaattcgtgcatttattaatgtagctaagttagacatacatgagtggttataggtgtagattgggatacatctagttttgcaaagaagccccttagcaatggaaaaaatacactttcgagctacatgttatagagaaggacttaggaagaattaaaaaaaacaattgggtctttcttcttcaattgcttgcagtgtaaacaatgaagttttggagctcgattccaacaaaatttgaagcaaggtgagctgcatatgatcgaatcaccgcataatctcaaaagaggcctcacacatatggaggttcaagtaatgacatacaaatcgaaatttcagccacactacttaggatttccacataatcatatggcaaagaaagacgcaacaacaacagttcctaagatcaagcctagatctataataccagcatagtatggtgaagaagcatagaagctgcataagaaaccaaagattatatttaaaagaggccttcacacatgggagtttaacgtcagttcagcttgagtcaacaacatcagcctccctatgaagaacttccaccggagctcagaaagaaggcctgcacccttggaacgagctcgtcggatatgacggtgaaggcccgcgtgacctcttcttgtgcagatgtggaagcatcccagctgacgagtaggacactgttgacgctgcgacttgccgacaggactaaacccgacgatgagccccacaatgccaatggtaacgaccacctcaagaaccacaaggacaaaatctacgggaatgactcagacaaatgaaaaaaatccgacaagacctactgctactactacgtctcgtcagggttatttccgtagttttgcccttatggttcaggccaaaaatcaattatataattattttgacctacccagataggtcaaacacatctcgtctcaataattaaataattgatcggacctgttaaagccgaaaatacttttatcacgagctacaattaattttcaacgataaattctatgcactaaaaatatttaattttaaattattgttgtgttcaactagtcgtaaacatatagtgtatattaaagtaggaggaaaaaaaggaaacatgaactgagaaacggggttattcttggagttggagggattctttatgttcttgggaaacggggacaacccctattttatttttagaggttttaaaatagggattgttggttgttgctaaatatgttctaaaagggactctcattgtaatgaagtattgatagggactctaatcaggcctcctataaatcgttattgatttgtcaaaatatctctggaaaagaattgctactacctgacaaaatattgttggtggtcaccatcgtccacatcgttgcatcttctgttgcacacaggtttgtagcaccaacattactatgctaccagcatgcttgcatagtttttgagccctgcagttgctgacacaactagctattcagaatttctcaatgtactgacgttttctttcactgttccttttttttttcatctattccaggatggatgtttgtgcacgaagggttgggaattcggagtcaggatggtagttggtgatctcatgtcatctctttctcaatcatagcaagcattgtttttagttaatgctctcatttctgatcttgcagttacataaatctggttattgaaatccacttcaatcaccaatgtgttcgtgaggtatgtgaaaatactattgtgtttcttggacttccatctaagaaattttttttagcccttgcatatgaagtatcactgtcacatattaggatgtcttgcagattgtctttggattttgggacatgcaattcattcgcttcctaatcctgatcatgctcatgttcacaaatttaggaaatcactgttatgcatttgaaggattttctatacataaatcttagtcttcactctacacatctattgccggttgtacaattctgggagatgatgctttagaaccaatgctttttaactgcaattgccaaaatgctcccaattatgtcccgtagaaaatttaatcttgataaagttataatgcatgccgtagatctgaaatttcagacaaacttctagagatttaaattttaaaaatttgcaaaaacataatggtcaccttggttttggagccgggagtacatttatcaccaacatcactaatgttgtattatagtttgtttaagatatctaaaaaatttctcctaattatctacaccatgtatctgaagcttttattgcagaaggttcaacaacttattacattttatgtgccatgggatattgggatatttctccatttttacacttgaagcaaattttttgtgtttgttttatcaggtacataaaatagatagaaagagaatagaacattaagaaacttgcctggagcaatgcccctgccagtccactccatcacactgtttaattttttattactgagtgttagctatccctgtgttccttattactaaatgctaatacatagacttaatttcagttgttgaactcctttccaacagcctatctgttcacaacaaggaatactaggtgcaaagaagactacctaggacatgtttaggattctattgccttcttagtccaactaggtaattttcattgggaatcatgtgactttctacagcttacaccaaggtaattaaacttcagtgtcattgcacttgtgaagttcatttcattgctttcttggttttaattcccgccatcacattttatacatttagttaggaacgaagcaatgactatcacttttttgtttgtttctatatttatgcaaccgtggatatcaactaaccaagttgtggtatcttatattactacttttagagctgatgatgacctacaactgatatcatgaatttgtgactcaattatattgatgtccctaactttttttaatgttcttgaattgattctctaggaatttcatgaactcagtaactaaaaggtaattcagagcagttatttatatgtcctcaaattttatcatttggctgtagaatatgaatttgttccacaggacgaaatgcatggtataatctgagatgttctgcactaacagccgtgccagtgtcacctaattatctgtcgtttattttatattgttagcagttaaaagaattgattaagccatcatttgatatgattttttttcaattcaaaattttaataagtgagcaatctaaagggcagaagcatactcacaaatttcaaatccgataatggaatatctgtggttttcagttcttttattttataaagttagaatccacgtataacagacctttaggctcttttatcgtagcaattgtctcttactctgatgctcatgcatgtaagagcatgtgacattatcaagtttttgcttttgtaacactaacaaaaccatgttccagtttacattcaaatcggtgaatgtattgattggatttgcgtgttcattgttgagtttgtagtgaatattgaagaaatctgttgatcaaaagattttatgtttatgttgtaaaatggaaataaaaaaatgtgttctatttctttactattattttaataaaaacagaagtgaacgaggtggttttttaaaatgcgaatactaagatttgaaaaacgtgtcttgcatactagtatgttctataagggactctcattgtaatgaagtattgatagggactctaatcaggcctcctataaatcgttattgatttgtcaaaatatctctggaaaagaattactactacctgccggcgatcacaacaccgatttggacaggttttattgtttgagcacgacgcgaaatctaacaaaagctgctccacacgaacactgcttgtagaaaatgacgataaattcacaggctcacagtgcagtggcccatctctttggacggagagggccaccggagacaggaaggcagaaagaaaaaatggcgataggatggcataggtcacagagcctggcgtctgcagggctcgggctgcacgtcctcctctgctcgtcgttgctgctcaacgccgtcttcatcgcgcaccaattcctcggggcctcaccgccggcaacgccggagcggctcggcgacgggctgagctgggcactgcaggcggccaaggaggccgaggacgtggccgccgtcgactgctccggccacgggagcgtgttcctggatggcgtcaccggcgaggacgggcggcccgggtgcgagtgcaacagctgcttctccggtccggactgctccgtccgaatccccaactgcgccgccgacggtcaagggtaatgactggcctctcctcgcttgctcgtgctcttgcgcgctgctccacaacgccttgcatgcacgcagcttccctcctctttgtctttggtgtgaaatacttttgaactctcgagggtatcgaggacagtttgcacttacatcactcaaatagttataaaaaaatcataaaaatatctaacactggtacaatatacatataacgcttcatcacaaaatttaaacataaactcaactcacacataaaaaaaagagagaaatttcaacgtacaaacaatatagtactattaatctctaaatttgtcttttttaaaaaaaactacaagttaaacttgaaattgatttttgctgaagtgatagatgttactatttgtctgtcctatgttataaaaaaatagatttttttgggagtagctatatttatggcgccatatttttcaccaaaaaatagtcggtatatttttacattgtaagtcattaaattacatatataattttagtgtatttacaatgtaagtctcaaaattacatatgtaagttctaaaattacatactaattacatatctaagtggtgtgtaactaccgtgtaaatttgtataaaatatgaaaagtgacatattcgttgcaagaaaactgtcggttaagatatagcaattccgtatataaaaccaaccggaagatcgggtggatacggttgccgcagcgtttgcatgcgaacgaatctaacagacttgaaaaccgactgagattagtgaaaaaaactgtcgccatctttatagcaattccgtttttttttcacaaccattagtgtcctgtcctgatggtgtgttgttgttgcaatggctctgtgcagcggggacccgttgttcctggagccgtattggaagcgccacgccgcggccagcgccgtggtgttctccgggtggcatcgcttgagctacatcaccaccgatggccacttaaagtccgttgagctcgatcgccagatccggcggctccacagggccgtcggcaacgcggtcgtcgacgacaagtacttggtcttcgggaccggctccacccacctgatcaacgcgctggtgtacgcgctctccccggaaggcaacgccgcctcgccgccggccagcgtcgtcgccaccgtgccgtatttcgcggtccgtgatcccaacaccacttcacgatgacacatcctacgagcatctatacgcgacttcactaactagttgtgttgatcgatgatatgtatgtagatgtacaagtcacagaccgtcatgttcgacggccgggagtacagatgggacgggacaaccgctgcgtgggcaaacaacaacagctcacggaaccccaccaggggtttcattgagttcgtcacctcgccgaacaaccccgacagcacgttgcacgagcccatcctcgccggctcgtcggcgatcgtcgaccacgcgtactactggcctcacctgacgcacatcccggcgcccgccgacgaggacgtcatgctcttcaccacgtccaagctctccggccacgccggcagcagattcgggtacacacgggccacagagttcccagctgcatgccatttgcaagcaagacacgtacacaacgacaccaaagctgatcgatatacgccgtgccgtgcattacgcaggtgggcgctggtaagggacgagaaggtcgcgagcagggcgatatcctacatcgaggagagcaccgtgggcacgtcccgggagacccagctccgggtgctgaagatcctcaaggtgatactggccaacctgcacggcaaggaggacatcttcgccttcggctacgacgtgatgagcagccgatggcgaaggctcaacgccgtcgtgtcgcggtccacccggatctcgctgcagaagatgccaccgcagtactgcacttacttcaaccggatcaaagaaccatcgccaggttaaaacggcacattatctctgcagatcatggcatttcaatttctctcgctacctctcaatcgaattctttaaggtgatgcgatggcgtgtttggtctaccctgatctgcagcctacgcttgggtgaaatgcgagtgggtggaagacgacgactgctacgagacgctgctggcggcggggatcaactcgcttaccggcactgttaacgaggccggcactcggtacacgcggctgagcctcatcaagacgcaggacgacttcgacatgctcctggagaggatcaccgaatttgtcgatgccgagaagcacggcagagctcccgctgcctccagctccatgtgaaaatcgtgaattgggaccgggacaaaagctttcgtctagctggcttcgatggccactgtgccggaacgatcagctgctagctgattgtaggcaataaatacaaggcaacgtggaaaatcaagactggaatgatcagctacgcgttaatcgttcattcgttcgctgtcgacctttcgacggacaggtgtaattatgtggatctacacaatcaattaggtggacactatgtgattatgtttgcagtgactaataattgagtatgtaaataaatgaagatcatacatgttactgattcagcactcgtcattcttggaatcaaaagggaaaaagggaaaatgaaagcagatagaggcacttagaactgctaaaataattttaaaaactgcgcatccggggaatcgaaccccggtcagtaccgtgggagggtactatgataccactacaccagatgcgcttacatttaaatttaccaaacatgttcttgatgttagtataaagtaataactcgtataatattgcacggtaaagcgagcaaattgttgagctaatatattcagatttggcgaattggcagccaatttccagaaaataaaatcatctcctacgacattgtcgtgctctgaaaatgtgaggagatgaaagtgatttatgttccacacaagtcaagcactagagcagagctacgagctagtactatgataatgatacttctatcagatgtaaacagcacaataggtaaactctaataatcaattttcaatccctacagattacagatatcatatgatattgcatactccgattagtagcgattctatcatgcacgagaagcaaccatttggttcggccatgacaatgttggtaagactgagcagtagtgggagtggattctaatccctcgaggggatatctccgcgtacatctttttcttctaaattcgatgcaaatagttgtgaaaaaatctgaaaaaaattgacaatgtagagtataatgatacctactagtccaccaaaatttatgttcaaattcgatctacacatcgagaaacaaaaataaacagtatgctactattcatacgctgaatttgtcttttttatatctcgacgtgtgagttgagtttggacttaagattttgtgaagttatatatatgtgttgtatgaatgttgtcaaattttttcagaatttttcataaccacttagatagtttttgagcaaacgaggaaacatcccctcgagggattataatagtttccagcagtagtagcattttcagagcttgtcgaccttgtcggcactgacgacgggattggcgcgggcgatggcatcgcgcccggcgcgcccctgtaatcgtagccacagtcgtgcctgtccgagtagcgggtgcgcgccgcagaacacggcgccgcagcggcactcgaaccccatcagccccactctcctcccgcacgcagcgcacctgctcttcgtcttcgcccgcggcggcggcggcggaggcatcgccccctcgtccacgggaatgccctccggcacggtaccgcgccgtgaagctccgtggacgacgatgacgacggcgcctgggacatcacggtctggcggaggctgtcgcggtagcacttggagcagaggccgcgggtgttggcagagccggagaagccacagccgttcgcgcacgggagcggcagccgctcgtccagcgtctcgctcccctgctccatcgctcgcccgaacgcagaggcttctcttccccggggagtcgacgatcgaggtggttggcagctgcaagaaacgtacaggataacaggaatcggacggggattcgtagggtctgtaccgaacgcgacttggtgcctcaaggcctcgggaaggtgggatgatccgaagcaagttgaatatgatgtgttttacaagggagcgcaaccgcgggcagtggaatcttcggttggtggtgccgagtgactggtgctagtggcgcagccagccgtgcaggaatgccaataaaatttctggtttttgcgggcagccgtttaatctggataggatggagattgttcttctgggtctgatggtaaaccagttaattaaatcaattttgggcttccaggtctacaaccattttttgtgtgtggtgaaggtgaacagagcaaaaagatttcattgttaagttgataggatgggcatcatgcttttatgacgatgctatgccgccgtctacttggagacgtgaatctgtcctctggccttcgctgccacctcctcctcccgatctaccctccttcggtgagtcactaaataacccacagagagggcaggttgcgtacatagcggattcacagaagacgaggaagtcctagtatagtaaaacaaaatgtcgttggcgtttcgtaaaaagaatgacgttggcaaaaaatagagatcacggatgaggttaaatgcgccaagttcatcctaaccgagcacgtgaataaactctattcatatggtgttatcttaactactgtaataaagaactaaaacacccttagagcaatgtcacccccataaaaaaggtccagggtagtgatataatttcccgtcccatatgaataaaaaagagttcataagaggcaaaagggaagggttctccatccattctctccatctccactactatcacacatgtcagatctaaagagagaatggtgtcaaactcattctcatatgcacaaaaacacatttgaatgtttttgagtaatttcgtttttgcgacgcacaaacttttcggtgagccgaccaacgacttatgtaaaaaaattgcaaccaatggtgccaaacatatttccattgatccatccatttgtcagtttgtcaccctcaccaccaagcaccaccgagctccaaggccccaccaccgcccatcaccacatgtagggatgcaagcggggtaggcaagcgggtttttttagcccgcttatctcacttctagttcattttttcttctaaatattgtactatcatataagaaatgaactagtaaacgggtttttatgcgggtagtgggactacctacttgcatccctagccacaacccaacgtcgtccgctccaccatcaagcatgcccctgccgctgagcaccatcttcccgtcgctatgtgcttccccagcccgacaccgctttgtcggttgtcactgcccttaccgccaccgagcgccgcccctcgccacctcattagcgaactccgaggggagccaccgctctcgaagtcaattggtagagagtatgatggcaaagtagcagcagggattgctctcgaagtcaattggtagataagcaaattttgattcgttgtacatgatgtaaatactttgtaatgctctcgtagagggtgcagatggctcccgagtcgggacagtggggacgcagaggcgcccgatggcgagtgcataggcgcgcaacggcaggggcagtaacgcacggtgttgggggcgcaggtgcttggcggtaggtggcgacactcggtgttgggacggcaacgcatgggccaaacaatggatggatcgatcgaccctatctcctctctcttctctctctttggatctgatatgtggggctagctaggggcaaaaatgtctccaaaactgagaaaaataatgaaatggaaaagaaaaccaagaactagagaaaaggaggagaaagtgggtgcttctaatactgtaatacatggtcgatcgctgaacgcgaccagctcgcccccctcgctggcctgtagcacgcgggcccacgtgcagtaaaaatataccaaaaaagaaaggaaattattttaaaccagaaatataatatttctgttttccactgacgcattttcaggtgaacatccacgtgcttatttttctttttagttttagatatactttgtttgtattggtttatgtcagtctgttacccaacatatccctaataagcacatctagttgcttcatattttttttattggttttgggtgacttcaaatcctattgtaagtaggaacttttaacgtacaaacttcacatgtataaactttatacgtagaaattttgtacacatgaactttggcctataaattttatgtatataaaatttagatataaaaagtttctatacatgaatttcaaacgaattaaaaaaatcaaaaagggccaaaaacatgttggcaatagcaaaaaaaactccgatcaaacaccttgctggcagactgttcacgcccggcacggcaagaactgcagcggcaacaacgaacagagcagcaaacagagcagaggagaagtttcagagaaagaattcttgcgagaatgtatggggcaattttttctgggtttttctcattcaactgaatgtaaaccttacaaaaagaataaagagctaagagaactacttatactcaacgcaaaaaaaataggaatccgaggcaaaatcgcgccatcccacgatccgcttttctctgaactccatgcacacacccacgccactgccagcgctagactcggtcacgattaactgattcgcgacttatttgcatctctaacaaactcctgctagactaattcatcctcccgttcagctccgagagaatcggcttgcattgggccacagctgaaattaatcaacaatctcccccttaattctgccgtggccctagtgaacgaacaccaagaaggtgtctcgccgtcgccagcttcgccgccggcaatcctttcgtcagtgcatccgcccgctgctcctcagtccggacgaactccacaacaatttgcccgccatccacacactcccgtatgaagtgataacgggtgtcaatatgcttacttctcccatgaaacaccgggttcttcatcaatgcaattgctgacctattgtcgacgaagagcttcactgctttctcctccactcccgccacttctgctagcaacactcttaaccagagcgcttgacaggccgccgtcgtggctgccatgaactcggcttcacacgacgatagtgccacagttttctgcttttgcgagctccacgccaccagactctgattgatgtagaacgccattccaccagtgctgcgccgatcatccaagtccccggcgaggtcactgtcagtataccctgtaatcttcagtgccctagtgcctgcagcatacacgagaccataatccatcgttcccttgatgtatctgagaatttgcttcacagccttgaaatgcatcacggttggcctctccatgaacctgcttgccaccccgacaacatatgacagatccggcctcgtgtgaagcaaataccgaagactaccgatgatccgccgatactcagttgcatccaccgggtgaccttctggatccttgctcagctgcgatctcggatcgattggaattgaaactgagttgcactccatcatcccaaactgagacagtaatttcttggcatatgcagtctgtttcaatgtggtagcactctcatcttgatcaacctctatcccgagataatatgtgagcaaaccgagatcactcatctcaaactcccccatcatttgttccttgaaaaccttcaattcagagggattttctccggtgacaatgagatcatcaacgtaaacgccgacaattatgccatcacttcctctgcctcgggtgtatactgcctgctcctgcgtacaccgatcaaagccgagctccctcaagcttctgtccaggcgtatattccaggctcgcagtgcctgccggagtccatacaatgccttatgcagcttgagcacaagatgctcttttcctgatctagcaaacccttccggttgtgcaacatacacctcttcttcaagttcaccattaaggaatgccgatttgacatcaagatgatgaacctgccagcggcgatcagccgccactgcaagcacaacacgaacggtatcaagcctcgctaccggagcaaacacctcttcaaaatcgaccccttgtttctgcacatatccttttgcaaccaaccgtgccttgtgcttgattatctcccctgtcgtgttcttcttgagcttatacacccatttcagcccaatcgctcggtgcccggctggcaacatggccaactcccatgttttgttcttctcgattgcctccatctccctctgcattgcttcttcccacgcaggttggccggcagcttctcgatagcttgatggctcttctgactcagctaggagcgcctctccatcacattcgtcctccaccaaatccacacgcggggcctcacgtaggacatctgccagcgatctataccgcctaggcccatcatctgtatcgatgttgtcatctgtgcccggtgacggcaccaccccggcagagtttgtcgatggagaaccgggcgtgggcgttccaggcagagtcggtgatgctgccaccgggcttgccggtgacggtacttcttctgccgccaccactgcttccttcccggcgcgcctgccaggagacggtgcctggtacgacggtaccacgccggccgctgttgccgggctcggcagctgctcaccaggctcctcctccatcgtgaaatccgttggctcctgtcctgcaactgatgtccactcccaaggtacattttcctcaaatacaacgtcacgacttacatgtatgcgcccacgacgcggatcgaacagacgatgagccttgctcccttcctccacaccgagatacacgtacggtgcactcctgtcgtccagcttcttgaggtgcggctgcgtgtttttcgcgtgtgccgtgcagccgaacaccttgagatgtcccagctgtggcttcctccccgtccatgcctcgaacggagtacgatcacccattgccttcgtcgggagccggttaaggagatgcaccgcgtgacgcaccgcctccccccaaaacctgcccggtacgcgcatccccttcagtagtgagcgtgccatggccatcaccgtgcggttgcgcctctccaccgccccgttttgctggggcgagtacggcgctgtcaggtgacgttgaatccccgcctcctcgcacacctgtgcaaactcgcctgacaggaattcaccaccccggtctgaccgcaacgtcttcacgcgccgcccagccgtgttctcggccagtggcttgaactttacgaaagcatcgagcgattgatccttcgtcttgagtacgaacacccacatccaccgggaataatcatcaactataagaaaaaaatagcgattaccagacatcgtactcggtgtaatcgggccgcacagatctatgtgcagcagctcgagcggctcctccgccctgaagtgcgccgccgccgggaacggcgccctggcctgtttcgccaccaggcaagattggcacagctgattcgggtggacgattgccggaacaccccccgccatctccttgtccaccagcagtttcattgcttgaaaatttacgtgtcccagccgcgcatgccacagccaagccgggtcgtcgaggctggacagcagggacacgggatgcgccagcttcaactcaattcggtaaagacgatttacagtgcgcctcaccttcatcaccagccgccatggacttttgtcgaacacttcgagtacatcctcatccatgaccacgcgatgcccggtctctgttagttggcccaaactcaccatgttacattgcagactggggatgtagtagacgtcctgtagcagccattgatcaccgttcttgcatgaaaaaagaatcgaccccttccccttgatctgcactgtggaagcgtcgccgaacttcacccgtccggtgatcgactcgtccagctcccggaatttgcttcgatcgccggtcatgtggttgctggccccattgtccaggaaccagacatcgccagcatgtccaccagcgtctaccagtagcagcttgggccacacgcgctgctcgcgtacgaccaatccgcacgacgcgcgctctggcacatcctccgtcatcgcaagcaacagggcaggcccggcgtcctccgtctgtgcaagatgtgcttctcccttcttcttcttcggatgtgggcattggttagagtagtgcccgtactcctcgcaattgaagcacttgatgtgactcttgtcacggccaccgccgccagagcctgcacctgagtcgccccgcggcgtcccaccgcgtccgcctgcgccacggcctctgccgcgaccgcgaccgccctggccgcgcccagcaccttcacctgaaggtttgttcttctgtggtggcgaggattccccgccgttcttcttgaagtgagcttcccactccgcttgagtgaggagcacctgcccatcggtggtgaccccgccagcggcagccttcttcttccgcatgcgctcctcgtaggccttcggtcgacccactgcctcctcaaatggcatagtatcaatgtcataaaattgctcaatacctgcgacgaggctgacgaatttttccggcaccgtgtcgaacagcttcttcaccatcgcggaatcacccagcgtcgagcccaacgccgagtgacgcacgctcatcgcggtgatgcggcccgcgtactgatccagagtttcccctggctccatcaccatggcaccaaattcacccttcaacgtctgcaagcgcgcttcgcgaacgcggtccgcgcccacgaaccttgtcttcaagcaatcccacacttccttcgccgatctcttctttgccacctgcatcagcaagtcctccggcagggactgcaacagatgggacctcgccttcttgtcccttcttgggtcgacggccaccccggccgccggctcgatggcgtcccagacaccctggtcctccatcatcgcctgaacccgaatgcaccagctggtgtagttcgttgccgtgagttgtgggtaggagaaagcactccccgagctctccctcgccggatccgctcccgctcccgccggaaccaacgccatggtgtcagatcagccctcaacctgagtgctctgataccacttgttggcaatagcaaaaaaactccgatcaaacaccttgctggcagactgttcacgcccggcacggcaagaactgcagcggcaacaacgaacagagcagcaaacagagcagaggaaaagtttcagagaaagaattcttgcaagaatgtatggggcaattttttctgggtttttctcattcaactgaatgtaaaccttacaaaaagaataaagagctaagagaactacttatactcaacgcaaaaaaaaaataggaatccgaggcaaaatcgcgccatcccacgatccgcttttctctgaactccatgcacacacccgcgccactgccagcgctagactcggtcacgattaactgattcgcgacttatttgcatctctaacaaactcctgctagactaattcatcctcccgttcagctccgagagaatcggcttgcattgggccacagctgaaattaatcaacaaaacaggccaagaaggtagctgcatagaaaagtttaggaaaaagtacggattacgcccctaaactatcgcggtcgaacgaattaccccatgaacaacaaaactggacattattcacccccaactatgcaaaccggacgaattaccccctcaacccaatccgcggtggttttggtctacgtggcatacgcgtggcagtccagtcagtgaggcccacctgtcattttctcaccctttctcttctctctctttccctaatccccctctctccctcctctctcccctcacctccattaccaaccgacgacgacgagctgaggactgcggcgcgcgggggcggagccaactggtggcgcgaagggggggccgaggacggcggcgagccacgcgacggcgggtcttcgtcgtgggagcagaggagcagcagccgacgcggcctcaccttccatcgatgcgcgggagggcggcgcgacagcagggggacacggacgtagccccctcctgctaatgcggtggctggcggctgcccgagcagcgtcgtcgccgctgccgtcttgctccatgtcccgacgccgccgccgctgccactggagccggccgagctcgtcgacccgctggctcatgaaataccaagatctggcagtcctctgctggggcctgttcctgttggtgggaagcatctggagcaccagtagcagcaggaacacaccaaatcccttcacagagagaatcaaaattcctcagagacaagaacactagagatgattcctcctgctcaccgccggccacctacagcggcatcgaggaagaaaaggtcgtcaaaaccagcgagaggacaacacacaccacacgcgaccacgcaggaccagcggatccaacaaccacgcaaaaaaaaaaagcagcagcggtggtggcatggatggagcgatgaaattgcagcgaacacgccgctgctaccggagccggccgagctcatcgacccgccgccgccgcccaccacctgcacccgcgcggcgccgtgcgctgacctgcgcccgacggcccgagagcccgagagagagggaaagagagagagagacaggtggaccccaccaacaaaaacaaaaaaagaaaacgctgactggattgccccgtgtacgccacgtaggacaaaatcgatctggattgggtcgagggggtaatttgtccggtattaaaagttcagggtaaacgatgtccgattttcaggtttagggggtaattcgaccaaccgcgatagttcaagacggtaattcgtactttttccaaaagtttaatatgtagttatgcagtacatgcacgtctttgtcagcaacaaaagaaaaaaaagagagatatgcactaacttgcttccatcaaaaccgataacaataaaaaagagaaaacaacaaaattcgaagcaatttctaacagcaaaacggtgaaagtaaagaaagaggaaatggttgcggtgcgcgagcctaggctagaaaagaaaagaaaaaaaacccatcgttccaccaggatcacagcaaacgcccattagcaatttttgagaaaatgctaccaaatactaatgttaaattatactccctccctctctaaatttgacgccgttgacttttttaaatatatatgaccgtttgttttattaaaaaatctaaatttgacgccgttgacttttttaaatatatatgaccgtttgtcttattaaaaaatttaagtaattattaattctttttctatcatttgattcattgataaatatatttttatgtatacgtatagttttacatatttcataaaagtttttgaataagacgaatggtcaaacatatttaaaaaagttaacggcgtcaaacatttagggaaggaaggagtacaatgcattgattagttggtaaaacctaaaaggcgcgctaattgagtggtatattctcaaaattattgtcttgtgagataatatatagaagactattttaatcttattattgttatacgaaattcactgtaagaattcgcttgaatatatatttttctgaaaaaatcatgagctgcaattaggagttcgatcatctcaagttagcatatgaggtttttttaagaaatttcttatataactcatgtattttttaaaagcgaacaaatttaaaacccgacttaaatacggatatgtatcttaaaagcgaacgtacttaacaactgactcaacactgatgacataaaaaaccgttaaaaatatttttatcttttataatagtagaaagagatagagatagagatagagactagtcaagggcggcttcacggccattcggatcggaaagcaacaagcctgcagctttacgtacaatttcctcacgtcacgatgagagacaaggaatcatcaactacgctgtccccgcatagcaactggggaatcagtccatcaaaaaatctcggggaatcagggttataattttctcatcgcaatagactagtgaatataagaatctagtggaatctctctctcttccctctagcagtatttttgtggtgactggtggctcgacttcgatggttcgtggaataagagcagattttagctgacttttccgcgcgtatataggaaacaacaagaagtagaaaaccgttagaacggaccaacaatgaaattgtagcatagatttttttttatataacactgcaaaaaaataaccgtgcgttgcaacgggtaaactaaaattttaccaaatataaaatattatattattagggttgagtttttcatgatatgggcctttaagaaaatatatttctagagaaataatgaaagttcaaaaaaaaaagaagaaaaggcctctttagaggttagacccgccggcctgctagggcattcgcacgcgcggcccagcatcccagcagtgttgcaacccaggaagggaggccggcccgacgcggatcaacctgagctgttcattttcattgacggctcagatcgattctgaatccatcaaaaccgctaaccctaaccctcattcactatctcctttccttccccaccgcgagtccgcgagccgcctctctctctctctcttggtgccgcctctccccctccaccgctcctcctccccttccccagcggcgccgctccccctccacccaccggcggcgccgcttcatctccctctcttcctcccaaccgtcattcccctcgccctctctcacgcctctcgcgtgatgggtccggcgacggcgaccgcaggtggatccggccgcaatggtggcggctgaggacggatcaggcggtggcggctccatccgacccctttcgcctccctcctgtggcggatctgacggcagtggcggtgtcggccccattcctagtgtggcgacgcggccaggagcggcggtgggctcgggagctggtcgcggtggaaggcggtgatgcggacaacggcaatggcaacgacgacggcgatgacgaccacagcggcagacgacgacggcggcggcggcggcgaccacggggaggactgctgtgggaggtggctagggttagggtttggttttttttttatttgggatgttgattttgtaggggattcttgattttgatttgggattgcaattgagtgattttgtgattttgggcaaaggggttgggagcaattggttgatctgctcgtggatttttttttatggtgtatttgagttctcttgtggatctctcttctgattttatttggttggattagagttcgattcttttagttttttgttagaaaaatcgcaaaaaagtgcatgggagggaatcggactgaaaaataaggcaaaaaattgcaaaaaaagaaatgcacggggagggtatcggactgcacatcgcattatactcggacgacgtaccaaaattcttgccaaaaacatcttaaacttttataatactagaaaaatgcccgtgtgttgcaacgggtgaaggatattttaatcttattgttgttgtacggtttagctaaagtgaaattaaccgtaagaattcgcttagatatattttttacaaaatcatgagccgcaattaggggtccgatcgtctcaaattagcatgtaagttttttaaagagatttgtatatgactccttctgtatttctaaaaacgaacacaattaaaaaccgactcaaacacggatatgtatttccaaaagcgattgaacttaaaaaccgattcaaacacaaatggcgtaccaaaagtaccaacaaaaacatctttatttttttataatagtagaggtagagatttcttatacaactccatccatatttccaaaagctaacgaacttaaaacccgactcaaatactgatctatatttccaaaagcgaacgaacttaaaaaccgactcatacacggatgacgtatcaaagtacagacaaaaacatcttcaatttttatattttataatatgtaaagataaagatataatacagtgatatacctgtgcatttcaacggcagatttttcatgggatttaaagtaattttgaccggttaaacagcctgctgcaggtttttctggtctaattgaggagcactgtactaataaagcaatgtgtcagctatctagaggagaaaagaaattgaaaaaaactgagaaaaacggtgagggtaggagggttattaactgatgatacggggtagaggtgggccggttcagtttacaggattttctcgtgctacgcacgctagggaagagagcaggattgtacttttaaagtagttgtagacaaggtaataaatagcgatagtagcggactacatatagcgtattggaacttagcagccgctatagcgtttcgcgaccgctatacagtctgttattgactttgttggatctctataatgctaaaatgatgttctttacatatggatagaataacttagtacaatgtgccttctttatcttatatattaatatgttattccataatttttatgttatgaaatgtagaagtaattaagcatgcagtttaaattttaatttttaagtgaaacttgatgttaatcttgatataaaatctaaatttatggttatttttcttaattttgctattgaaacttagcgtccgcaatagcgcccgctatccgcaatccgctacccagtcactaatccgctaccaatttactatacgctatttattatcttggttgtagataaaacaaatatacatatttaagttgtaatattacgatatgatagttttagcaatcgtgcttattaaaaaccatatgtttggtatttgctactggattttaaatgccttaaaatttattaaaaaaaatacaaattacatattactaagcctaaaatcgtagcgctagactgtgtagttttcgtttattttagttgggattttgttattttatatggttttatttttacgtttatatgcttgagtatttttgcatgttttttttcatgaacagaaaatttattttctattagtctaaagaagggactttgtttaaataaaggatgagaaaggtatgttttttttaaaaaaaaaacatacaagcacctacacttccaatatacttataccttatcatcgtaatatttagcactaattttgtcacaaggctatctttttttaaaaaagagcaaaagctttgccacatatatattgatacagaagagtcacaaggctatcatgagttttatacctcacaatatatcatttcatcaacttttgtttggtcagaatttacttctataacatgatctgtttgcaaataacaaggatatccatctcaagcaaatatatgtttagttctaatttacatcagaatggtcaattttcaattcattctatgtatttcgttatgaccaacaatggttatgtagagataaacaaggtttcgtggaaataatgttgccattaaacatcaatattttcataaggtatttgtaaaaaaattaatggaaaaaaataatgcattgtgggtctagattaaccgtgtagttgtgtacaacatgcaattgtgcctatagaaatactatatattaaagagttatatattaaatcgaactctccttataaaactcatatatgaaatggaagctaaaagtttgtcatgtaaagtgtaacacagcacaaaattacgtgagacaatccactgcctttgttatatctatcctatagaatattattgattaaatatgatatttcacaacaaatgaatagtttcataattttataaagtattattttagttttacgaaatttactccttcccttatacgtactctcgctactttgtgaatggtctgcttgcattaatttcttaaccatcggactgtgatgatgtgtcatgtagtactattttatttagagcgaattataatttgggtcatcttttattattaaagtttcactttagatatatttaaattaattcttttactttggatcgggtaactttgctattttttttgtttggatcaccctaaataacttcttcagcacttattaacaacctcaaacaaatatgttttaatataccagtgagcttccctatccatgtaacgccttatcttcactgtaataaagggtttatatgaatagtaaagagagttgcgtgaagggtggtccaatattaaaaatgataaagttacctgattcacagtgaaaagattggtttaagaatgttttaaagttttattttagcaataaaaagtgatccaaccggtgatttttttaattcatcaatttatatagtgctgcaaatgtagtaattgtttgcatttagtatcgaacattatttgatgtacctgagatcaggggacagcaaataattaagtagttggagtgttcttatcatatggctgctagagggcccgctttaatataatatcatttcacttttcagattaaatcagtatataccgggaagaaaaccaccacggtgattctcccacagcattagtgattagtgtttaatccggcccaataattccatgaatgaggtcagagagtttgatcaactaccctgtcctggtctttttagtataatggtgtgtgtcagtgtgtgcgtacgtatataccgcgtaattagaaaaataaaactacgtcccatccttatagtcaggcgtactatatacatatatatatatatatatatatatatatatatatatatatatatatatatatatatatatatatatatatatatatataatcattgttgatttgtcaaaaaacgcatctcaaacttctcagaaaaacatataattgacggggactgttcaaatcgaaaatattgtactttgtatgaaagaattacctgcacgcgatcacaactccgatttggacaaaatattttataagcacagattttataatcgaaccaaagctggggccacacgcgctgtgctagaaaccgattaataaaccggtaggctcacaggctcacagtgcagtggcccagtggccgacggtgaggtcattggagacaccccgagacaggaaagcaatggagacgggacggcataggtcacagagcctgggatctgcagggctcgcgttccacgcactcctctgctcgtcgttgctgctcaacgccgtcttcttcgcgcaccacctcctcaggtcctcgccgacggcaacgccggagcggctcggcgacgggctgagctgggcgctgcaggcggccagggaggccgaggccgtggccgccgccgactgctccggccacggcaacgtgttcctggatggcgtcaccggcgaggatgggcggcccgggtgcgagtgcaaccgctgcttctccgggccggactgctccgtccggacgcccaactgcaccgccgacgccgacaggtaactaatttggctctcgtgttcttcagatcttcttggccggtgccttggcttggctactgcacacgtacgttggcacatggcgatggctgccgaataggattaattatcaatcatcttgctccgagcctccgagtgttcagggcttcaggcgccatggcaaggggcgcatccgcggccggcggatattcttgtccatgcggaaccggttattttatccctttggcatcccacgatttgttattaaatctcaaatatcatcaataagatagttcaatatatagatgaaatagttgtaaaaaaaaatctgaaaatctttatacgctagccgcctattataccataaaattgtaattccaaacttggtttacatattgaaaagggaaaaaaaaaaccatccttacaaacagaaattgtatgtagtgtctgcgctatttatagtcataattgttcctcatttcaacttgaatctaagctccaaccccagctgcagtaaccactaccagtgcacctctgtttgatagttccactatttattgcatactagttctataaaaaaataggtactcccaaagtttaagttaatgttattgcccaaattaatgtccttgcaagaggtgtttcttgccccaacaatttcacatgaaacatatctaaccatcctgtcaccacaataattaatactacagtctttacctattataataattaaagagttttctgtactcatgcctcttcatccgtcgctccttgagtcctgatctattttatttgtttcttccgttttggtacataatcctgtttatgattcctctaatcaccccgtatcctgattcctagcgactactgattccaatactgttcgcatctctgcatacatgatcccgcttctaaaactgacggtgagtggaagccaatactgttcgcaacaaaagcaatcaacagaatcatgtattttgtggccctgtgttaccgaaccaaactccaaagaaaaatattagaaacagaacgtcagcttatcaaggccacaaagtacacgaggagaagacgagcacaagaaattaagtcataacaacccaataaaatcaactagaaaaaatgtttccaactaaaaagaaccatcggaaattttaactagatatttttcatgatatggtatcagttttgaaccaaagtgggttataatttcgtgtcattattttccctattataagtgatgtgacaatttaggattttttttttatcatgaagcttaaactaacaatttccgtgatcgggtgatggatgtacacaagtcggcgtcacaatcagttgtgaccgaatattaattattcatgcatggtggcataatttcaaattagtatattttctgttgcaacgtacaaatattttttaagtaatagtttaaattaatcttccagcccaaattaatcttcttccatgactacttctagttctagaagtaggattttacgtcatcgctggaaaatatcgagagatcaggttaattttttttttgtttgtctctgcggtctagcattatacaggtcgagtcaaaacaatcgttgcccacacatgtggctgggccgtatctaaacaaggactaaatgtcaatatttgggccgtacaaacctggctcaagtaaaatctgttttaacctgggtcttaccggaaatactgacagaccagcccaatatatcagttttaactggcgcgtgtgagattaagaacatccacaatatataatttacttaaggatcctaaactctaccacatatgcatactaatggaacacacattgaaacatattgctatcacgtatgaaacactaaattttaacaggttgaaatatatatttttttattagaatatacataatcatgtgatatcttgttgtaaaaatttaattacgaagaatacaactcggattatagatcagataagtagtttaaaataaaaattatttaagatgggaacgagggaggaagatgtagcagtagcagcgccgcatttttatttttcttgtctaaccgggcgcgtgtactagtattctcctggtatttgactcgagatcatttcccctctctcctttaggtgtatctatgcaaaaggtccatacaatgtgtagagtcggtcttttattcttctctctggtttggggcccccacattgcaaatgctcaaatgagctatcattccgtacagaatgtgtagcacagccgctggtacgtagcacggcacgtactccctaacactaatcctgcaatggttttgtgcagcgggaacccgttgttcctggagccgtactggagacggcacgcggcagccagcgccgtggtgttctccgggtggcaccgcttgagctacatcaccaccggcggccgcttccattccgtcgagctcgatcgccacatccggctgctgcacagggccgtcggcaacgcggtcgtcgacgacaagtacttggtcttcggggccggctccatgcagctcatcaacgcgttggtgtacgcgctctcccccgacggcaacgccgactcgccgccggcaagcgtcgtcgccaccgtgccgtattacccggtccgtgattccaaacaccaccacacgctgacaacctgcatgcgaaccatgccattgacgatgatctcagttaattaagtcgtgctgaagtgaactgctttgatcgatgatatgtgtaggcgtacaagtcacaaaccgacatgtttgacggccgggagtacagatgggacggcaccaccgctacgtggtcaaacaacggctcgcgaaactccaccaaaggcttcatcgagttcgtcacctcgccgaacaaccccgacaccgcgttgcgcaagcccgtcctcgccggctcgtcggcgatcgtcgaccacgcgtactactggcctcacctgacgcacatcccggcgcccgccgacgaggacgtcatgctcttcaccgcttccaagctctccggccacgccggcagcagattcgggtacacgccctcaaattaagcctgacattgcaagcgacacgtgaacacaacgacgcaaaaacttgtacactacatatacgtcataccgtgctgtgcgttgcgcagatgggcgctgataagggacgagaaggtggcgaaaagagcactttcgtacgtagagcagagcatcatgggcgcgtcccgggacacccagctccggatgctgaagatcctaaaggtgatactggccaacctgcacggcaaggaggacatcttcgccttcggctatgacgtgatgaggagccgatggcgaaggctcaacgccgtcgtgtcgcggtccacccggatctcgctgcagaagataccgccccagtactgcacttacttcaaccggatcaaagagccatcgccaggtgatcagtttgtctcgctcgctaacactcaaaatcaatttctgtcaaccaaaatctttgtgctcatgtgttggcttgtttggtctccccctgatgggcagcctacgcgtgggtgaaatgcgagtgggaggaagacgtcgactgctacgagacgctgctggcggcggggatcatctcgcggtccggcactttatccgaggccgaagctcggtacacgcggatgagcctcctcaaggcgcaggacgacttcgacgtgctcctggagaggatcaccgaattcgtcgatgccgaggagcacggcagagctcccggtggctccagctccatgtgagaaatcgtgaattgagagggtgccaagcttcgtctagctggcttcgatgggcgctgtgccggaacgatcagctctactatctgattgttcttgggtaagttcatgggtacaataatcaaggggaatgatcagctagacgttgattgttccccgtcaatatttggacgaacaggtagatattgatttgtgtgtattgacgaatgatgtagatatacacaagcaattatgtgtttcagtgatcaacaattgaatatgtaattaaatgaatatcatacatgttacatttactacttaaggcagaacactaatttgtgtgcatactccatcagcatgcgtcatccttgaagtttctctaaaaacattaatatgtgcctctaagataaagggagaaggaaaaacttgggcacgagcgggagcaaaaagacttatgaatatgttaccttagtttccataaaaacacttatataattatttccttttcgaactctttgtaaatacttttaatcatactctatacaattatattgatactgttatgtgccggttagtaaaagaaaagatatgcatatggcatggcagggaaaatggtaatgtgatatgcatatggcatgggtgcgagcaaaagggaaaatgtgggcagagatagcacatgcaaaaacgaaaatgcgggctaagatagtacttagttgcattgaaaaaaaatgtgcatccggaaaatagaacctgactcggtatcgtggaagggtactatggccgtgtttaattcaccccaactaccccacacttctaattttccatcacatcatatcacatcaaaaactttcctacacataaacttttaaattttttccaaactcccaacttttcctaaactttcaacttttttcagggactaaacacacctataataccataccactacaccagatgcacaggccctagtagtctctgaatatcgtcatcaagttagaatcacctactaccactgaatcagctaatagcaggatatgcggttagcattatatttttctcacgtaagagcatatatatttttcacattttatttatgaaagattaaaatgtcaacataacttagcgccactaatactaattccaatatccataaattaaacgcgatatatcctctagtgttctgttaataataccatgactactttgttatatttgtttcttttcttctctctatttatctttacctttgaactagtattagtggcatcttcttttactatctttaatgatattttttttacctactaaagatctcattgtcatattgtatggtagttccttgtcctaaaatagttgtcttttcaaagtttaaattccacagtacttgtcacttgagagtaatactagtcacatcagtcacctcaaattcaaatttctacctattctacctttatcactgttttactttcattcaaataaggggtaatatattctttgcgtgttaaatcttaatttgttctaaaaaaatagaaagataactatttttggaaggaggagtacgcccatgatagtttatagccccgtcgcaaataaaaaatggccattgtcctccaggcttcttcattaatgatctgggacaacggtgtcacgtacaccaagggagtagttggcgtgtagtatcatatcataaggctgtcaccgggtccgatttaattaaatgttcatagcatcaattaatttcgtcttaaaacgacataccagtaaaccactacgggtccatggcacttctcccgccgcatttctccttgactaatcccggagtagatagttttttttaacgactcgcacgagacggtgcgaagttctattgatagagcaggaaaaaattataagattataaccctggagggtcataaccaggaaaaaagaaaaaaatatacaaccccacacacctacagcgccaacacacacgaccaggaggatgctagcatcggaccggccgccgctaaaccaacaaaagaacacagacgagatcgccctgaggggtgagacagcacgacaacgccctcaggagggggaattaaccatcgttgtcagcccggcaaggccggactgggttttcacccgccgcacaccacctgcgaatccatggctgacgcaccgatgctccaccaccacacaacctctgcctacatgtgggacccccgcactggcgcccccgccggccagccttcgagcgccgaagatcgtgccacgcccaccggcatctcctcctcgcaccagggtcgcctcctcctctgccggccgcgccgaaccggcctcctccaccggacgcgcctctcgcgccaatccggcctccctccatcggccgcgcctctcgcgccaagccgccctccatctccgccgcccgcgcctctcgcgccgagccggcctccactgccatcggctgcgcctttctgcgccaagccggtctccgacccctcttccgtactctcccgcaccggccagatgcagccgtctgccacctcctcggctagccgaccgaggccaccatgccaactcccaccaccaccacggccgctgctgccgacggccacctcgctgccaaccagccgcagccccatcgccgtcgtccagccgctaccgcaaccgtcgccacgagttccgcgctgctgcctccgccgcgagagccccaatgccacagccaccaacagccgccaaagccgtcgaccagccaccgtgctgtcgccgccgacaagccgctgatgccaccatcgccatgaaatccacgccgttaccaccgtcgccgtcgccccgtgctcccgcaccgttgccgccgccgacgtcgccgcgagctccgcggtgccgccaccgccgcgagcttgctccgccaccgccgtgagcttgccccgcgtcgccatcctcaccggccttcgggcaaacggcctcaaccgccgttggtgacgctcacacgcgcctgaccgcgtcgcccacgacctcagctgcgccgcccgcgcaaccgtcgccgcctcttccccgctgccagcacgcctgcttccctgccgcccgccgtcgcccggcgtcagccccaccaaatctggccaaaatagcgcggatctgggcgggggtttccgccgccgccggccctatacgccaccaccaggcaccgccagtcaccgccgccaccactccgccccgccgccaagcgctgccccgccggatccggccaggcgggcgcggattcggacggtttgccaccgtcgccgcccggccagctccccgggccgccgagcgcgcgctgaggcgaagccccgccgccaccgtccctgcggccgcgcgactttgccggcgcccgctcaggcggcggcgaggcagagaaggaggggaggaggaggaagaagacggtggcggcgtcacctctcgtgtcgcccgtggagagggcgatgcgagagccctttccctggagtagatagttttgcttgtctgctttgtgtccgttctgtttattcattaattagtatctaaaataagatatgtgtccatcctttcattcttataatcgggtctcctataaaatcgttgttgatttgtcaaaacacatcctcatcttttatgcttatcaaccaaaattttaatttataatcttaaatttcgagctgataaggttttttcatcgaagtttattttttagcttttgcttttagatcgctaagctaagaacacgtatatatttttttttcacaaattacttttcgtatgcaaatatgccatttggcttattctaagcgaaacaatgggctcgctatcttcttagaatatatataattgacgggccagttcaagccgaaaatacctccctcaaccgattcttcccctccgctcgcatccgcccgtctcgcccctgcttgagctggctgccgggagtgcgcgcagtggaaggacggtggtgatggggctttttcctcggctcccaggcagatgggctgaggtttgccgccgaagctgggagcacagtggtgaacggcgacggtggcggtgacaggcatctcgctggcttgcgagcggcggctaggttgcgtcggcttgtggatggcagtggcgacggagttactctccacactctattagagtttgtgtcgaatatgcgtacaaagtcggttacaatttaggacttgtagttgtactagttattggagtagagtaagagtcagactctatgctagtatccttttaattagaaggacaaacttgttgtaaccggatatgacgacttagcatagcgagaggtagcgtctgccagcggcgtccggcccagggtagttgtaactctggtatgctgtaatatactgaattgaggagtagcaccccataaactgtgccccggggatgtaggcttcggctgaacctcgttaacaaatatcgtgcctcggtgttgtcatcatgtttagatctcctatggagtttcttccgtgtttggtttctgatggtaatttcggactgattatctaataagtggtaccagaacttaggtttaaaatccgaaacaatttccaaaggtcaaatggtgggggaggccaggtaaaagtcttcggggtcacatgggttgatgtgacggggaagattgttgcttgggtttagtcccacatcaataattgatggtgggggaggacaacttaaaaggtggtggcagttctctttcatcagactagtattttgggttgtgtagactcaggatatatagttgtggtttcggttgggcctgtggtgaagttggcctaatgtgacctaggtgacctacgatacgtggccgggctgcacactcttacaagttcgtggactgcagcggagatagagtttaaatgagaagatctgagtgggctgatgaatgctgcccggctgcacactcttacaagttcgtggactgcagcggagaaagagtttaaatgagaagatctgagtgggctgatgaatgctgcgggggcggggcgtgttcaggcgactggctgggtggtggtgatgcgaggtggcgacggtgttggacggagacggggctgaagttgtgtctggtgtgtttggtctctcctgatgagcagcctacgcgtgggtgaaatgcgagtgggaggaagacgtcgactgccgcgagatcgctgctgctggcggcggggatcatctcgcggtacacgcgggtgaacctcctcaagacacaggacgacttcgacgtgctcctggagaggatcaccgattttgtctacgccgagaagcacagcagagctcccgttgcatccggctgaccggctccatgtgaaatcgtgaattaggacggtgacaactgacaagcttgttgtagctggcctcgattgccactatgccggaacgatcaggcattttggaaaatcaacactggaatgatccgctacttgctgattgatctatgtcgacgtttcgacgaacagatggtgtgcattgagcaatacatacacaagctattctgcaattggacggacattttggatttcagtgacgaaaaattgagtatgcaaataaatgaagatcgtagtaggcatttttgtaatcaaggacgagcatatgacatggtaagcaaaagtaaatgtgagaagagatagcacttggcattcgaaatggcggacaaaagcaacaggtgagcagggatatcacttggcaaatataatggctaaaaaaactgaaagaatgcgcatccagggaatcgaaccttggtcagtaccgtgggagggtactatgataccactacaccagatgcgcatgttgcttaagcatccaaaggaagttttactcattataacaactaacgtctttaatactgcaaaagaaagggagcaaatctgcaaatggttgtgctatagattcagaattggcagctacttccatgaacaataaaattgtatcctgccacggtattgtgctaactgaaagttttagaagatcgaagtgatatgtgcgcaacacaataagccacacagaatcatcaatttccaatctctacatatatcatatctccatacatagatcagtaccgagtaccgactccatctcgcacgagaagcaaatcagcaatcgaccaatcgtttggttcgggcatggcaatgttggcaagatcgagcagttgtagcttttccttttttttcagagcttctccaccttgtcgggtctcacgacggggttggcgcgggcgatggcgtcgcgcccggcgcccctgtaatcgtagccgcagtcgtgcctgtccgagtagcgatgcgcgccgcagaacacggcaccgcagcggcactcgaaccccatcagccccacgctcctcccgcacgcagcgcacctgctcttcgtcttcgccccgtgccgcggcggcggcggcggcatcgccccctcgtccacgggtacgccctccggcgccggcaacaccacctggtcgtgctccgcggactgtgctgcggccgacggcgcggaggcctgggacatcacggtctggcggtagcacttggagcagaggccacgggtgtcggcagagccgaagaagccgcagccgttcgcgcacgggagcggcggccgctcgtcctgcctctcgcttccctgctccatcgctcgcccgaacgcaggcttcccttccccggcgtcgacgaggaggttgagagctgcaagcctgcaagaagcgtacaggaatcggacggggattcgtaggcgatgagctagtgggagaggatgggggtctgtaccgaacgctacttggtgccccgaggcttagggaagatgggatgatccgatggatgatggcgtttgtttgaagcaagttagaatgtgacgtgttttacgcgggagtgcaaccgcacccagtcgccagccgcgcaggtatgtccgtatgtccagaaaatttctggtttttgcgagcagtgttattcttctgggacggatgttaaagcagttcaaccaattttggactccggtcaaaagctattttctgtgtgggaagatactgatgngctnctgcnagagaagctcatcacgggggcgg

SEQ ID NO: 5542 - DNA, 65584 bp, Oryza sativa
cgtcccgttggatgacggcgccagccactccggcgccccaaaaaggaccatttctgggataagttttttcaggagtctatttgcgaaataagtttttcaaaaggatcaaaatgtgaaaaatccagtgtaatcgtgttgcctacttgccagcccccacgagaaaacgtcgtcttgccctatttctgggcgcagaatcgcagatagcgtggtgccgtggtggcacagggcaggcacatcaagtcatcgaggaggtcaagtcatcaaagacagagtccagctcgctctcctccatccaacgggggaggttgactgatcgcccttgtccaggtccaggctgcagtgtgccatcggagctactacgcagcttcacactcagcagtcagcacatgtaagttcacaaaacttgcagccttctgaagcaaaaactacaccgtactccctccgtcccataaaaaattaacctaatgctaaatgtagcacatcctagtactacgaatctggacatacctctgtccagatttattgtactagaatatgtgttcagttttagttttagattcgtttttctctggacgaagggagtatgtccatatatcagggtcaagcaatcctaataactgaactaaactgcacatagattttaatattttacttgcactgtttgatcacttaaaaaattgtgcaaatataaaaatgaaaagttgtgcttaaggtattttggataataaagtaagtcaaaaaaaataaataataattctaatattttttaaataagacgaatggtcaaacagtacaagcaaaatatcaaagatcccttatattaggagacggagagagtactaattaatgtacactggtttgcttccttactggtagcaatagattcaaaactgcacataggagtataggtcaaaccccaactgaactgcacaatcggtctgcctaggaatctacagtattcaaatgtttaattacaaaatcagatcgtcacggaggccattattgcgtacaaactcctcatagtcagaagaggcacacaagagtaaagctaaaaaaaaaaaaacatgccacgccctggtctccaaatacagagtgtggaaggaatgtacatgatggccgatgctaattgcgagtaggatggatactggaaatagcggatgaaatgtgagaacaataattcctcggagacttcagaaaagcatcgcaattcattacataaattccccgatgtacttggtgctcatcctagtcaaaagctaaagattccagaagtgctctcttcctcaaatgagaattggtcctcaacctctgcatcggtgaaggtaagagctctctgcaactttttgggacagaaaacctcaacatcggaagtgtacacagctgtcacagggcggtgatcggatagcctgatatcaactgtcctgtaggcctgcagcctcattcccttgccaaaggaaagaattcggtcacacctacaaagttaaacaatatttttttttgttagcacgcatcgctcatcgcaacttagagatttcctcatacacaacctcaattcttacaatacctcttattaaatagtagtaatgaggtgattaatcgtgagttatgaggaccaattctttcctcttacacaatacctcttacaatacctcttacaccttcatgagttatgaggtgattaatcgtgtaaacaacgaggaaaaatgttactacctccgtcccattctaggttgtttagcatgtattagggttagaaaaaaaatactacaatacctcttattaaatagtagtaatgtataggtggatctgagattatagttgaggggtagaatggtgagaaatttgaattgtaagtggttgatgtcacaagtaatacttcaaagtgataactattttaggacaacttttgaatgctagaaagacaagtattttatgacggagggagtattaagaaaggacaggataaaaaaaaatgaagagcgtatgcagatcaagttacgaatgatcagattagcataccaggcaggtgttctccttccagattttggctcatcactcgtgtatttctctgagttaaccttgtacttgtatgtcgggggaaagctgataactccttcagtccacccatcaaataaatgccctttcttaaattctcgttttagctatcatagagtagaaaacagtgaggtactatgtatttataaagtagtaggagtatgtcacaagatgctgcactgctgccaaaactttacctggtcattctggaacaaaccattccagtccttcatggatatgaattcatgtgttttttcatatgataagttgatcctataattgagatctcctaaccatattatccttctgaaatattcaagaaaataaaaatattagacaaactgataagatttatataaactaataagcaatgtttcctgcaattcttgatcaaataaaactaaaatgaacaaaagaagtataagaaaaatttcaaatgtgtgcaaccctcgaacacatgcttcattatgtgatttttgccactaatatgcacagattcacttcaaccatttatcccttgttataccatcatatttaaacaagtaaacagtgacgccaaacacaatctaaactgaaattgagccatcatctgcttcattatgtgatttttgccactaatatgcacagattcactttaatcatttatcccttgttatcccatcatatttaaacaagtaaacagtgacgccaaacacaatctaaactgaaattgagccatcatctccaaaagagtatcaaatggcatggataaaaaacatgcttagtttagctagagctttaggaattgcgtactgagcttctagtgttttagagttgcaagtttacgtacttactcatggtcatatatagtcttaggcatgctaactctggaaaccggattaaatattgtccttcgatggatttcttgcacatcagcattccttttcagttcatctccatccttttctccagaggtcaggtggcaacatataaagcaaaagagtgtttgataaatggacatgcttactgctattgatccctggagcatgtcaagtaagaaaaattagcccattgttttctaaatagcacattgacttaccagcgcatagtaaatgtacatgagatggtacgaccaaagtgcacaaaactaggtgctaaaacgaaagtgtaatatgatcattaagaaaacaaatatagtataaaagaatgctaattttggctgtgcctaacagtagaggccggagatgtaaaccatttctattatccaaaaaaaggaatgctaattgttttctacatatttggaattgctaaaggaattgagaatgatgtgcttcacgggaacttgccttattaccaatataacccatagcaccgacacctacggttgatactttcaaattttgaatatgcttccgcaggcttcttcgtacccatattgaaataaaaactccaaccatctgcttgcttattatccttacgaagtatggtcttttcgttttgactagtgcacttttgatgttaaaatcatgaactaaacaatcatctggaaaagcattggaatctccatgtgctgatttgaaagacaaacatgacctcagtgccttctctgaaataaatggtttcgtgctgtctggaagacgctgggccaatatatccaacggttgttcaggccaaatcattccaagcctctctgagtagctgagtgttttagttaacattttttgatggattggctcttccaaactagatacatagtctttaaaacttaagttgtgtgatctatcgaaaatcttcattgaaggcaccctgctgaagttgtttccatttacggtagtttcagtaggaccagaagtagagtgctcatatttattactatgaacactgtcatcatcaacggtaaaatcttgttcattccatgggtgcacttccccgccactttcgctgtcagattcactaacaagttcatcttccacatcgtcagaaggcttgaaccttgatggagaaggaggatcactgtgacatttatattttggtttatcaggactaatcttattcaatgtttcacgaatgatatgttcccacattgcgacaggacggttgtcttcagcaccaaatatattcccagcatttaatggaacaatttcttgaaatctaaaagataataagttcaatttgtttaataggtgaaaaaaataaaaaggagaaatatcagtcatagtgtaatatgaataagtaacaagatgggatgcaacaatttacccaagaacataaatatcagctggctcctccatatccaaccaatcttgaatatccaagtcatcaggtggaagtcttcctgcaacattccatgttcctacgcagaccctgcatatcaaaccaacattttaaggaatagtgacagaacggcagtagattttataggtttcagctgcaattaggcttgatcttaaggggttattcttgtgctaggaaagataaatatattgaggaacaaaccaagtcatttagcttatctgaagcaaattcttacggaaaatactgtgaacaaacaactaggcaagtccagataatctgaagggagaacaaatgcatgcctgagttccttaatgtcgatatattgggcacgaagggtctctgacttgcgccttctattaagcttgtagggagcaccctccatttggctatctgaagatttgatagtcttcgtcagtgcacaaggaagctacctgggttttctctgataggatgtgtatgccagaggtgcttaagaggtagtactagttcccatcgaaaattggtgaaagggtggactagtatgtaccatgtagtatctcttagtttggcagaatcaacaccgtatttcacaattttcagtgtgtggcaaaacaaagaagaaaacatactattaaacaaaacctggaaataagcatccagaaaaaaagaagtttgctactgtgattaatatagtaacttatttcgttggtgatatgtagttcaaatttttcatgtgatgctttgtcaataacccttttgccgatgaatgtgttgaacacaataattatgcgaatcaaataaataccaattgtctcagcgcccaaaccacgcagtctcctctcctcatcatatagttggcgctcccaatggcacatttctgcacaaatcccattataagttcaactattattagaaccaatttttgaaaaagaactgaacatacatatgccgtagccaacaaatttaagtgcaaaatttacacttgttttcccttttttaaagctgcctcctttttgtcagcatacatgtgcggcaaatgtatttatggccgtcagattcagatgtcctttcattttttttccttatttcctttagaaagattgtactagtatactatcttaggaataggatgggagagcttgtcgttttgaaattcactaaacaaaagaaacattggttttaacattctttgaattcaacgtctaattttgtttttttgttctaggtaaacggaggaataaacaaaccaaaggaatagcctaggagttgggaatacaccaccacaagaaaccaaaagaacaatacagtccacctctactttttttaagagcgaggatagtagtgagttataaaaaagctatatgcttaagtggaagagagagaaaaaattgagtgactctcatagaaaagctagctctaaacatgctccaaaaatatgcattaacttcgtggtgagggaaagaaagaggaggaaaacaaatagagctaacctcgtagctaatatattatacatgttagttctacaatgaatttagtaaggagtaagctctactattaaacttgctctaatgagcaaggttagaaaggcatctccaaatttcgttaactccccttccacttcctatcctttttcccccctgaaataccagaatcttacggttgtgctaagtgctaactggaccagctcaagttgaaagaagcaaccgtcaaagctctcatctttattggttgtaagcaaaaacatccacctaccaaaccaatcgatgcattcttctggtccacaacttttcttttccaaagaattatgatggacaaaaagatcaattctggagacgagggaccagtggttgaaccaaaacccgaatgcatttcccgatccattgagcttcacagcgaattttggtttcgatttttttttatttttattttgcaataatgaagcccatgtggtagagagagggagagggtctagatcaccttcgtactcgaactcgctatcggtgtcgtcgtcgccggtggcttcgccctcgtcggcgctgaagtcggattccggcgacctgatgttgagccatttccgaagcaccgtcttcggccacagctgtgtgcatgccccgcgtcgcgtccgaccaaacgtatcagttagcccccgagcaacgaaactccgatccgagagagagagagagagagagagagagcgagcgagctttagctagcgcggcgctcacctgcttctgcttccttcccttgcgccgcatcggcctggacgaggcgccggcgccggcggcgtggtggctcgcagtggcagccggctcctgctggctccccgacgcgccgagcggaggcaatgagcgagccggtggcgtggcccgcgccgacgcggaggtggaggaggcgccggccattcgcgccctcgtcacagcccaccaacacagcgcacacagcaaaaggcaacttctccgtccgccttccctttccggttcccttttttatcgagtccggtgcgaagctataaaacggcaaatttattagcgcttggacttggacttggacttggactgcacggcagctggcctagagggaccctagagtagagccgcagcccgcagcaagcaaagcacccccccctacttgtaccagcgccgctggtggcggtggaatggtggatggatcacggccgcgacgtgcaggctcacgatgtggcgccacgcggcgcgtgggttggctgtgtcgtggtctctccccaagttgcacgtacgcgcgcgaccaatcgcccgcggcgcccgcccgtgccttgaccaccccggcttgggccaccgtcgtcccggctggctctcggtgactggaagaacagctatcgcggtgaccaaaccaagctccgcgttctcctcgtgccgacctgtgctggtgctgtgccccgctgcgcaccgtacgtccattgctatacttgaactggacggagacccggtttatcctcctatcacggtcacggggattccctactcctgtactacagctaccgctgccgctaccacttgctcttcttcctcgcagcgaacgaagcttctttcgacgcgaaaaaacctgtagctatctttcttcgctcgtctcgtcgccgttgtacgtgacctgtatcgcggaccagggttaattagttcgatgtgactgaaatcttgacatgggcttggtttagttctcaactttttctttaagcttataacttttttatcatatcaaaactttcaattttagtcaaactttcaactttttttttaacttttaattttagtcaaactttcaattttaacatggaactaaacacacccatgtttgtgcagtttgccgaccaccgcgcgtgtcaaagttacattcttcgtgtaccacactacctcggtacctatccgaatactacggatttgtcgctagagtcttaacggttgttgcatcgtcatttcatccggtgggagtttcacacttcttcaggttccaacttggagcgtatggccgagtgaaaaaaatggacggtgcgtatgcacggcggtgggccggtggctgccatggcatgggcacagcgtatgcgcggagagatttccaagcaaatccgcatgcacgtgttttccacgcaaagcagcttggtttggaggctgtttcaccagtagcttgacagcgatcagccggattagctagggcaattgatgttgcttgcctggctgccgcctgcagatctcccttcctacttcgctttatctcaccttttgggtgcactcctcatctgggccagcataaccattgcactagtttttgtttcgttataaaagtttctcctcttcttcttttttttttctttcttacacaggaaaaacaactgccatgttcacacaaatttgtttgggcattcctgcatctcttcatttttctctagtgttttacgtgtgacttcagctagtctacagttatgctgttatatggggcactctcaaatattaatactgatcacgcagaacttgtggttggtagcatattgttactttacacaaatgatgtaaaagaaggcgtgttgtctggcccagagcacaacaggtcgaagaagaatcctcttgaagatcgtaaacaacaggcatgctagccaaccaagaaagatcgaatggggcaatgctcaaccatgattgacttgtaaaaagatcaggagctcatctttcctcgtctgagattattcagctgtatcaatactaggattgacatttggtacaagcatagctggttcgtattgcttctggattccgtgggcaatgatttttcttaagcaaaactgttctctatgttggtattaggtgtgtgctttgactagattacgttctgaaacaaaatacctactatacatgattcaggggaaggaaacgctatgccacgatggatcacgtacagagaaatgtttccaacttctttaacattttattatctaagtcggtgtcactgtcttccatcaaacaaggagtataatacattaaattgtactggaatatatttgtttaccaattcatggcatgacaggtcgaagcactgtaccagacagtggtcatatgttttcctcaatacaaaggacggtggtcatcatgcccactgctcctattatcatcactgcaattttgttgttctctatatttttcgaaccatattgaaagtttgcatatttttctagtgaggcatcacctggtcagtttgagacaatagaatccaatcaagtctgctgataggggaataaaccatcatggcacctctttctccctcttttctgaagggagacaaaccatgttctctagtaccgggcgtctgattaaaattctttagtgcaatttatgcaactaaatctgccccatttgcagtacacgcaccactcatcttctctagagagagctagtgcttgcacatgaaagcagagcatgaacagatcaggccatggatgttggtcgtttggagatgccccattcgtccaacagctgcattattggcaacctgacataaccgcactacaaatcaatccaatgcatccgaattttagaggctgtttatttcgtgaaaagaaaatttttggttgtcacatcagatgtttgaccggatgtcggaaaaggtttttggacacgaataaaaaaaactaatttcaaaactcgtctggaaaccgcgagacgaatcttttgagcctaattaaactgtcattagcacatgcgagttactgtagcacttttatggctaatcatggactaactaggcttaaaatatccgtctcgcgatttccatgcaaactgtgcaattagttttagtttttatctatatttaatgctctatgcatgtatcaaagattcgacgtgatgtttttaggggaaaaattggaactaaaccaagccagttcacgttttataacctcattggcattgttctatcgatcggcgatgggctgatggcgacggagagctagtacttaagggataagcaaaaacagggccttgtgcagctttcacagtttgcgtctagcatgacgccatatgcaccactatactcccattcgcagatgatgcgaaacaaaagcaccaaaatccgtcatcccactggcaattcagcatctgtgcaaagcatataatgtgcggataattgagcggtcgtcatgtcagccgaaatggatggtgagatcaacaacaccggttctccgtggtaaatggtgatacgtgcccatacatgcgtgctgtcttttcacctcgcggcctcttgcggaatactcctgctgcaccgctaacttcaccttcgtcttatcccccccccccccccccctgaagcgctcaccacttcactgcgtggaccgcgacgcgcgacgcagcgagtggccacggcgcgttcggccgcatcggttccacgcgcggaaccgtacaagtctcaacgtgacaaacgccggggttgtagagcagccgggtgatatctggggtcgcattccctgttcgctttttacctttcgattcggttggaaaccgtagcgcgcgcgcgcaggggcggagtcgcggttgacgcctgtacgtacgcgtcgctgtcgcgtaccacctgctcggagtacatgactacattacgcacgggccggccggtataccgaaagctagtacgggggcagtagatttttgatgccgcagaagagacggagcgagcgggggtgtggtggagacgtcgacacgcggccgcgagtggtgcgcgcggtgtggttttgactcccgggtgacatatgtacacggattagattatgttatcttcagatgggcgcgcgtacgttgcagaaagcgtgaggtaccgagatggcatgaatgggatgggagccagtcagtttttttatatcagaaagatcataggtaaaggtgcaagcagaccgatccacgaacctatgtatgatacaaataataaacagacaaccttttgggttatctattaatttgaattataaatgggtttgcgaatctttccacttgcacctttaatcatgggagtgcacatactacttgtgcttgacacataatttcctttttatctcatatctgaaagagattaagggtgtgttcgaagagaaggggattgaggagattgagaagatacgtaaaacgaggtgagccattagctcatgattaattaaatattaactattttaaatttcaaaaatagattaatatgattttttaaagcaacattcctatagaacttttttacaaaaaacgcatcgtttagtagtttaaaaagtgtgcgcgcggaaaacgagacttaatctcccctatcaccctggaatgaacagagcctaagggtctctctgaatcgcaggaatggaaaaacgagggaataagaaaaacatagaattttgataggaatataagtacaaaacaaaaaaaaagaagaattagactgcagaaaaatcacaggaattagataaaagagattttcagttgaagctctagctaaaattcctttaaaatctctatagaattgtctattccatatgaattttaaaagatcaacatatgatccaatcatttgtttaaaaacattcacaggaattttttcctataatattgaaatctttcaaatttttttatgttttttcttcgaattaaagatgccctaactttttttttaagatgaaatgaaagagaactaatcactcggcaggaagagccgcacagggcagggatagcctcgtgagagcgactcatccgagacgtgacagagaacccggttccaatagggctatatgccgcgaagtgggagcataaacagaagcaaccaaacgctcgcattctcgcactacagctctgcagcctttcctccccttcccaatgcattactgctagaacaggagacggacggacagcgaaactttggttacaatagcaggctataagccagctgcaaacatattttaaagagataaataaggagaaaaaggagcagcgggctacagatttatagctagctgtagcacggactccaagacgcggtatgtgtatgataggtaggaccagatatttatagtatagtatgtaactattgtatgaatgagctattagattggctatagatgaattggaggctagtagttgactatactattaaacttgctctaagaaaaagtatcatatacggcgaaaacgagactccagtagcagccacaaaaggagctatctccattctgtatcacttgactttcgaatgttgaagaagatgtgttacatttacagagagattgcacgcaagcatggccttgaacccatcttcgtgcactcgtgtgctgtgtattccacggtgctcctgcgtgtgactcaagcactgggatcattttgtatgtgcgttcgccgatcgatgtgttcttcgatcgaaccataccgatcacggggaaaaggagtaatcgaggcgcaccgggggcaccgagcccgtaatctttcaatcctgctttttgtgaaagtagcacgtacggatcgagcggctccgacgttgcctcggctgccaggaacggaacgtgattcctcgagtatagatactctttttttttaagtagctatacaactgttgacagtttttgggatgaaaaacttttaaatataactactatgtaattacattgtaactactatgtaactactatataactaatatataactcgagtgtaactaaaaaaacccgatgggagaattggttaggtgaacaatccctactgcacgcgtctgaattttttaaaccgttttccctcactagcacaaatctcaaagcatattagacggcttaaaatttaaaagtttttaccccctattaactgtcgccagttgtatagcaaatccatttttttttaaacctccaaggtagatactcgacggacgtcataagatttgctttcgtttgtttactcactgtttacatggtgcagcatcgtgcttgtcgatactagtagatatttgggcgtacaacacgacaaagaaggttccgaggcttgggaggctggcccccggcgtccgaggccttgagggtagtagggtggctccggcggtctgcttcgctgttccatggttctgaattaaacgggcctctgatgggcgatgtcgcatattttttgggccagaatcctaaggcctactgttgaagtggacgtgcgggtttgtttaggtgggctcgttatccacatacatgggttggaccgtccaagtaaatcgattcttttaggaaaaagtacaccggaggtccctcaacttgtcatcgagttacaaaatcgtgctccaaccacaaaagcagatatagcacatcaatcattttacaaaaatcaatcattttacaaaaaaacattcactttaggtcattcggtggttttgaccacagttttattctacgtggcagttgagtcagcgtggaacccacgtgggctccacatgtcagcatggccacgtcgggctcattctctgttttcctcctcccctctctctctctcacattcttctctcttctctgggcaagccgaccgacgactggggcggaggccaccggggcgaggcaggagagcaggaggcggctgcggctgcggcgggcgttgcgagccggggtggagaagtcgcgggcgctcaaccacgcactagcagggcggggcccaagcttggggagatccaggcgaggttcccggtgatggagacggcgttgtgcccgatcacgccccgcgggacacactcgagggcgctggggagtacatcaaccgcgctgtggggccggccgtcgccgtgcgcggcctcgagccgccgttcctcgcggcctccgccgtcgccgacgacctcctcggatacctcgtcgtgttgtcccgcctcgaggaggtgctccacttcctctccgacaactgcggcatcgcctcccagtggctcagcttcgccgagtacctcggggaccgcagcctcgccgacccctgcttcgtgtccgacctcgccgaggtgctctctcacctcaagaccccctccgcaaacctggacggcggcctcctcgtcgctgccttggacattcttgaggacgagttctgtcgccttctcaaggaacactcagcttcgctcgccatgaaagaacccaactatagccggccccgcctccaccttcgtgcccactgccgcgggcgttcggccccgcctccgcctccgcgcccaacaccgcggtgcccgcctgcacggggccgcttcaccggcggtggcgacacagcgcgacgacgccattcgcaaccggccgccgccctcgccttctcctgcatcgcagctgccgccgtcacctcctctcccgcctcactctagcggcatccgccccagccgccgtccggcttgcccagagaagagagaagggtgagagagagagaggaggaagggagagaataagggaaagagaggaggccgacgtgccacgctgatatgtggggtccacgtgggtcccacactaactcagctacgtaacgaaaacgggtcaaaaccaccgaaggatctaaagtgaacgatttttataaattgagggatgtgctatatctagtttcacagttaggggacgattttgtaactcagatgacaagttgagggaccttcggtgtactttttccactcttttagctttattaggactgtgttcttccctttctttttcaactcatcttcattttttttacgtgtatgtttttcaaattactaaacagtgtgtttttttcgcgccgaggttgaagaagctggtgagcaggaccgaaacaaagtttgtttcaaactggcaatgccaactataccgtcccattaccacactaatcttttaggccctacttgcctgatgcatctgccgaatttaaaccccggaaacgatattatttgctgatgacgctggcgaaaattcccttgttttaggcatataaaatgcagaattgcagataccgtgcagtatatccaataccagctcgaacttattcggcaaaaaggggtgcccagcatcgcagtgcaatgggctgcgacaaagcggcaaacataaagcaacatcacaaccgtgcacaaccccgaagcagtcaggtggtgtttagatccagggacttaactttagtccctgtctttagacactaatttagagtattaaatatagactacttacaaaactaattacataaataaaagctaattcacaagataaattttttaagcctaattaatctataattagagaatgtttactgtagcatcacataggctaatcatggattaattaggctcattagatttgtctcgcaaattagtccaagattatggatgagttttattaatagtctacgtttaatatttataattaattttcaaacatccgatatgatagggacttaaaaatagtttcatctaaacagggcctcagtcgtctctccggaatttattctggtgaagtcaccaatctatcgcaacgaaacaagacgcggttgaccaatgatcagcaatcagcggttcagcgtacgtttcagttcagcactttgggcttcccggcgagcatgaaggccttgaacacgagcttcctcgccaccgccgggtctccccactccgcctccacccccttcatcacgtccttggtcaccgcctccaggtctactcccttctccctcgccgtcgtcacgacggagccggtcttcaggaacccgacgaggtcgtccagcgtcatgtccacctctatgtcgacgtcggccggctcgccctcgcggcccacgccgacgggctcgaacgggaacggcaggtcgcggtacctgtccatggccagcctcgtcctcgggtccatatacgggcgcatggccgggtacagctggccgtgcagcttgtcctcgaacgggtggatctcgtagttgtagccccacaccgcgaggacgccgccgggcctcttgaggacgcggttggccacggcgtagaagagcgggatgtcgaaccagtggatggaggtcgccaccacgacgaggtccagcgagccctcgccgccgaccatggcgacgaggtcgtcctcggagaggtccaccggggtgtgcaggtaccgcaccttggggtgcgcgacggcgtggcggatctgcccctcgctcgcgtccgtcgcgaccacgctgtcgtagtgctccgcgatctgaacgcacacggagaaacactgatgataaagacggtcgatcgccggcgaaatttttcgttttttttcagagttcagaagatgatgaagcggcgagagtggttcagagattgggcgcttacgctgatggaggcctggccggtgccgcagccggcgtcccaggcgcggtggtggccggctgtgagggcggcgagcttggagaaccaagcgtcagggtaccgaggccgcttcttggtgtacgtctccgacggtctctcatacagcccagccattcttgctctctgcttcttctctataacctccaccggaccacagctccagtcctggactgtgaagagcgcgaattgttggggtggatctggatggaatttatagatcaccgaagatgacagattcagagtcaaagtcaaaatcagcagttgtcatctgatccatctcagtgaacaactttgcatttgcattatccactagtgtattctagtggcggttacaccatttttctcctcctaatagtacaccaccacatgctgaaactgctgcaacaaaaattatgcacaagataaaataattttcaaaggcaatcaggaaagtagaagcatgctgctaacaggacaaggaaaaatatggggtaaaaggtaggtaaaaacaggcaatgcatcaaatctgaaagatgtggattgtagaaagatgaggtaaagacaggaatagcaatctgaaacctgtagattgaaaaatagcctgggtcttgcaagtcaaccagacgtgggcaagttgcttacttcgatttgtggctaagatggccctccacattagtcctgcgctgaactaactgaacccaaaaagatgcttcagcagccgtatatgggaaaacaataagatgctttataacatggatcatctgccagatgaaggcttttacggttaggtcttgattacatcttcacagtaaaaacagatatctttggtttcatcagcatggatataaacatctctgcacaaatcagagtgttgcaacctactataataacgctacaacttaggaaatagaggattctgaataacaagacaactatacaacaataacatgggaattccagagtctgtgactgggaattttagactggcacagcatatgcagggactggaggtgtgcctctgccaacttcagctgaggtttggaggtttaggtaagtgccttggtcactacatgtaaatatttagcttaggtacagcaatatttaaccaaatacacttaagtatttaaccgtgtcttatttgttcttttagataagggttaagtccgatttatttgttagcacttgaagacatggtgacagtaaaaaaggcatgacattagatgataactatataagataaagaaccgctcattttacataattactcttttcagcgatacctgaatgttattcttacatatttgtagtctagtgggtgcaacagtgcaagcaattcctgcactggatcaagtccgcagtatccacagaccacagtccacactgcctgacttagaggtgcaaccgtgcaagtcatctgggaaccttctgtgccgttagaacacatcaccctgtctgcaaaatacctgattcttttccaggagcaatctgataatgcagctttgcatctccaggagttcccaaaggtgcaccagtgcaggaacagttatcaaccatataaagctcccacttcttgatcccacacttatctaaagcagatgccagtcttgggtcatccaaatctggacaagagccatctgggctaacgagcactgctccagtgtatgctagtccagcggcctgagcggctccgtgataatggaacagaccccagctgaaatcatctgaaacatcaacgattgtccaaaactcctttgaaaccacaccattatccagcacactgaagtaaaatgtaccagggatgagagctcttcttactcggtactttctgcgcctccaaaccagttccccttccagggttctgacttgaaaaattggctcataccaaaatgaacctttagcttttcccctgtaaaataattgatactgacatgggaattgatcatatgctggattttgtccagctacaactctccaactccattccaagttgtccaaccatccaacaaacatgtcttctgcaagttcatggcttagcatttgttctctgaacatggttagtgggggtacagagggcttactggggatctcggcattgagatcaagacaattgttcttctgcaaaacacataaagaaaaggcctccagatgcggactctcatacgacgcaatgcagcgatagttgcaaacttgatcagttggagaacatgaatttaaacactgaagggctttcctacagttgggatcgaacagacaattcagtatctgaggaccacaatttcttatcatacagcttagggtagacagaccttttgccctaaggttttgcagcatatcaacaggtcttatgtacgcattaaccacaacaagtaagcaaaatctaatgtcatctgaattatgcctttcccaggcattagatacagccttaaggacttcagcagattccttcatgccacctgtttctccaatatttgttagcttgcaaaacatgtcctgacgtccagtgtattgaacatacctgccacctaacttgttttctaaggttggagatgattgaaagcagattatattgggaatgtcctcactgttatttataagccactgaacagtctcctgactcgttattgcaacattgactagcatatcacactgtgccagctctttcctaagttcatcatggccaattgacttgtctgtgaagacaagcatttcaaatccttcgtcaacccacttcatcctattagcctaaaaagacagaaaaaacgagatgcatggttactggcagtaaatttatgcagagagatattctgcatattcatattaagtacgacaataaatcagaggacctgtttcttgctttctgaatgaacaaatgtgtcatcttgtaatcctcagatgcacaaataagcttggactctacatgtttttccttatgtgcatgctaactcaaaaaacaaaaagttaaacaatttcgatgatactactatattagattgagttcacatgagtggcatcttgggtttgatcgtcatccacaagaccacaaatgggaaaacaaaggaaaccaacttacaacatatttcccatgaatggctctgcaagggttgcagttttgtacactatcactaaataaatgatggccaggaaagactgaaatatatgtgcggattttttttgggtgattccacgcacatgccccttttcataagcccacaggtatgacacacaattgtattatggaaattatgtaaatcctacacaaaccatggtatcatatatggacatatcaatccacaaaacttgaacagaaattccacacttgcattgtatagcgtcacatcttacagaatctaagattgtggcatcgataggtttattaaatcacaaggcaaacaaggtaaaataagcgatacaaaattataatcaagtactaaaacaaggtaaaataagcgatacaaaattataatcaagtactaagtactaacacattttggaggtaccagaaatttagaatgttcgtgcccatataatcacatatacttgaatacttctacaactagttctccaagtgagcgtgcgaaatggttctgtgtgagtgtgcaattgaccaatcgcgtatttgcatgtgctttgccgttacaacattctatctatagaagttcttcagttatcagcatattccgaatcggcttattgcaatactgtcgagttctcctttgcactgcgactccgcactagcatttgatagcggtgaatcggtgctaggttcagagctcagagcggaagcataccgtgtggcgcataacctcctcccatggcgtgtccttcagcgggctgatgctcccgtcgcctactatggagactatgcggacggcgcccttcccggtgatggttccgccggccccgccgccaagctcgcccgcggcggcgcgcggtggcccgagagagcggacgccgccggagtagcggcgggcgatggtgcgcgaaggggcaggcacggaagcggtttcatggaggtggcggcgagtaggtaggaagaggcgagtggtggccgccgcggaggcggacgtggtgggcgtggctgccatgggagtctgggaagaggaggtggacgaagcggctggacctcgagtctcgagccttcgagaacctttcgactcatccctaccgttcgatcagaaaatcgacggtggatactaatctcagggaaaaaaattctggaaaacgtttttctacacaaacaaaatacgagttataaaaactagctggtggcccgcgcaattgcgcggcaaaccccaaacaaaattatatatttttaagtatgattttacttaaaaaatttattaaatagctatctcattgtcttaagacattgaaaggccaaaccttatcatcatcgtgtttctaaatatatagtttttaaaagtcacaccagttgctatccattatgtcatcctcttctttatttgcttgctcgattatcactatttctattcattcttcttggaatcattaaaaattggattttatagttttagagtttattgtcatgttgtgtttcgtttttacaattcctagatgtcccgtcaaatgttgccattatacacctctacggccagtccactgtctcttctctttattatcattgagattttaaaaatcgaaaataattatcgtttggtttattttttactttctaaaagtcctgccaaaccatcagcggctttgccattatactcctatatgactcgcccgttgcctcccttttttattgtcattgagatttcaaaatcgaacatgattatcattggttttttttactttttaaattggacttgtagtttcattttttataatttttagaaattccatcaaacgatgccactatgcccctctacagcccatccgccccctactcattattgtcattgtgattctaaaaatcgaacataattatcgttggaatttattttttattttctagaagtctcgtcaaccgtcggcggctctgcaactatactcttatacaccccgtccgctgcttctctttttattgtcattgagattttaaaaatcaaatatgattatcaatgtggtttattttttttactttctagaagtcccgataaccgtcttactcgtttgcttcacggcctgcctgacatccctccttttaatcgtcattaggattctatttggtgttttattaacattttttatatgtcgtatcaaccgccaacactctactctgttttagatggtattttctttcaatagtctttatttttatcacaaattttagttatttataaattgtattcctaattgaaatcttatttttctttttctaatttcagaattttttttaaaaaaaattagttagtaccgtattgtgttatcttaatgtttttattttttattttcaatttcagttgttttaaaaattgtatttctacttgaactctctttaatttttctaattttagatattattttattttttactctaaattttaattaatctcatattgggttcttatatggattattctttcaatgttgcttatttttaattccgaatttcagctaattttaaattgtattactacttgagctcttcttttattttcttttactaatttcggatttatttctatttttattctgaatttaattaatctcgtattgagttcttatatggactcttcttttaatattccttatttttaattttgaatttcagctatttttaaattgtattcctacttggaatctcctttccttttctaattttggattttattttatttttatttcgaattttgattaatctcgtattgtgttcttatatggaaacttctttcaatattgcttatttttaattccgaatttcagttaattttaaattgtattcctacttggactctccttttattttcttttgctaattttggttttatttttatttttattctgaattttaattaatctcgtattcggttcttctatggactatcttttaatattccttatttttagttccgaattttagctatttttaaattgtattcctacttggactctcctttccttttcttattttggattttattttatttttatttttatttttaattaatctcgtattgggttcttatatggaaacttcttttaatattgcttatttttaatttcgaatttcaactattttaaaattgtattcctacttacactctcctttcctttaataattttggattttattttatttttatttcggattttgattaatctcgtattgggttcttatatggaaatttctttcaatattgcttatttttaattccgaatttcagctattttaaaattgtatttctacttggactctccttttctttttctccgattaatgtgggaatttctaacccccacagcgaacgtggtgtctcctttcaaagctgttttaataacataatagatagatacccgcgcaattgcgcggctagcaccgatataaaattatctaatttttaatatagttttacttaaaattttgttaaatagatatctcgttgtcttaagactttgaaaaaccaaaccttatcatccctgtgtttctagttttattttttaaaaagttatatcagttgcaaatcctaaattctttgtcacccctcatttatttgctttctcgatcaccactacgtctatttgttctcactaaaaacctctaaaaattagacttatagtttttagagtttattgtctcgtttgggttttgtttttataattttcagaagtctcatcaaatgctgccactatactactctacggtccatccactgcctcttctctttattttcattgggattttaaaaatcaaacgtaattaccatttgggttctttttttactttctagaagttccaccaagctgtcagcacctttaccactgtacacatgtactgctcgcccgctgccccctctttattgtctttgagattttaaaattcgaacatgattatcattggggtttatttttttactttttagaagtcccgtcaaccgttgtaaccatgctacttaatgacccatccatcgtccctccttttaatcatcattgggattctatttggggttttgtttatagtttttagatattccatcaaccgccaccactctaatcctttacatgcatgttgcttctcctatatttgttgtcatttgtcatagttttataatttttagaagtcatatcaaaccctgtcaccatacttctcttcggcctatccactgcctcttctctttattgtcattgggattttaaaaatcgaacataattattatttgggttcatattttactttctataagtcccgccaaccgccatgaccaggctgcttaacggcccatccatcgtccctccttttaatcatcattgggattctatttgaggttttgttaatagtttttagatgtcctatcaatcgccaccattctacttctttataaacttgttgcttctccccctctttattgttgtttgttatcatttgtgttctagatgaagttttttagaagtccatatttttcagtccgatattttatttacaaattatattcctacttaaactcttataattatttttctattttcagtatttatttttttgttatttcaaattttagttaatctcgtcacatgttctagatggtatcttatttcaatagtttttatttttttatgacgaatttaagttatttataaattttattcctaggtgaactattattttttctttttctatttttggaatttattttaattttgatttagaattttggttaatatcgtattatgtcttatatgaattattttttaatgtttttttattttcaattttatagttgttttatcctactcaaactatcttttttatttctctaattccggattttattttatttttattctgaattttaattaatctcgtactggattcttatatatactcttcttttaatattccttatttttaattccgaattccagttatttctagattgtattcctatatggactcttcttttttcaatttcagattttattttatttttattccgaattttaattaatctcgtattggattcttatacgaactctatattgcttatttgtaattccgaatttcagctatttttaaattgtatttctatttggactcttctttttttcttctccgattaatgtgggaatttctaacccccataacgaacgtgatgcttttttttcgagcagttttaataatataatagatagatagatatcttcgaaactcccgcccgccaccgagcgggatacgcaaaaatctccaaaattttccccaacccgcgcgcccccagttttcctctcctccgaatcccaatctctcgcagttcgttcgaggagctgagacgctgcgacggccatggcgacgagtctcttcctcgcgctgcagtgcgtccagtgctccactatgcaggtgcgcgtcctcgcccaaatccctcccccgaaaaccccgcgagtttcttcaatagctcacccggtttcgttcttgcggcttcggtttgatttcccaggtgaagccgcagaagaagagcagcaacaagtgggtgtgcgtggtgtgcaaccagcgccagtccgtgatgcgcgtccacgcccgcgggcaccgcgccgccgacctccgccgcttcgtccaggaagccaacctctcgcgcggccgcgccgcgcatgtgcccgtgcccgaggaagactgggtccctgcggtgccgggggagcagcgggatgagttcccgaaggagaggaagaggcggatggactggtccgactatctggaagatccgggggagtacgatggcggcggccaccacgaggaagctcgagatgaaggtatgcgcgaaacctgtttgatgtgatgtcgcaatgtatgtgtatcacagtatcagtatgatattgggtagcgtgtaaaatgatatgctcattaggaccaatggtaagttgattttgctaggggcctagtgttactacttaaaatcaacttgcttgccgcatggtttagtatcgtgttttcaagcttggacgcagtgagtacgggtaatgatacttgtggttcaaggcttaacaaaggcattgctgaactaaaattataagcacctgtttgtgaatagtcttgtatttcatattccatgcatgaatataaatgttattggggcaagctatacattgcttatgcagcgctagcatgatcacaggtctgttacgcagttacaatggctagtacctgaatgctcggctataaaaaagttgaatatctgcattatgtttcaggatgaggttgtattatgtatagcacttctaagtcttgagttagttctcttcatctttgtttatctgcacttatctgggaaggaatgaccagtctttaatgcatgatctaattgttttcatacctcaatttacaaatagatgtagggattcaagtaacaactgaattacctgaaaagaggcctaaagtcacttccttgaagagggcccccaaagcccaattgggattaggtggaaagaggcccaagacaccagtcacttccactttacccaagaggcaaccgatcgaagaaggttcactcccatgttctgcagctcctactgctgaaggcacattcaaatcctaacacatattgtacttgtcattaacaaaacatgtaagttaaacgggttgtatgttttctgcagcacaaagatcaaaatggagcaattatttggatacaagtttctctgaagggggaagtgggtttgaagactctgagcgacattgcagtgaactggaatgctccattactgatgttgtggtggatgatgaggtacaccctgattttgtgtgatatatatgtgtcttgtcttggtctgtagcattttatgctttgaatagtgcagtagttagaaaagatctgatgtgcagttggcaaaatattatcatataggatgggcactttattatgcactgaatcgcaacttgctatgttaaaattgaggagaaattaagatgcatgctaaccttttgaaacaatgatgttaacagtgcatctgcttaacctactttcagagttctctgaacttagtcctttgagtttaaaatgtatatgtataaggtgacaggcttatgtcacaacaagagtttcagttagttgtatactccacttaacaatacccccacccctgtaatttcaaaaaaatccctggcaaaaagagagaggatgggaaaacacaagtggtgactcttttcttcattttggaactccacaaagttatcctaaaaggtaccccgtataaaatcttctgcagtacttcaactggaagtagggatatgtaattccgagttaactgaagattttgttggatgtatatggggattatgcactactaaataactactgattgcatgcttcatttgttatgcttgtgtctggctgagtgcatcactgcatcttccaaacataaactgatattccgaaacaataatccctacacgaagcctgaatcacaatgaacaaatttgaaacttgctgatgtctgaacaattcaacaacttctgatttctgaaaccattgttagtttaaacaattttgatcattgaccatgatgaagatgtgcactcttctgacatgaacctatcaccgatcactgtttcgctgccatcaacctgctaagttatgttataacctattaacttggtaagttcatacgtctcaacatctttctaaatccagaagagggacttgaacaaatggtcattatggtagggcagtctgaagctcaagcgggaatataaagcatcatatctgtgtcctgctactttgtagagaggggttggataaagaataccttacattgctttcaacccagttccaccatttccttttcatcattaaccctcttttgcatttataatcaagtgaaagttcacatacctcccttatttggcgatacaagccacataatgctttttctgagccctgccgccagacacgcaaagaaccaaacaaaatacttattgcccttctaatctggagcaatagctccttcggttagccagtcaaccactttttggtccagtcaatcatttcgtttctccctgaatctgttgagtggtcacacagtattttaacctcgaattcaatttggcatattatttatttgctatttagagtacattggttttagattattaccgtgtaagttattgcaatatatttaccgtaatccttgcttccaattatgcataatttcaattttttgttttcatgactcaaaaactgtaccaaatccagatcattcaatcttgtactctaagagaaaaagaccattccatcgttaatacgctactaacaagtcatgcatttggtcatacatatgttaaatttcattagacaactaccagatgcaattacattctcctattatatcctcaccacagttcactggcaagcacatagttgtgcctgtggggtggcgtgctctgaagtgcgcctataaagttagcaagagccgacagctctgcttgcggtgataatctccgtttggtagcgaacaattttgtacgacctcccgcagacccactgcttgccgtagccagcacgacggcaacgtctcaactgcatttcctagtaattcatcacttgtactggccatgtcttcctggtgtttgtttacagtctgtcagtggcagtcagatgaacctgccatttggtgttctgtgtgtcgttacggctttacgcgatctgggtggatttggtggtagttggaagtataacggactgaatatcttgacatgtcagcctgtttattcagtaattctagaaccgtgggagtcagtgcagcattgatggaatttctatcccgcaacttgaggcacttggccatgtgtggtactagcataatcagtactacatcttgagcacttgaatatctttatattgtggcctgtgggagtctgggagatctatacaacatagttacacagtagtgccaacatacactgatattatcctattactgtattgcttaactgggctcgtgtcattctgacctgacgcttcgcgtcacagcctgtgaacaaatatgttttgccgtctcatggtcatgggcgataggtcatataatgatataaagctgtgcaatgtgccaaacttgtgtgatggcacgggctggcggcgtaagcggcagccgacaccgtcagccaggttgccccaaatcgtcgcggcccgcccgtgctcggggcagtggctatcgcgacgccgcggccgcgcgggcgatcaggcgccgtgccgcgcgagatgccaaccgcgaagcgcgtcgcgcgcgtcgcatgcggctggggcgaaatcatagccaacaacgacactcccagcaatggtacggcacaatcatggagcatcaactggtgcgtccaaggatctcaccccatgatgaccccgccgcagcagctgggtatcgcgtgttgtgggctcgagtacctcgtatacggtctctagtctcagttaattgttgccacctacgtacggccctataggccattactgccctcaacaacgcgcgacgtcatcatgtttattgctacgcataatcgttgaaatcaaccatgttgccgcgctgttccgcccgtgcgtgccggcggaggtcaggtcgatcgagctcgcgagctagccgaccggggttggtagttggctggtccttttggcccatccggtcggcgtgataattaggtatttggatgtgtattaaatcacgatgcgatgcccttatccgtctcttccctgttgcctccggatctttggactttggaattggaaaagagctaagggagatgtcatgcttttgttgatgctcctaactaccgaagcttcggtgtttcttttcttttggcatcgtcgcaagtgatggtgactcgacttaacactcatcatcctgctgattgatgccttactttaccgttaacacgtcgatgcgttcgacgaggtgcacgcgccaccgaacgcccgcactatcacggcggatggcaatggctgtacttccatactaatcatattgttctccccgtattcttgtgctaaaaaaaaccggctgtagtaagtatccttaccaacctagctcaaaactgtctgtctgtctgtctgtctgttgtagtggagcatttgctccgttcatcttgccctcccattccgtcgtcgtcgatgttaccgtgaatactttttatgtagtagggggcaagattggaacggggaatcttctaaatcacgtcattaccataactatgtaggctcacataggcatgctagacagcacggcactggtcctcattgcctcagggcaagtataatagtaggttataagccggctaaatgctgagttggaagaagaagcgggctgtaaattaacagccggcttgaacacaggaactaagaaactttgtgagagagacaagtgggtcctgtattaattgtgaagagctaactattatatggataggatgagaaaaggctataaagaaccttatagtcagcaggtcggctgtattattagccttgctctcactggctccaaagcgaagccaatttctaatcttcttttaagcgcgcggattaggatgctttaaaccttaaccagtaacacgatgcaggggtcccaccacccgacaccagctttcactgacaggcggtcccagaggcagcgcatgtagtagtactattactactccggaaaaagagtcctggcagccgttggaaacgttcgttaccaaccgtaaaattttgcatgtgtcactgacagcttgtccccgaagtattctggccccaccagccggcgtcaggggctcatcggatgtcggtgttggattccttttcctgtgggcccccgcgctgcactgttcctctgtctgtcagtcacttgcgctgtgtgcttctgctcgggctcaaagtcgtcagctttttctgtgtcttcccctcgccgtctcgcgcctgagccctgaactagacagaccaagcctctgtctaccaatggaggcctgagtcttagaggccggatttggtcgttggagagagagagagagagagagagagagcgagccgagcctgtgcggtgcggcgacgcctgctcctcttcgctcgcgcgcggcattccggtcgtgtttctgaggtgattttcctcgttagatttttggcgtagtgtttggtgccttgttgatggcttcgtgtggaatggtgtagtttggtcgtcagattcgtgtctgctcatacttggccccgttctgctcggcttctggtggttctctaagttttcttcgttgtcctcggcctctggtggtttcttgtgctggttgtttgctcgggcagtcgggcctgtgtgattttctgccgctgcattcgcatcaccttctcccagtctgtgccctgtgctagtgtgctactctctctactgagctctctcgcctttccgcgttcgacattctcttccagctttgtctcacgctcgcaactggttttcccggttatttcgggtgcgttgttgcctttttgttttgttcaggaaggggaaaaagaaatgttgtttgaggtttggatctgcgtactgatgtctgatgagctgctctgtaacaggatccggattgcacggtgttcgggctgtttcgtcaaccatggggaagtctccggcgaagtggatcaagtctgtgctcctcgggaagaaatcagccaagtccaactctaccaaggccaaggatttggcggtaagtacttctttgtgtttgctgctccgaattcgtggtaaaagatgatatctgtttcctcgcaaaaaagaaaaaagatgatatctgtttccctgtaaaaaagaattatctgttggtagcacgaaaagagaagtcagaagtgtatctatttaaatttttcaaagaagtaatcgacttaaagtaagatactaaggcttgaaattgccattacggctcctggactggattgtacaatgaaaaagttgcgtatgggtatgggtgccttttatatgaagcattgcagcattcttttttgttttatccatgttgtaggtctgtagcatactttgattcttcctcctactttcactgattggttggttgaatcacaattttgttgctgatatatagaaggctgcaaataacaagcctgtgctttctgaggatccccctgtgatttctgagccagctcttgttaattctcacaacgatggaaatgctgaaaattgcaagttaccaaacggagttgcagttgaagccatgggtcaaggagtggagaaccaaaacattgttggctccaaggcaccaactagtccagagaaactaagcgaagagctagctgcagtgaaggcacaagcggccttccgaggttacctggtaacaccttttgcttggactgatccattttgttcctgccatcttgcctcttgttaatgcacttttgatctggagctctctgcaaatgttgctgctagcttgtcccaaacctttctatagttttatggggtcatcgtttttaaaagtttcagaaaaggaaacataaacagccagccctgcagaaagaaaatttgtgtcctaaaaaactgatgagttggctgtctgatctatacctaaacattagtaactgctgacacattagcacctcttcgttttcttttggaagttatagaagaactgatcagataatatgtcccaggctttttgaagttatataatttgccattgttttggacctttggtgcaggcacgtagggcattccgtgcattaaaaggtatcataagactccaggcactgatccgaggacatcttgtaaggagacaagctgcatcaacccttcgtgtgacatggttgatcgtgaaacttcaagctttagttcgtggaagaaatgttagactctccggtgcttccattcaatttgttgtgaagtccggccaacataagtttctggtaagtatcttgacatgtggcagttcaaatatttgatttcttgtatccttccctgcttttctacctgttctatttgtattatgttaaacctctgtttcaaagaatgaatgtatgcaatattgaaagcaatgtaattagtctggcaaactgaaactttttttttgtcgggacggccaaaggtaggccggccaatttcattaagattgggggaaacaaagttttaattacaacgaggcaaactgaaacttttcacacacacttcagacatctcttcagtgctgcataaaatcagtaatgacacatgttcagaactacagatcttttggctaaaccccaagatggacatatcagccaagtaacattcagtacgccccagaaaatagagaattagctagatactagtatttactggtggttgatgattattattatgtacctggatttttataaatagcatggcaataatgttaattctgtgcatatctctatcatattggtacttggtacaatgtttcgtcattgttgtgggagcaagttctggtgtattattgtattgtactaggttgccctttattctttaacttaattttctacttgatttgtggtttgttctcacagatcattaactaccttcatgtggtcatattgcaactgaaaacaatactccctccgttgcatattataaggtgttttagttttaccctaaatcaaagttctctaaatttgaccaagtttatagaaaaataattaatgtctacaataccaaataaatagactatcaagaaatatttcatggcggattttgttgaaaccaatttgatgttgtagatgttggtgcatttttctattaacttggtcaaaatagaaaagtttgacttggacaaaactcaaagccttacaatatggaacggagtgaatacacactttcttttggtattcttttattcaaacattaaatacctccctaactatcctatcgaataacccacaccgttcccttcaacacaatatagaaatgcaaactgtcttttcaaaactataaatgtcgaagcttttcatcagataggtgtctttcatactcaaaagtttacaattaaatatttaccttgttatcctgattgagtatggaggtaaatctgctgaactacagtataacttaaattgcatacatcatggagcatgcatttatattttcttttcatgattcctactaaatgtatgacccatatgcaatattttctgcttgatgtctttatgtggccaaaaatctaaaacatgttctgtttgcaattattagagtgataaaccatcggacgcttggaaagagaaggtatcttcaaacgcatatgttcgaaaggtatgccatttgttttaaaaaaacaagacttaccagtgagatttgctgtatgtctaaaaaaggtgtcatgatcctgctcatttcatctatgagaaatgcatgagcccaaatcaaatcgctcaccatttatacatttcagaggtgtgctcactcacttttgtacattttgtagcttctatcttcatcaattgggttagaagctcttcacttgcagtatgacaagagggaccccaattcattgtacaactggttggagagatggactataagccagatttggaagtcctcttcccaaccaaaaaaagttgctgatggcaaaccacaagtaaggaaggccagttatgcaatggaaactgagtcagccaaattaaagcgcaatgttcggaagagttctgctgtcactgttgatagcttccaaactaatatgacagttgaacctgaaaaaattaaacgaaattcaagaaaattctctagttccgctgctgattcagtaccagatagccagttatctgaacttgagaaggttaagaggaaccttcggaaggtaactaattccatggctgaagcatcaaagatatctagctccagggcagatgcctcaaaggtatctagctccatggctgatgcctcaaaggtgtctagctccacggctgatgcctcaaaggtatctgattccgtggctcaaatcccacctagtctcgtgaatgggatctctgatcatcaagacaaccaatgtgaggaagcacaacagaatgcatgcgtgtcatttcctcctgaaactcaggagttgcacagtggcattctgttggaggacaattcacatatgaatctgttggaacctgatttaatatctaacccggaaactcctttcacttcgattttaacctgggaaaaatttaatgattctactgctgatgctcaagaagttgaagttctgccactgcagaacattgataatgaagataatttcccagaaaatggtgtcttaggaaagaaagagaagccaaggtccaaggaagaacctctgtctaatggaaaccttaaaactagcaagaggaggtcttcgttctccaccaaatcagattacccggaaaatggagcccagaatacgccagttccacgaaggaagccaagctatatggctgcaacagaatctgcaaaggcaaagttgcgaggacagaattcaccaagactggattctgattcaccagcagacatgaatggcttcacacgccgccagtctctaccttcttctacaaacagtaagttgaacccacactcacctcatacacaaggaccaatctatttcaaatttgactaagtccatagacaaattagtttcatcaaatcaataattgaatatatttctaaaactaaattagttttatcaaatcaataattgaatatattttcataataaatttgttttgggttgaaaatgttactacttttttctacaaacttggtcaaacttaaagcagtttgactttgaccaaagttaaaacgtcttataacctgaaacggaggaagtaacagttatgaactaaaaagtgataaatccatgttaccagaaaaaaaatgtcgctgttaaacattaagcaaaggtaaccatctgaaaagataagatgatgttctaggctatcagaatgtgacaaattttgagtaatgatagcaaaaatgttcacagggagttcatggtattattctattgatcccagaagaaacacaactgtttattccatgtttaaaatactcccttttttctagtacaacaggggctttttgggtaatattaaatctgagaataaataaaaatggttgcacacattgtatttacattcatattctgaagtattgcatggattataaatctgtcgccttgactatgcatctttctgaagttctgcaactaccatattctacatagtcgcaccgggtggcctattgccacatttgttagcattgtatgtacttgtgttatttaggcttttactgacgttagaatggatctgtttgcatctgatcagtttaaaattcagacttcacagctcatgagccaacattcagtttttccttttcgtttctgaattctgatgtcccattttgcttgtttattttttatttttaccatctatcagacagagcgatcagagctgaatggagacggtggtgaggacaaccaacttccatttgaacggtgcaacgttgtggtggatgaagtgccctgctgtccgtgagattgtcgccattgttttgttcaagatgtaaaaatatgttggccctgtgttgatctattatctgttgcatatttgagttgttaatttattatccattgtttcttgtgcaatgtcttgttcatagctacatcttactagtttcgggcatatgctctcgtttccacccaaggcaccctgcctgataaatggtcagggggctgatgccctaagcgtgttttaatagaacggcttcatcctactttcatgctttcccaagttccctttgtgctaacacgtactctatccgttcctataaaatataagatgtacttattttatggaaaatcaatattttaaaattctaagtaaagagtaaactatgtgttgacagaaaacacgaggcctgggagatttgcttaactccagtgcaggtccaaagctcgcctttgactccaccttgatctaatctctttttccgatgctgatattaccaaatttggtcgttaacacatgtcccccaagtccgggatatttgataatgttccggatttgctgtgtaccgactccgagcaagtttcgcactctgccgtttttttgaccgttattctatcgctttaaataccaaccgttgccctcaaaaaatctcacgccgtgacttccgttttcaccgctcaagtgaaactttgtcctttctctatccggcgattcctccgacgtaaaagcaatccccaggcgatttcgcttttgatcagatctccgtctgcggcgatgtcgtcttccactagcccatctactgcgccatcggccaagtacgctgaggtaagttctcaccggctagatcccttttcctcgcatgaaatcgatttctccttttctcattatgttttatgctccccgattcctttggatttgcagcaccttttcaacctagttgcgattcccagcctatcgcacaaaaaccactattttcttggcccaatcggcaatcttgaccccactgatttcatcattggtgaaaccaatagaatcccctttagactagccaaccctaacttgggtcactggaagaataccttcaagtcttggccatctctcgaaaagcctacccctgataagagctggaccacctggtaccaacgcatatcggctagtaagaaagcccactgggatgagattgggatcggccaagcgcttgctctcaccatagccaattcttctaaggatgaacctctgatggctgccgccacctatttctggtccaacaccatcaatgccttcttatttaaccaagggccgatgactccaactttgatcgacatcatcatgattactggattagatgtaacttcatcggctaaccctatgagtatgaataccaagaaccaatttgacttcaagaccaaaagcataggagggtggtctggttatgtagcggcatacatgggcaaagggcctgtcactcctcgggagcacgtagctttcttgctaatgtggctagaaaagtttctcttctgtggatccagctgtggtcccacaaccaattggcaatttgtagccgaagccttaggatcaaagaaacaatttcccttgggcaaaatccttctcagctatctataccaaatgttgaacaatgcatcggctaagatagccgtcggctcaatagttggagcaggtggaccatggtggctactgcagacctggctaaacctggtagtcatgaaagttgtcaatcggccatctgtaacagacgctgaattcccacggttggaaccaattgtagaagacgatggagaagaacgcacccatcgcggatgcatgtcatatggagaatatgcatccacaccagccgatgctggggcaaaactatcggctgagctgctcaaagattggttctgtagcttttatgaaggcttccagaaagatgcccgggtttggtttctttatgaagactcagcaaaccttgagctcccattagacttcagatttgaagacatcaatcatgaaagatatcaaacgcccagggaagtctttatagctgcaatcagcccatgcatcctacctgtcggtattcaccaaggaagaaatatccaagtctcctacgaattctatcaccctataagttcagttagacaacttggatttggccaactcccaatcggcttagtctttgctgacaagatccaatgccgaggagaaatttcttcaactctaatgatggatcgactgcttaacctccaaggaccccccttaggcagtatcgacaatattgagttagcaggattcaggagcaggaactttgacagatggtggggtgaatggaagttgcatctatttcatcaatcggccacaatgtacatgacagatctattccctgacatcataccccaggtaaactttgtcatcactaaatttcataacggttagctaattcattacttgactaatcttttgttcctgttttgcagacaacaaagtcctcccctccacatcagagcaatagtggtagaaacattgaatatgccccaggtctgattcctaatggaggcgaattgtctcccccaaggtctcaaccctcctccaaggcgccattagggaaccaaccgatgtaaccaagaaaagaaaaactagatcatcggctatgaacaccttgactctagttccaaagaaaaaaggccaaatctaagaaaaccaagccaaccgacgacctgcctgctttggatccatccattgaacatgctctggatgaagaagatattgaggatgatgttgatcaggctacagccgaagcaagtgatactgaaaaaacaccatcggcttcgcctaagcagataccttcaactccttctgcccccactcacttcttcagagtaaaacatctttccttgcaaacccttttataatcattatttttcagctgactactcataggttttgtagttgcagaagaagaaaactgctataaagaagaaatcggcagcaccaattctcaaaccagctccaccagtaagacactctcaattttactagttgatttcagccgattttgtctaacacttgtctttttacagcctcctcctcctccttcttctcctgtacaacaatcattgagtgactgaactccatcggccgtggggagtcatcatattgtggaagaagaacaaccggctgctcctgctatcccagtaagctttcctttaatgcaagaatttagatcgactatattgacttagctctcaaactttctgaacttatacctgcaagttctagccgatctcttttcttttgatatcaaagattatcttgatgaggcagaaaaagatacttcaagcaaagctctagctcccttatctgatgatgcaaagaaaacactggaagatatctcgcgtcggctagaggcctcttctctggatagcttagtggtcgactatggatcgattaggacacgattgcacgaagttcaagctctaattcctgaagaactggccgatgtcctaactctagccacttatcttgagcaacatcaatttaaactagaaaaagccaagctaagattagccgaacgccgtgagcgcaaggagattgaagccacaatccaagtcaatcggcagcttgtgcatgaagaaaaagtcaaactcgatcaactatccgaaggtccgatcaaatccaatatcgatcggcttgaagcccgcaagatcaaatccaatattctcttggcacagcttgaagaatgcaatgctgaattggatatggagcacaaaaaactagccgatctcccaaaatttgtcgaatagcaaaaagcaaggctcaaatcggctatcaagaatgttgctgacctaaccaagttcctgaagatcatttctgggactgatgctcaagatgcccaagccattgaagaagtcgaacaaattaggcaaagaactatttcggctatccagcagtacttgtctcaataacttttgtgtaatcggctaagataccttaataacaatcctttgtgccgattaacataacttctaattttcactttcatttttgtatttatgtgcccaagccattgaagaagtcgaacaaattaggcaaagagctatttcggctatccagcagtacttgtctcaataacttttgtgtaataggacttagaaattcttgtaatcggctaagataccttaatgacaatcctttgtgccgattaacataacttctaattttcactttcatttttttttgtatatatgtgcctcccaattttataatgtcaacagcattgataaaattagaaaaacaactaagggcgatataacaatattggccgttatatatcggcaaaccataactgcttacaattggaaaaacgactaagggcgatataacaatatcgaccatctcaagactatgtaaaacacatcggctgtcatgcattagcaacactagccgattatgcgtcaacccaaacacttcggtaatacttcttcaagtatttgccattgagcgctcatccataaacctcaccatcaagcccttgcaacatatatgcccctttagacacaactttatagatttgaaacgttccttcccaatttggtgaccacttgccgaacttgttatcccgagttccaatcgacaaaatcaacttccatacaagttcaccttccgaaaaatccttaggcactattttcttgttatgatgcctagctactcgttccttatctttggtaaccttagcaagggctcgtaaacgccattgaaccaagtcctccctctcatcggccataaggttataatactcatcggctgtcaaaccgtcttgcaattctatccttctagagccgattctaacttcccatggcaaaacaacttcatgtccataaacaagcttataaggaggaacttgaattgatccatgacaagccatccgataagaccacaatgctttggccaaccgagtatgccattgccgaggataattagaaatcttccgcttaattaatttgatcaagctcttgttagatgcctcggcctgcccattagcttgtgcataatatggtgaagaattcaacaatttgatacccacgctatcggcaaaccgaacaaactcatcggacacgaagattgaaccttgatcagttgtaatagtttgaggaataccaaatcggtagattatatgttcttgaacaaattgaattgcatccacagaatcaactttcttcaaaggaatggcctccacccacttggtgaaataatcagtcgccaccatactgatggtggctttatcatactgatcatatcaattccccaacctctaaatggccatggtttaataataggattcatagccgacgccggcactcgttgaattgccccaaacttctgacaatcttgacaccccttataatatctgaagcaatcctccagcattgtcggccaaaaataccctgcacgccgaagtaaccacttcattttatgggccgattggtgagtgccacaaattccttcatgaacttcgccgattgaaactttagcctgatcggcactcaaacacttaagtaacactccatcaatcgtccgataataaagctcattatccaatagagtgtacttcaacgccttatattttaatttcctagaagccgattgatggattatgtaaatattgatgcacatcatacctccaatcatcggctgttattgctgcaatttcaaccttaacatctttgatcatcggcttataccccgatgccccttgggctaaataattagtttcaatattttgttctcgagatacatgccttaaagtaaccagccgaaattccttcatcagttcttgacacttctcattataaactattaacgtatcattcttgcattcatactcccctgccaattgactgattaccagcaaagaatctcccatgatttcaatagcatcggcttcaacttccttaagcaattgcaaccctttaagcactgcttcatactcagcttgattattagtcgcataaggtttaatagtataagcaaactcgaaacatgcccccctaggggaaattataactaggccgataccacaaccatgagtacacaccgatccatcaaagaataaagtccatggcaccatttcaaccgagccgattgaatcatcacgatgttccacaataaaatcggctatagcttgtcccttaatcgtcttcggagactcataccaaagatcaaactcagttaaggaaaatatccactttccaacccttcctttcaatattggagccgataacatgtacctaacaacgtcggccttgcatataatagcacattcattggacagtaaataatgccttaaccttgtgcatgaaaaatataaacataagcataacttctccacaggagaatatctagtctctgcatccaagagccgacgactgagataaaatacaactcgttcttttccatccaactcctgaatcaggactgagccgattgacttctcaccggccgacagatacaatctaaaaggtatccctttctgtggaggaatcaaaacaggaggggaacttaggtatcctttaatatcatccaaagccttttgctgctctgccccccaagtaaactgctgatcggccttcaatctcaacaatggtgtaaaaggttctaattttccggacaaattagaaataaaccttcgaacaaaattagtcttgccgatcatctcctgcaatttggtcttgttttccggaggcttaatctttttgatcgcattgatacttctctgagttatctcaattcccctctcatggacaagaaattccaagaactggccagccgatacaccaaaagcacactttgtcggattcatcttcaagccatatttcctggtcccctcgaaaacttttcttaaatcggctatgtggtcttttacttccttagatttaacaaccacatcatcaatatagacctcaaccagccagccgattagatcatgataaatataattcatggcccgttgatatgtagctccagcactcttcaagccgaaagtcataacaacccattcaaataagacgattgcaccaggacatctaaaagctgtcttatggatatcttcttcagccataaaaatttgattatacattgtgtttccatccataaaactcaaaattctgttccctgacgtagcatcaaccagctgaacggctactggcattggatattcatctttcggtttagctttattcagatctctaaaatcaatgcataccctcaccttgccgttcttcttgatgacaggaactatgctagaaacccactcagcatatcggcaaggacgaataaaaccagcatcatataaatgtttaatctcagctttgacaggttcaagcatatcggctttgcatctccttggaggctgctggtgcggcctaacccctaacttgataggtagccgatgttctacaattgatcggctgagtccaggcatctcgtaatactcccaagcgaagcaatctctaaactcttttaagagctctatcagcttggttctaaattctggagacaaattcttactaataaatgttggccttggccgatcgcttggacctatatatatttcttccaaatcatcggccgacataaaaccttgaccttgcttgtcatcgagatcatctaccgtatccttagtgtagatacttaaaccctccacgacgccctcaaaataatagcttgggttctccatcttcaactgcctgtatatcagaatcggacacttttagaaaatctccattccaaacttttccagataaacaatcaaggccatccatctcccaaagagctaaatcggcactggcaacattaactgacctgtcggctggtacgatctctattttgtcgccttgccactgagtcaagcattgatgcatagttgaaggaatacaacaattggcgtgaatccaatcccttccaagcaacaagctgtaagaacccttcctatcgatgacaaaaaacgtggtaggaatagtcttactgccgactgtcagctccacatttagaacacctttggtttccgatggattgccaccaaagtccttgagcaccatatttttcttgatgagatcctcggcatttctacccagcttcctgaacgtagcataaggcatcaaattcaccgcggtcccaccatcaaccatcattttagacatcggcttcccattgacataaccatttatatacaatggtttaagatgccgattctctgtcccctcaggcttctcgaacaccgcctgctctggtgatagaaccaacttagccgattcctcttccacctcgtcgacatcggcttgatcgatcccgaattcggctggcaaggtaaaaaccatgttaactggtgccgtcacaacactctttccttttgccaacctctttgcctcatcagttgcaacatcgtcggctacaggagcctgattcttaacacgccactcctgcctcggttttgctttcttcagccgatgattaatttcttgctcgacctcctggaagcgttccctactcctcaatctttgaacccttcttttctgattcttcgtaaaaataccaggaggacaccattgagtcttcttattttcgtcatcttccaaatcaccatgttggtttactgggcccaatctctgatggacatgcactcttgtctgttttggccaattgcctccatcgtataatcggcttgaaccccctgcaacatcactgcatccaggacaatcctcgatagatggtaacctcataccttcattccaacagaacctaaagaactcacagccccaatgaggatcaaagccaccattatcttcttcatgatgcctttcctgttgcttgtcgtatttcctttgatatttgtttataattctagccgaacttacttgataacccctcatgcgccccgtatcggttgttcggccagctgtgtgtaccatgttaacgggaaatgggttaccatcgaccctcatcggctttttggaatcatcaaacttaatcttgcctccctcaatggccacctgaatctgttgtctaaacaccttgcaatcgttagtagaatgggacccagaattatgccatttgcaatatctctttttgcctaattcctcagccgatggaatcgtatgaccagcagggagttgaatttgcttctctcggagtagcagatcaaaaatcttgtcaactttaataatatcaaaatcatacttctcttcctttccagaactctttacccattggcacggtatgacctttttactcctcacccattcggctgtagctatctcagagtcatcctcatcatcatctgacccatacatgtaagggcaaacatgattaaccttttagagcttttcctagcctccgcagacctatgctcgtgcaaggttaccttttatatcagatgtgacaagctatcaaagtcttcagatgagaatttctccgtaatcggagcaatcataccctgaaaggctagatcggctaactgagcgtcagttaaactcaagctgaagcacttgttcctcatctccctgaatctctgaatatactcgtgcacgggttcatcatgccgctgcttaatcgctgtcaagtcagataacttcatctcatgaaccccactgtagaaatagctgtggaattgcttctccaaatcggcccaactattgatcgacccatacagcaaagaagaaaaccaagtaaaagccgatccagacaaagataaccggaacaacctaaccctcagagcgtccacagccgatgcttcaccacactgagctaaaaatcggctaatgtgctcataagttgacataccatcttgtcccgaaaatttggagaagtctggaactttgaaccgattggggagaggaactctcttaaaccactcagggtaaggctgccgatataagcttccagtctcttttggtttaagcccaaactgttccctcattacatcagcaatcacatcggcccacggtcgttgctgagctgctccctatgactgttgttgcatgggctcgaactgactgtactgagacgcaaactgaggttgagccagtccccctagctgatattgggcttgcggggaaggatgctgatattgataattcaagttgcccctctggtaattatgaaggttcagctgcatattacgtgccaaatgctcgggaacaacttgaggcattattgtgccatccggctgtacatggtgaaccaagtgttctgggacgacttgatttaaaaattgttgtacaggctgtccaccaggcgtcacaaacccagccgatgcgcaggcttggtgctgaatcggctgaacgatttgctgtcttaacggcgtttgctgaatcggccgcggaggctgttgccttggtggcgtttgctggactggttgcacaacttgttgctggactggttgtacaacctgctgaatcgggagtgtctgttgaatcggctgctgctgtattggatcaacagcaggttgaggcggcagaaacatggcagcaacctgatcttgcgtcggccgattcacaacctgcccactatgctgtggctgctctctcattaacaactgagggttcaccagctggcctggtgccaatgctgacggagcaggtaagggagtcgatgccggcgccgtcggctgagctaatggtgcgacgggggaaactacctgaatagatggctgggcatcagtgatcaaaggccgataatttggaaagacacctccttgcaaataaactgggcctgcagcctgatgctcagctattgatccatcggctattgacttcatcatgtttgataaggtattgactaacaccccagactgattgatcaaagcatggtgcacagcatagtcgacctggtcttggaaattattgaaaaaatcttgtgccgcatcactattctgattaagatttcccccttgcaacccctgagcaccatcaccttgaactccatgcactccatcgccttgaactccatggaccccttgagagttgtcaccttgacttcctagagaaccgccggtagcacctttgtcactcagttgagccgagccatctggagcttgtttcccgtcttcacctttggaagaactggtcctaggatcattggcaactacctttactttatacttctgaactaatgttcccttgcgggtctgcatgaatgagtttaagaactgatcccgggctttctgcaacattgcttcaaaatccttcttctgctcaggtgtgaatttctctggatcgatgggcacgacgtttccttcattgacgtcagtcaaccccaacttctggatcttttctttaacaaggcttgggctagtcgaggatggcgacagcggtggcttctcggccatgaggaagaattgcttgctgacttctaatcggtcccaccaggagtgccaaaagcgtgttgaaagaaaacacggggcctgtgagatctgcttaactccagtgcaggtccaaagctcgccttcgactccaccttgatctaatctcctttttcgatgctaatattaccaaatttggtcgttaacactatgacaatacatgtcatgcatatatcatcgttactttcgtatttgaaaatatttttatatgatgttaagtcatagctgataatatgttagaaatgaaagttgttgataatatgtcatgaataaaaccaatgggtcaaggtatactcttagacaccgtgtagaaaaaactaatacttctatgttttacgcaatttagaacggaggaagtaaccagaaatccatggcgcagcgaagtggccgaccttcatgaatcgtcaaatttgaatgatgctaacctgttctaaaggagaattttgctgtgagcctgtgatacgagaattttgctccagttctaaaggagattgaactattttcttggaaattccacataaattaagtgaaatcaggcgaaaaatgtgcgtgatgtgttctttcttgtgggtttccaacaaggtaataaatagcgtatagcgggttgttagcggattagtgtctgtatagcggattgcgaatagcggacgctattacggacgctaagttccaatagcaaatataagaaaataaccataaatatatctatattaacatcaatttcacgtaaaaattagaatttataatacattttttattactcatatatttcataacataaaaaatataaaataacatatagatatataagataaataagataaataatgaaaagttctacaatccatatatgaaaaacaacatttaagcgttatagcggtccaacaaagtcaatagcggactgttatagctatcgtgaagcgctataatagactaatatagcgggcgctaagttacaacatgctatcttcagtccgctaccttgtagcagcagcggtagaggtccgctaccgctattgtggccgctactgcggccgctacgaacgttatttattagcttggtttctaacccatttccctcgttttccgcgtgcatatttttcaaacggttaaacggtatgcgttttgctaaaattttatataggaaagttgcttttaaaaaaatcatattaatccagttttatgcgttttgtgaaaagtttatatatgaaagttgctttaaaaatcatattaatcaagttttcaagtctttttatagctaatacttagagcaggtacaatagcaggctataatccagctataaatatattttaaaaagataaaggaagagagagaaaagcagcgggctacagatctatagccagttgtagcacgggctccaagacgtaatatgtgatattaatagtataacaaaaaactatgatatgaattggttattacattggttatagatgatttggagttaatagtaagctatactattaaacttgctcttaattaatcatgtgttaatctatggctcttttttttttccgccggaacggttccaagtcccaacccctcagaaggctggtactgggctactagtcatcttctgcctcttcctcatgcaaacacaacaaactgccgtaatcagactatcagaggaaagcgttccgcggcgccgccgtggcgtccggcgtccggcctgtcacctgtgagtcgaggccgcactttggcgcccgcggcagagcccgcgacatgccttgccgcaccgcgccgaggcgtccaaacacacgctccgcccagcccagagagcccactcccgccgccgcgcgtcccatccaaacctccctccgcctccgcgtcccgccggccgccgccaatggaggcgccgccaagcctcccctaccgccacctgccgcagcatctcgccggcctcctcaagacccggccgctccacgacctactctccgacgcgtccacctcccgcgccgcacgccacctgttcgacgctgtgccgcgcccgacccccgccctctgcggcacgctcatctccgctctctcaaggctctgctcgcaccaggagcttctcgacgccttctcatcgcttcaccgcaggggctccgacgtcccgcccggctgtgtgcccctcgttgtgaagtcgtgcgcgatcttggccgcgtcacgtcagggaaagcaggtgcactgtcacgccattgtccgtggtctccttggggatatctttgtgcagactgctctggtggatttctatgcaaagaacggggacatggattgtgctgtgaaggtgtttgacgagatgccggtgaaggacccgataccgatgaactgcttgatcactgggtattccaagtccggtgatgtggtgaaggcgaggaggctatttgatggcatggtaagaaggacatctgcatcctggaattcaatgatcgcctgttatgcgcatggtggggaataccaggaagctttgaggttgttccgtaggatgttgagtgagggtgcaaggccaaatgcgatcactattgcgacgatgttttccatttgtgccaagactggtgatcttgaaacaggaaagtgggcaaggtctttgatcgcagagcaggatttgcagaacatgatagtgcacactgccttgatggaaatgtatgtcaagtgtcgggctattgacgaggcacgccgtgagtttgatcggatgcagcagagagatgtcgtggcatggagcactatgatcgctggttatgcacagaatgggaggccacatgaatctctagagctgtttgagaggatgaaggcaaccagttgcaagccaaatgaggtgactcttgttggtgtactatctgcctgtgctcagctgggctctgatgaattaggaggacagattggtagccatgtcgagagccagaacctaccactcaccagctacctcggatccgcactaattgacatgtacacaaagtgtgggcacgttggcagagctcgcagtgtcttcaaccggatggaacacaaggttgtcataacctggaactccatgatgagaggcctagcactgaatggctttgcgcaagatgcaatcaccttgtacaaagagatgacagaggaggacgtccagccaaacgagattactttcgttgcgctgttaacggcgtgcacccatgctggattggtagaccaaggtatgtcctttttcaaagagatgaagacaattcaccatgtttcccctcaagtggagcactgcgcgtgcatagtggacctcctctgcaaatctggaaggctgcgggaagcgtacaagttcatctgcgacatggaggtcgaaccaaacgcggtgatctggagcacgctgctgagcgcctgcagggctcacgccgacgtcgagctggccaagctcgccgcgagcaagctcctggttcttgagccggacaactcctccatctatgtcctgctgtccaacatctacgcggatgccggcctctggggcgacgtgagggagatcagggacctgatgaggagcaagaacgtgcagaagctgtctgcttatagttggatagagctggacggtgaagtgcacaagttcctggtgcaggatacgtaccacccgaaatcagctgagattttcaacgtcgtcgacggcatggggttgcatctggacgacgttgattctgaccccgatttatttgttctagagcactattgaacatttgaacatgctaacaaacaattgcagcagggcatccttcgttcactgcagattgattgtactttgcataatttatatacatgcatgatccatcgattcgattattattagttagtactagaaagtatgtagaaagtataattggtaagtgttgaattgttgggccttcttgcctagcccaataagaacaatgactaccagtaggccttattgatgatgagcccagttctgagttatcccgagtcctgcctgataaagcaagcagtccaaagcaggagacggcagaacaccaggttgtcagatcccttcgcctctgaaccctgagtcgccgatcgaaacaatccgatggagtccgaagctgacaaggccgccgcgccggcgccggcagcggcggcgtcggtagcggagacgagcgacgacgcgattcaagaggagtcaccggcaccggctcccagcgggaagcctggatcggaggcggcggccaagccggaggtcgaggtgcagctgttccggcgtgggcgggggccggtggccgtgttccggtcgccgctgggcgggtacacgcaggaccagctggaggtgggggacatcctggagcagcacggcctcaagtccgtcttcgtcttccaccccgcctcccgcacccgcggcgtcgccatccgcttccacccccgcaacggccgctccctcctcacctacgtcgctggttccaccatcttcctcgacggcgagcccaaggtaagccttacggatcggttggctctctctggctcgctcaattttaggtagtcgaagtgatgtgatcatgtgagtacttgatggattggtctgtttggttggttggttaggattctttgctgaagcccgtcacgaaggtgatgattggtgtggcagctatgacagcagttgctgcagtattgctgaaggagggcaagatgcccgagtggcttaaggaatccaagctcggcaatctgaacttcccaccatgggtactggcttgcatggtcattgtgttcatgaggctccggaagagaaccaaggatgccatgaaaaagtttggctggtcttcatgaggtaccaaaagttttaccccttttccccagatttgtgatcgaacagtttccaatttggttttaatctcttgtgagtatagcatgatgcacaaacggttactaccaaaactcagtgctgttctatatgtgcagtagtataatgaatgaaacttgtaggtagttgtgacatggttattctagaatgttaagtgtgctttaaggtttcttgtactataacagcatagtttattaatcgtcgtatcatggcagtgttattttttctattctacaaagcatatatagacaaaaatacccactactcctgagttttgattattaaacagaataactatccgctcctagttacccctctccagtctccaaagcgtgtcgttttggacatatatctcatcaaacttttgaaactttgaatatcaatacatttttaatatttagatttgatacatggaaataatgtgcatatttgtctcttaagtactctatgatactataatatctatcaacatttgtaaatatattcaaaatttgcaatagaaattagtggtgaaagatgcattttgataccatgtcaatgttccaaacatgttttcgcaaccagacggagcattacaacacaaaacctccgtagagtactaattagtctattcaaaacattattcatgtatcatgagttcttggcgaaagggcatgtagtctagtagttacagtgacctgagtaacaccccaaggtcctgagttcaaattttaataggagcgaatttcagattgggttgtttgaggagctaagttcccaatttaaatggttgcatatatctggttggatgtagaggccgggtaaaaaatacccatctctaaaaaaagagtatcatgagttcttgtcattcataatttctgctgaaatatacttataggctgttcctagaggaaccaaagtaagtatgtcacgcatgtgcttccgcctcattcattgtattattaggatatgggaaactaactgcatctctgagttcttttactgaattttatctaagctgtatttcaatattccacaggttcgtaatgacaaatgtgtgtttttggctgctgcttcaaatttgttgccaatactggagatgtaccaagcgggtgacacgctaagtgaagaactattacacaaaaaacactagttttaccctttatttgcatactcgatgccggaaactcgatagatttttacttgtacttatgttcatgaataaaaaatagcaaaacaatccttatcatatctcttcctgctcgctaattggtttatccatttttctggaaggcttcccaggtactccctccgtcccataaaaaaccaacctagatgtgacacatcctagtactacaaatctggacattctagattcattatactagaatatgtcaaatccagtactagattcgttttttttttggacggagggagtattccttatatgctggtagattcatagttcatatcctgtagcaaacatggagtttcagtttacaaaacaatgatccttgatatatgctattgatgatttttgcatctgtgcattggcacacttcgatgtgcccatcttgcttcgcccttaataaagagctattggataccacaaactgtattttcttgtgcctaagctagatctcggcttaccattatctataggatttaaacactggatttactataaaatgtcatcctgaaaattgtgattgtttcaattatcatacagagaaatcatcaagtaatccccgcatgagaatgctttaggttttgtcacatagtcgaggggcacacttacattgtcatttgctactggcagaatgtcacaaagttctgtgcccatttgccagccatgtgagaatggcaaagttgcccatatctccttccgatctatctatccgctaatctctaccttcgaccatcaccgtgccttggctccagagtgatgctattctcgcgcatttatatgttagaatggatgcgctagaatagcatcaaaattgatcaccagtaatccttacaggagcatgctccatccttgaaatggtgaaacctattcctatctctcataacaatctccctgttgaagaccttggatatcatcttggtataatcatggcagtcctcacatactctcaggttcttcactatcctaatctccatgtcttccggcaacgcgactaggccaaatgcaatggccagcttctcactatgcaaggagattgcatcttctttgtcctcttcctcgatatcaaacaacacctcttttgtgttcgcaatgtacccttgcagcctcagcctctgattcatctctgcaagcatcatctcgatctccttgtgtcttgggtgtgtcttgcctccaacaaagaactcatgcaccttgccaccaacctcaatggcactacacccaggcacctttttcactcccttggccttcatcatgttccgaacattgctgacacccttccagttctgcgagtctgcatagatgttagagagcaggacatgggcggcatcattcttggactcgatcgccatgagcttatccattgcatatttccccagttcaacgtttttgtggatccgtgacgcattgagtagtgctccccacacgccttcgtgtggctccaatggcatgccattgatgaagttcacggcatcatccagacgcccagctcgaccatacaaatcaaccatgcaaccgtagtgttcaagccaaggatcaattccatgattgctcttcatcgaatcgaagcatgctcgtccctcatctaccaacccagccatggagcatccacggaggaccacgacaaaggtgacaccgttaggctcaacccctgtgctctccatgcgcttgaacagcgcaaggcagtctctccccatgccattcatcgcaaggccactcactgcactggtccaagtgtaaacgttcctttcgcccatgctgtcaaacacctccatggctgccgccaccgcgccacacttggaatacatatcaatcaacgcggtgccgagcgtgaccgacagccgcatcccacggctatgtgcacacgagtgcacccacttgcctcgttccagcgcgcccaattgcgcacaggcagtgagcgctgacaccagcgtcacctcccccacggcagcgccagcatgacgcatttcgtcgaacagcctcaaggcctcccttgaccggcccgtgtgcacatacccggcgatcatggcgttccacgcgacatggtccctctgaggcattccgtcaaacagctcgcgcgcagcgtccgcttcgccgccagtggcgagagcccccaccatcgcggtgacgcacaccacgtccgggctcgcgatctccgcgaacgcggcccgcgcggcacccacatccccggccgcggcgtacatggagacggccccgctctgcacgtgcgggtcgcccgcgtgtccgtggcggagcgccgacgcgtgcacgctccccgcgatcagggccgcgtccagcgcggacgccgcggcggcggccagggcggtcgcggcgcggacgaggaaggtgaaggagtagttgtcgggcgcgagcggcaggtcgcggaacgcgccgaaggcgaggtgcgggcgccggccgcgagcgagggcgcggaggagggagttgtgcgcgaggagcgtggcggggcgccgcggcaggaggaggcgcgcgtaggagaggtcgccatcgtcgtcgtcgtcggaggaggaggaggcgagggaggcgaggaaagcggccaggtgggacggggacgcgatgcggcccgagacgaggaggtgcgcgtggatctcgcggaggtgccgctgcgaggaggccgccgctgccagcttcgccgggtcgcggagcggtcgcatttggtttgacacgctacggcctacggcttgtgagctactctgacgaaaggacttcccgtttcgagcattcgccgcgcgcgggctgacgaggccgaacgcgactacgaaccctggcccgcgtgggagtggcccgttccatggaaattgctatacgtacgagatacaactcaattattggaactgagtttgatcgacggcagccatgcgttgaacatctgctcctttcattgatcagtggttgcatttgcatatgattgcgcccgtccataccactacactcgcagggctaaccgacgaaggaagagtgaaaaccagtggattatcggggaaggctcggcagagcctgcaagcaagacagtaacattttcacgttgccacggcgaatagcggcacctcgctttaggcctggtttagttctcgaaactttggatacatgtatggagcattagatatagattaaaaataaactaattgtgcagttaggggggaaatcgcgagacgagtcttttgatcctaattagtccatgattagccataagtgctacagtaacccacatgtgctaatgagggattaattaggctcaaaagattcgtctcgcagtttccacgcgagttatgaaattagtttttttattcgtgtccgaaaaccccttccgacatccagtcaaacatccgatgtgacaccaaaaattttcttttcgcgaactaaacgtgcccttactctgaagattgatgtgcctttcagcaagcctcctggaagggaccaagttcactgaatcacggtcacagacatgcaaagtagaggggagtaaaaaagccaaggagatactctgtgaagccttgcaaaatcagatcagaatggtaacctgcaaacttgcaagggctgctgcctactccagctctttggcgtgtgtaaaacaaacctgacaaaagtcctggacagatgttttgctgtcggattaatcttacttcctccgttcaagaatccttctgaagagacccccttttacaagcatcttggcctagagtttgatccatgcaaagaagtgataggttttacaagcatcttagctgcaggatagagtttgatccatgcaaagaagtgataggatgggcggtggtaaagttaaaaagatgcaaaactggggaacctgctagcttgcaaggattgacggccacaaattcttcagagaacagctgatgaagagcataaagagaagtcgtaaatgcaaaccctgagcaaagatgatgcaatgttgctatttatggggaaaacgcaaagcaagtttcaccgaagcactcattccagtcttttgccatatttggagaaacatggaaaatctggtgaactgtaaatgtacatctcttcgttgcttgattgcttcctccacaattaacttctttattcttgccttcgacctatcagctttgtaggactggtacattgcaggaacctggagcaaagttttttttttcccgagaaaatgacagcaaacctgaaaggacaataaacagcacaattatcttttgaacagcatactttcaaaggaatgagcccgtcactgcactccaaatggcaatttgatcaatttacgaggatgtgaaaacaattgatatattcatacataggatcagtacaagtaaggtattgtagtcgaaatatcagaattttttaacagcatgtaaacagagaggtgaggccgccatacggtctagaaaccaatgcacaacaactcaaatataaacttgtgtaaaagtacaaatcaagtgagtgctgttcacggtcaagtgagaccgtgaggaccacaatgccactactaaaatttaacgctgatgatcagtgaaacaccaaaccgacaagctatgccaaagcttctgtgttatttgctggaattgtcacccaatttctttttctcaagtcttgttctgctgactagaaacaaaaagaaaaagaaaaagaaatgctattctgactttaaactgttggagcacatgctttggtcattctactgcttagcatgctgcataatgtttccctactgataaatcatggggaaacaaactggctgcagaatgtagaagagacatagtccattaaacacggcctgatttcgcacatcatcaagacatctttgccgtgatacgtcagtccagacaggcaatgcaacatgtaactctgtcaaagtcacgaaaacagtttctttgccctaaaaaaatcttaaagagtataaaacatcgagagtctcttttatgcaagctctacctgaaggccactacaaagattgaaaggttcataaaaaatacatcagattttctctgttatggcattaatgttaataaatatagaggtctaaaggcccactgagtcaacaacataaagagaagaatatcaaaacttcacacactttttgcactgggttttcaccattattctgaactgggtttcactgttattatgtctaataacataagaaaacaccaggagactttttgcagattgaaaacaatgaatcaggatttagtccaagcagtgttttacttctttagaattccacataaatatggtcaaatcattatcattattcactcaaacagatgtccttactgcacacataggaacgataacggaactggcatttatccagcatgggcaatttggacaatttttccaaagactctgctaatgctaaaacctgcatggaaaagtttgcacaaaacctggcttctgtctgtggtctatataagacagctacagtatgcccaaaactttctacatcccagttgggcaggagagttggagtgttcttcaggttcatccattatggtgtcctggaaggacatctacctcgttcttgaagcgacagttccactatatgtagctatgatactggcctacctatccataaaatggtggaagctgttcaccccagagcagtgctctgggatcaacaagtttgtggcgaagttttctattcctctgctctcttttcaggtcatttccacaaccgatccttatgacatgaatatcaagctcatatactcggatatcctacaaaagtcgcttgccttgctgggatttgcagccatttccaaagcatgctgtgcagagaagtttgactggctgattactggtttttctttatcaacacttcccaatacactgattgttggcatcccgttgctgaaaggaatgtatggtgagcaagccggcaaactactaagtcagatagtagtcctccagagcctaatttggtacactcttcttctatttttgtttgaacttcgggctgctaatggaatggccaccactacatcatctgaaactacaggtacgtacctaaactgactgactcgatttaggatgaaatttgaagttgcttcctcgaaacagcatggcttaaacacatttacatctttatttaagattagaaatccaagatcctggctccaattcgaaataacattgttcaagtaatgaactagtatttgagcatcgtttcctagtaccaactatatttcttctgattttcattattttttttgtgtgtgcgcccatgctaaccttcacaaatagttgcaaaaatgaaaaactcctgcaaatgttatagatcttactttccaaacgaaagaagcctgctagatactcaaataaatgtcgtttaagtgaccaatgtaagaaaatatgcattctatgatggtagctcaaactgatcttatagatgtcgtataatgcaatcatattattgtgaactgagaatacactaagcaaagagaacatagctaattctccgtttaatagaagaaccaatgaagtgaaatactgttctacttgcatcacttctattttaatctgcagtagcaactatagtgtcatactaacaggaactggcctactctgcacaaatatacaactaagtaactatattgtctagaaaccacctgtagtatttaaagttcagaatgaaacagagatttgaatcgctacagcccaatttaaagttgcctgtacaatcatttaaattacttcatttttttagataatccagcctctatatccaaaagtggatatacacagccaaggagaaattgcttcatactttttcattgtaatgcagttcactttacgcaatagatttgtctgaaacattgtacatgaacttgcttgaattatccagtgattgaagtatattttgaacttctttttcatatacgcctcaccagcaagcagcttaacttatcttctgggaatttaacttattattctttattaaattagttcgatggtttttatcccatgtcatgtttcaaaattgaagcagaatcaggtactagaggacctacacagcaaagatatggagatgttcaggcaaaaggtgtatcagcaagatgttcttgtgcttttcgctttttgttggtggttggtaagaagctagtgatgaaccccaacatgtatgcatgcctgataggtttaatttgggcactggtcggcttcaggtatgttaatgagtttatatgaatcaatttggcttcaagcagaaatgcagctgttattgacttacttcatacaactccataacatacccacaggtggcacataagattaccgttgattgtcagcaattctataaggatgctctcggatggagggctgggaatggcaatgttcagcctaggtaagaatagcaggatatctgattcagcttgatgcaatgcagataaacttctaaatacgtctaaactttgcgaaaaccaattatgttattataaattctaaatacttctaatcacaggccttttcactgctctacaaactaaaattatagcctgtggagctaaaaggatgctactagcattagccatcaggttctttctaggaccagcactaatgggtatgtcttcttatgctattggaatgcgtggagtattgctgaagatagccattgtacaggtatattctagttctttctttggacgagctattatttgtaactttgaacaattcaaccacagaaattacgattaacctgtcaaaatcacattcaggcagctctacctcaaggaatagttccgtttgtgtttgcaaaggagtacaatgtccaagcagatattctgagcactgcgtaagtagatcacctaccacgatacgatcctatgcttgtatatatgaagaagcagggaagcatcattaaccaacaccttacactgatctctcttatggcaggataattgttggcatgatggttgcagttcctgtggcgctggcttactactttgcaatgatcatcccagctatcaaataactatttgcagaagctagcctgattgtgttcatttgagaaaacaatgacggctcgctgtggagaataagttcagttatgagtgaatattttgctagactgtatatatatgtgcccttgggtttgtggtgaaccataataaggatatctgatttgtatcttagtgcatagtggccatacataattcttaccgtttcaactatgaacaactctaatgaacagaacatgtagagaaagctcacattccccggcgacgcggcgtgctctgttcctgtcaggcgctccgtccaacagacggtgcaccgtgcaccccgcccatgagctgctggcacccctgtggggcattctgccgaacatcttgcaggcgtacccagggctgaatagcagattatctggctcagcttgatgcaatgcaacagcagccaagagcttcatgtgcatcaaccatttcttggcctcattttttcctctccggagaacaattacatggcaatatggcattcacacaccgttcccttccaactgtggtgtggaagaacaaacagttcgcttcaccggcagcgtggaacttgcaactgttcgacattttgtagttgggaataagttcactttattaccctcaaaactgatcgaaatcgaccctaaaccacaaaaccggatatctcgacccccaaacttttaaaatcggtgtaatttgactctctaggcggttttggagggcggtttcgctgacgtggcgcctacgtggcagtattgactcggtattctttccacgtggcattgacgtggcgcttagttggcattagaaataaaaaaattatgcatgggacccattagtcattcacacacaaaaaattgtggggctcactgacatgtggaccccacatgtcatcctctctctgcctttcttcttcctcccctcttcctcccttctctctttctttctctctcttctctccccttcggctggccgcagggagcacgggcgactgaagctggagtggcggcggtcgggggccagagcggcggcgaccgcgggagctgaagcggcggcggcggcctcgccatcggcctcaccaagtggagagaggagaggagaggagaccaggtgagggaagaacggaggtggtgggtatgacgtccggggcggcggccgcggcggcggggaggaagccgacgtggaaggagagggagaacaacaagaggcgggagcggcggcggcgggccatcgccgccaagatcttcatggggctccgagcactcgggaactgtcgtcgttgtcgatctggtctcgaactggtactcggcgtggtcggagaggtcggcggtgacgactacgaggaggagatggagggggcgggcagcagccggacggtccagcccaccgccgacgcgtacagcaacctgacaaacgcgtcgttattcccctcttcaaccttcctcgattgtatacatggcagcagcgcagcacgtcgtcgtccggccatggacgtcacgggagctggtcaggccatggaggagcagtgagcggaggggtcgatggcggcgttgggacggggcgatgcgctcggagccgagggcgccgtggggagcaacgcggcggagggggcccggcgacgctggccgtggacctcggcgcagagggcggccgtggacctcgacgcaaagggcgccagggcggaggagatccagcggagaccgaataagggaaggagatcaaatcagagcaaagggggagagagaagggagagaaagggagaagatgacacgtgggaccaacatgccagtggggcccacaatttttttattttgtgtgtgaatgacatatgggtcccacgcatattttttatttctaatgccacgtcaacgccatgtggaaagaagactgagtcaatactatcacgtagacgccacgtcagcgaaaccgccctccgaaactaactagggagtcaaattacactggttttaagagtttggtggtcgaaatattcgattttgtggtttagggtaatggattagatttcaatcgcttttgatttgagggtcatgaagtgaacttattccttgtagttgcgcaagataaaagcccaatgggttaaaccaagcccagtgtcacccacggctcaccagtattgtggcccactggtttgtggtcttcggattagcacaaaagtgggcccagtttagtctagaacttttcttttttcttttttttttcttttgcgaaagtttggtactacaatctttgagttctggacacgtataggtaataattaactgtaagtaaagttttgtactgtaacttaatactagtaattcgtggggaatctgtattactgtagacaaaagggggagaggggatgtgataatgacacggattaactcagtataatgccattttaccaagccaccaactcactccccaagaaagcacaaagccacatcaacctcaccttcttgcccccgaagaaaaagaaggccacggaagccacgggagagtgatctgggccgtccatctcacaacaagccacggcggggagagatctgtgccgtccatctcacaaccagctcctcccccacggccccacccccgccgctataaatagacgcttcctcttcctccccccctcttccccaccactccaaagttccaaaccccacaccaccaccgcgcgcccgcatttctccccgctcctcgcgccgccgccgccgccgcgtagtcatcgagtcgagcagaagcgttcctcctgccatggaggcggagacggagtgcaaggtccccggcgtctactccgagaccggcattcccgtggaggatccggctcccggcctcaactccgacgtcagcaagaaggacgcccctcctgccgttgcggcgccgggtcccggcctctacttcgagatcggcaagaaggccagaggtgtacacgcgctcttcatcttgtttggttctcttttttctgggtggtttttgaggggggggggattggtggtggcggttgctggcttgagcaaattttagtggagtggtttgctgatttctgctgcttttcctggtgtttttgcagatcttctgtacaaggacttccacacggaccagaagtttaccctgaccacctacaccaacaatggagttgtgagcattaccgatttccgcatgctttttactggttcctttcttgtggacatcttggctcgcttgctttcgattgtttgtgtgtatgtggtggtttggaatggtttgagtaggaggatctcggtggctgtgtgatgtgcgtgtcggagttgtgttggttagcggggctcggtgtggtccgagcttgtgtgtgtggcgggttgcggccagtgtgtttgtggaattgacctgcgggtttactgagttttggtctgatttgattttgagttgagttgggttgaagagttgatggatagtgcattttactttttctccttcctggtgttggatgagatggtgaatcggtgatcgaagcgtcgattgggtttttctgttcgattgacaggtggtcaatctgtcaggttgatgtttgttacgatgtttccactgggttttttgttcgttggatggttggtaaatctgtcaggtttcggtttggtgatcgaagaattgactgggtttatttgttcggtccatgggtggtcaatctgtcagtgtcaggtttcggtttgtgatggaagagtcgattgagttttttctgttcgatcaacaggtgatcaatctgtcgggtttcagtttgtgatcgaagattcactgggttttttgttggatgaatgggtggtcaatccgtcatgtttcggtttgtgatggaagggtcgattggggtttttgtgttcgatcgacaggtggctaatcagtcaggtttcggtttgtgatcgaagagtgctttggattttttatgtatttctgttagatcgatgggtggtcaatctgtcagcgtcaggtttcactttgttatagtaagatgcttccattccgttgccagtttagtgggtttctttttgttagaatttactactaatttcgtagttcttaaattgtgcaacgagttgacttgttgataattttgggtttcagtcgagaggttcccagtgataattttttatggtttagcttatacgagtactgctttgtttgatctttccttcagtagatgctgcatgtcaacgtcaacttgtgtgtgtttgtacggatcagaggatctcaatccgtgtttgtactgatgctttgtatcatgggtgtcaattgcagattgcgttggatatcttgttgtctactaatataataatcaaatatgactcttattatttgatttctgtgattctgtctataggtaatcactgctgcaagcacaatgaaagatgaagctatctttagcgagatccagaccaagctgaagagcaataatgtgatgctggatgtgaaagctacttccgattctcaggcaagtttctccttgaaaatgcccttcatctatcaaatgttatctgattattacttcctgattaaactcgctggtgatggactataaattg

SEQ ID NO: 5543 - DNA, 27482 bp, Oryza sativa
aaaaaaaagaatggtcacttacgattgctatagacaagcactgatcgtataaatttcttcgtcggccaccttccgcaacaatgttgggcctgagctggcctgttatttttttgtttatgtcttctctttcttttctatatggtatataagggtagaatggtcatttcatccataccgctgcatgcaaggatgacttggcatgatcacgtggcattttttgtgggtccaaggactatattaactcaaatgattaatttggaggacttatttagacgatttgaaaccttaaggattaaaatgagcccgaagcaaaacttcaggaaccatattagctattcaccctttcatttatgtgtcacttttaatatattaaatgggtgaaatggaagtatggaacccctgtttgtgggggaaccacaagctttttccatcttacaggggtaccccttcacctaccatactccatgtcatggaacgtattgttgtttgtgcttatgttatgttacaaaggctatgctacacgtagggttggtaactcagaagcttgagtttagctgtcatagtgtgacatcaccagctacatgcaagatatcgacatgttatagcgaggccacgatgtagctcttgagctaggctgatcttaatcggtgtttggtgggttgaaaatttacttgtctttttttaagttattcaaatctaaaatttggttttcttatttcgctgtttcttttttgttcttcagatccttgaaccatggtccatgttttttcattatctcagtgagagccaatagatgttttatttgaacgaattaaaatgtgtgggtaatagtaataggtattgttctgtaatagctaattgttttgtcttttcgtatttgaagaaaaattgaatcgaattagatttattatggaaaaactggtcttagtagtagtggagagtttgtgtgaaaatgactttcagctaccacttttttcatgaaatgatcaatttgtaatacaaaattttcatagtaattcaacataaattattttgaaatgagcagacaaccatatcgttcctgtacatccagaattggctcgattgctacttaaaaacatgtgcaattttttaagtcattgtagaatgtattgattttagaggattaagaaatacccaagctcacaatatggctagttagttctgaacgcgcaaagatgtagcctagaggggggggatgaataggctttcctgaaaattacaaacaaatcgcagcggtaaaattcaacaggctcggaacctccaggtgtagaacaccggaacttccgggttgtctgaacagaccggaacttccgaaaaacctaataaactaacagggacttgagctgattttgacgagatgaactacgtgataatagagcagtagcacaatcacagtagcatgcacagaaacatcacagaggagaaaaagacgattttttcccgaagttcagattttgcaatcctactcttcgttgaggtgctccaaggagccgggtctcgattaaccctttgcttcacttatgcaaagatcctagaagaagtccacggccttcaactcaacacccctagcttattttcaagaattgagtgaccaccaagatccaactcacaattccttctagagaagaccacaagtacaagttgctctacctaggacaacctctgaaaactcagcacaagaatctttactcacttacctcgtttccttgcggaggtgaggagtaccttcacaaactttcctgggacatccacaagatctttggaagctcagggtgacacctaaccgtctaggagaagatctccaagagtaataagcccaagtcacagcccacaagatatccaaagtgctcaatcaaacctaatcttcaaaccttctccaaatcactcatgcactctcatctattctctcaatctcacaagataggctctagatttgagtggaggaagcaaatggatcttgggagaggctagaaaaccctagggcatgaaagaactgaagtgaaatggccaaagggtgagctggggacgatctggatatatataatggctaggtgatgtcatctagccgttactcacatttttgaactggaaagggtccggaacttcctgaccaccggaagttccggtcaacacttaggaaaatttcgccacacaaggtccggaacttccggctagccatctctgtccggggtagggctatttccaaaaatagcccccaaaaatattttagcacttggatctcactaagagcacttgttgtatcccagaaccacaccttgaacccctcttaatagtacggtttttcctaaaactcgattgcaaatattacactatcctatgcacccttcgagctccaactccgcttgcatgtttgttgggggggggggggtctcgatcacttacaaacatcttgggactaaacacctgagtatcctcaataaaactcattagtcccttaaccctatttgtcattaatcaccaaaacccactagggggataaatgcaacttcaagttctaataaaaaacaatataggatggtcttaggaagataaaatggatcatctaacaaagtgtccaagaactgaaactagaatcgattgtcaagttcgcatgggtgttgtactagatcaagagaaggggaaatataaagtggctgatctagttttggaacacaatcacatccttcagttgttagaaacctcgcacttgatggtgtctcaaagaaaaattttagagttacaagattttgaaattgagatagccaacgatgcaggaattgggcccaaagcaacacataagttggctagtatccaagttggtggttcacttaatctcagttatactctccgtgaccataaaaattatttgcgtgtaagcgtcaacgagagatggcatatggtcaagcaagaagcatgctcatgcattttcaagacaaaattgctgagaacccgtcattccaatatgcattgcagatggattgggaggaacaaatagcaaacatattttgggttgatgctaaaatgatcaccacatattttggtgatattgtctgttttgacactaattttggaacaaacaaggaaagcaggcattttagtgtatttgatgggttcaatcagttcagggaaacaatggtttttggtgttgttctcatgtacaatgagacatagaccctcctaaaagcacataatggcaagcaacctaaaacaatctatactgatcaagatgctgcaatgggaaaataggtaaggaagtgtttttagaagcatggcatggtttgtgcacttttcatattatgcataatgttgtcaaacatctagctgaagccgacgatgaagaatctagtacttctcccaaacaaacaaccgaagacaatgagaaagaaccaagtattcttgcagattttagtgcatgtatatttgagtacgaagaagaggaaacatttgaacaagcatttaacaccataagagcaaaggcgagcaagcaaagttggttggatagtatatacaaggtgaaagaaaaataggctgaatgttacatgaaggatgtgttcacattaggtatgagaagaacaattgagtgagtctaaatagtgaattgcagaggcatttcaaatctgattttgatatcattcgatttcttaagcattttaaaagggtggtggaagataagtgaaaaaaaaaagctaaatgctggatttgaatcaaggaagaaaatacccagaatcaaaatgaggacacctatgctaatccaagctagcaagctatacacaccaattatatttgaagcttttcagggtgaatatgataggtccatggtagcatgcaccacggcattggacagcaacaattgctatcttgtggcagttggcagtcttgaagaaaatttagctttgagaaggagtacagagtttttgatgatcctttagggcaaactagtacatgcagctgtaggctattcaatagaactggaatattgtgtggccatgctttgaaagtccttgatctgataaatatcaaatctctcccatcacaatatgtactgaagcgatggacacgtggagcatgtagtgggacagtacaagacaaccatggacgaaatataatagagaacccaagattaaatgatttgcttcgctacaaagatatgacccgcaaatttctcaatttggcacttcgagctgccagccatccggagtcatccttgttagtaaacaacacacttgacatccttagcaagcaagttgaagaacaaatcaatgcatgtactgatacaactgttccagtcattgctcccacaagtgttactcctccaaatgatttggtgagtatagcatgccggaagaaaaaggaggtgcaaacaaaaagctcgaagcgaaaaaaaattggcttgataagatgcactccacaaagaagggaagtaagaagggaggtaagaaaaaggaaaatggttcaaaggtatgtgataacacaacatatatttgattctctttcaccgtgctcaatgggaacatgttcagttttatttcttttatttgaaggaacaagaaactgcaaagaagggaggtaagaaaaaggaaaaagaagcagcaggggcagaaacaacagcaatacaagacactgcagcagtgcaagatatttatcctagtacttctttgctcatggaagaaatatctcaaccatacatggccatcaataccttctctcggatattgacgataatatttcaaactaatacaccattttaatatactatacatggccatcaatacattctctcaattgttcatctgatccttttattttgcagggggcaatcacagatgatgttattgctgatttctagtagtatggatatttcctgtaatctgaatgtctttttgcaaatatgtatcaatgccttttggagaatagattgtttatgagaatagcttttggagaatagctattgtcaatctctgaacagaccattttatgcatctctgaacttgcaacaatcagcattactttttattcaattccaagaaaatttacaacacaatatcaatctatacaatttgcatgatttttgctgctttggatacaatcacaagttacacagtcttgttcccgtgctcctagcctactatttcttcaactttgtcggctgcaccacctgttggcaagaccttgaggcagagcagagcagaccacttgttccgtgagatacatgacgattatccctcctacgctcctctgatttgggacgcacagcaagctcttgctccctgataatcagaacatagatgtgtcactacaataaccacaacgaacagcaaacttcaatgaaccaaatgatgtgacataacatacattcattcatctgtaaatggacttcaggtcggagtttcaatttgatgatagaatttctgagtcacttactgatcaatgcctttgttagctatctatgtaaccccctaatgtaaaccggcttgcttcctctctttgaatgaaatcggcagtgctcctacaacaaggtaatgcacagacgccagcaacatacttcctccgtttctaaatatttgccgtcgttgactttttaaaatatgtttgaccgtttatattatttaaaaaaattaagtaattattaattcttttttatcatttgattcattgttaaatatatttatatgtatacatatagttttacatatttcacaaaagttttttgtagaattgaatcacaagaactaagccaaccagaggggggcgtgaatggttggtatacccaaaaacccaaacttttagcggaaataaaagttaccctcaaattcgatgtagatcggtctgaccgaagttgatccgccggtctaaccgcgctcgcgccgccggtctaaccggtgttgatcactcggtccaaccgcctgaaaatcgtctgccgcatgtgaagtcgccgccggtctgaccgcctcgctctagccggtctgaccgctggtgcgtcgccggtctgaccgccgatgagtcgccggttagaccaccgaaaacccggtgaaacacaaatcgaagaactctcaaagtagatgacaactttattacttctctctgtgtttacaaagtgcaccaacaacactcctcataaaaatctcgactaaactcgaaaccctaactaaactagcaactcaattgctctcaaaagcgataccgggaagccccacgctccccctctatttatacatgaggtaggtagcctaaagccacgaaccaaactcatactaggagtcctaaacaccttaggaaaccctctagtacaagacacaaactttacataaccaatcgtaccaaattttgactccttccaaattcaactccgcatgccatacgcacacaatacctccatcgtatgccatatggaatctccatcaaccacgtgcatcaactctagccttagtatcccgtatgatatctgaccatcacggacatcgtcttaccaccaagccgattcccggtccatcaccgcaaatactctcccgaggcatcaagtcacctacacatgaaataaacaaagaaaccatattccgagaccaagctatctccaacttgactcattagtagcaaacaacagtattacatacgtatagtatccatctagaagccataaccatgaaacaatcacggatatccaaagaaacaatccgaaaccaaaactgacgcagcatcggccggtcagaccgcgggctgcgccggtcagaccgcgggccgcgccggtctgaccacgcaatacacgccggtctgaccggccacactagcctggtctgaccggaccacaattcaacagtatcctcctgtagatcacctgtgaaatccaatcatctccaaaaccacttcgtgaataaattccaaatatcaaaatcaataatcacagatgccaattgttcatcacagaataagaatcaaaacacacattgatcttatatttttaaataagataaacggtcaaacatatgttaaaaagtcaacagtatcaaaatatttagaaacggagcgagtacaaaatatcttgatcaatcaaatatagctgccacattcagcacggcatgggcgctgggccgcacgcctccgatgtaatctgatgttgcgcccggccgtggttgctacggtgagcaaactgctgacctttcttggcacaaatttatcccgttggtcttcgacatcgatgagatgccgccctccaacctcctctattacgacgaccatagatacaggtcagttatggtcgctcatctccacaaaatcccaaatggaaatcgaaatttagggaaaaaattgcagtcattgggagtgtgttcgattcttcaattgagatactcacatgtgtatattgtggaattttttattttttaattttattaatagacctttctaaaaaaatatttttaaatccgaaccttttgaccacgccagcccgtctggcgtagccaaaaaactatatcactccagccggtgtggcaggcctttgccacgccaacggttggcgtggccaaacaacactgccaagccagccactcggccggcgcggccaaaaggttcaggttttgaaaatattctttggaaatgtgtaataataaaattataaactaaaaagatctaaaaaataaaaaaaatcttgattgtgggaagatcaggtcttcagaaaagaattattgatatcaaagcttgaggtgaaggaggaagtcactgaccaggctcttgatctgctgatttcaagttgaacctgtggcagcggccgcagtagctgttctagaaccgagcggcaccgactgtagactgtagtacaagcgagcggactgcggggacggctgtacaagtagtaagcagtatttggtacttctccgttctaaaatgttggacgccgttaacttttttaaaaatgtttgaccgttcgtcttattcaaaaaatttaagtaattgttaattctttttctatcatttaatttattgttaaatatacttttatgtatacatatagttttacaacggtcaaacatgtttaaaaaatttaacggtgtcaaacatttagggaaggagggagtattttggtttagttcaggtggttgcctaacttgccagtacttggtttttagcttcttgttcagtaaagaaaatattatatatactagagatataaatatagattctaaccacactgttgctgtaaaaaatgtttcgtaaaatatttttgatttttcaggttgcagtcggaatctagctgcaagaaatcagctcagatttcctagggctatcaagaagacactatactaccaagttgctcgacagtatttgtttgcaagatcaatcccaaatatatcttaggtgatttcttgccctctcagaatactgcaaaagaaaataaaatttaagattgttgtcttgtctttgtgcctttgactggagaagaggctgtgcctccatgatcaatattccttccttctacatttttaacaattgagttatattgaatggattgtccgtaccatcaagatccagagattgattaagagcgaggataatagtatagctcacttcatactattagtccatcttaaaatcaacatacatatataatatattagctataaggttgggtataatttccttctcctgtctctatctctcacttatacatttaatgtatttatcttagagattgtgttaagctagctcttgcatgagagccaacccccttaatttttttgttacatctcttctccacataagcttatagtgggcttatagctcagtattatacttgctctaaaacagttcaaaactggaattggtgaaatcaatgagagtctttatgatttgatggctgcatatcaatgagttttttgtaattcgccacctcagatcagattgaatctaggatgtcacccaaaattcagagtctgcttcacctagaaagtcacccctaattcgtagtgtaggttttttttgaataaaaatttgatgacattattagctaatgtctaattgaattgatacgtacaattcccatatagttctttgtcactgaattttctatttttttcctcaggaatgaatatgatcagggtagaacataattagtgctctttaactccaaaagaagccagaaaacaaagggaagctcaatttgtggtatgtcatacatgtactctttgtccattgcatcacaatgttaacatgatcaaatttgacaagaccaacccatgtttcaggctgttcttccaagtttaaggcagatatacctgcatttgcactgtttgaggaattgagaaaggaggctgaggctgtgcaaccagtgccagtcaactactaccttctagcatttcacttctggtcaaaggggtcaaatattcagaaagacatcagtgcttctgttgactacttcactccacttacaaagtagtagtatattgtacaatataccaaaatgggacagagggagtagtgtgaaaatgggacggagggagtatgaaagtattgctctttacttcactttattattgtacttagactctcagcatggggaacacaagttagataacaggaaatcacaaggacggtttatacagtttagtgctatgatttttctgttaacgcagtgcttgcaaaatgtggctaataagcttgtgctaaaattggtttcctatatttcaaactgattatctagacaattttatcacaagcagggcatgcttcctctcctttttttaagcaacccaacattgctggttttatactaaagagagggtagcactgtacaacaaattataattaggaacctagagaaaaacagaaaaatgtaggcttcagcatagtgccacgccgcacctactgtatatcctatccttgaaaaagaagggtaaaagcctaaaatgtttgccaaattattctatgtagatttgaatgttatagttagatttattttacatgtggtggatctgtattgcccccataaccatgtcctccctatcaacaatcactgacaagatttcctcgttatgttggtggtttctatggtacctttctttacatcggacaacattatgacttgctatgcttttgaattctctcttctgaaccttgtttagttttaaaacaaggcagctctagaatgactatttgatactgaagataacctatacaacttggttttcagagaaggtaagtttcctcatgtcccttaaatcaggttgtttcatgcagctaaatgattctacaaaatagaatcttgcaactggaacctggctttgcatccctcgaagtttactctgtaactgatatgttttctttaactgacaacaaatgatactgatagctacccaacattccaagattttcaacttcatgctttttaatggattttccatggtgtgaattgaccttttgtaggatcattctttatacaatgaatttgtgtggatggagaaattttggagatctagagaatgatggctttcaggcttgccaacgaagagatcctgcccttcaattgtttatcatacacagttgaacttgaggtatcgctacaatgccaccatatttccagtagtgtctgttgattgcaaagcctatgggtagagagaaaccttgttcatttccttcttttgactgaactcacaaggttcctctctgtccatattatgattgtgtttatcacaggcatatacaaaggtagcagatattagaatgaagttaatggaacagccatcagatgctctccacggcacaatgcaatcacagctctgaatatagcagcaatgaaagtaaatggagagaaagggtaattgtatactagatgatctcattagggaggcttgtttcattttgacttgaaagatgatactgttggatgtaattttgatgaagaaaatggtttatctattttaccttggttcaaatgaataatataatagaagaacgtcactcacaatcacattgtatgatgtacttactgattattatgtttatatagaaaaaaaatatataaataacacgcttcttccaaacatagcacacccgtagcgatagcacgggtattttactagtaaggaaaaatgaatgacaattcaagccacaagaaagtgaaaagaaataataggcaactttcaaatagataaccgaataacctatgctatatatgtagttgcgttgcacaagcaaagtagttttgagtgacaatcacttgatttgctcaccaactgctagtattttagaaagaattgagcacatctttcaatcttccatcagacacgtctataagtataagcttaattaagtgctactccctctgtctcattttaagtgcagctataagttttcgtgcctttcttcctatcttaattacattgaatgacctccttcagttattccggcataagtttccgtgcctaactttaatcgtccgtcttatttaaaatattttttaaaaaaattaaaaacataagtcatgcataaagtaatattcatgttttatcatttcttaacaacaaaaatactaattataaaaaaatttaaataagacagatgattaaaattgggcacggaaactagttgcacttaaaataggacggagagagtacaaaattgtgcacttctgcaaaaccaaacacaaacagaattaccagtgggcaacaagcttccggatggaggcggcggcggtgagcgcgtccaccggggcgctgaacaccctcctccccaagctcgccgacctcctcctcctcgtcgccggcgagcaccacagcagcaggcgcgcggtcgaggacggcgtcgagcacctcgagagcgagctgaccagcatgcgcgccgccctcgagaaggtgtcggcggcggcggcgccgcccgaccagctcgacgggcaggtcaggctctgggcgagggacgtccgcgacatgtcctaccacatcgaggacgccatcgacacctacctgctccgcgaggccgccgccgccggacgacgaccaccaccaccaccgtgctgctccttcgtcgtcggcttgaccagctcggctcgccgccggagccgagccatcgccgccgagatcgagcgcatcaagaaggaggtggaggaggtgagcaggcgccgggaaaggtacaggatcgacgaccacgtcgtcgccgtcgtcgatgacgctccggtggaccgccggctgccggcgctgtacgcgaacttcgcaagcctcgtcggcgtcgacgcctcagtggaggaggtgatcaagctgttatccatggaaggatatcaaggtgcagtgatgatgaggcgaaagctcaagctgatcgccattgttgggccaggaggaatcggaaagacaaccctagctaatcttgtgtatcagaagctccatggccaattcgaatgccaagctttcgtctcggtttctcaaaagccaaacgtcaaggctgttcttagcagcatactctgtcaagtgagccaactcaaatatgaaaatttcagttcttggggtgagaaggaaatcatcgacaaaatcagggatgttctcaaggatatcaggtatgtaaaccatcactgaatttttgggtgtctttggaagttttagatatggaaaatgaattgcatccccggcatctgcatctataaaatgcactgagtcaaggtgtctttggagtggctaaaaaggtcaatttcgaatccctgggcttttgtggaaattggaaaaaaaaatgaacctgaatttctaaaccaaacattaattcaatctaatctactgaaatcattcaccttttaactttggttacaatttaattggaatgttttctgggtgacatgtcagcctctggaaaaattattgaatttttaaaatagtaaatgcttttcagaacatacttgaaaaattctagaattgcacttgaaatatttacattacatatattatgttccattttttagacactgtttttcatgggccaactatttttaaatttatgtactaatgttctaagttcagatgtggttacaaagtgggccacatcagtgacacttacccaaaactaatctgtgtttgggacaatgtggaaacgaatgattgtttctagcttaaggtttaatatactcctctttctatgtttattattgtttatcatatttgtacaatttaggttacaactaaatcactacaagtatatgtatgtaacccatgcaaccatttatctaagtcactacaatgcaaagctctcctgcacgttcgaaaaataaatattaatccttcttcaactaacatactttgaaattataggtacttcattattattgatgatatatgggataaaccaacatggcaacttctaaaatgtgttctcatcgacaatgatcatggtagcaaaataatcaccactactcgcaacatggatgttgcaaagttgtgttgctattctgatgatgttgatggtaccatacaaatacaacagcctctttcagttgctgactctgaaaaactactatatcacaaagtattccataatgaaagatgccctcctcagcttaagggcatatctcagaaaattttgaaaagatgtggtggcttaccattagctataattactattgctagcttatttgcaaataggcagacacaaactgaggaccactggaactcggtatgcagttctttccatagcggacttgaaagtagtactgatgtgaaggacatgcgctggataatatctcttagttattgtgatatgccttctcctcttaaaacttgttttatgtatctcagtatatttccggaggattatatcatcgacagagatgacctgatatggagatggatagctgaaggttttatccagccaaaacaaggtacaattctatatgaaaaagagagagatactttgatgaactcattaatagaaacttgatccaaccgatatgcattgatgtgcatggtaaggcacaagcttgtcgtgtgcatgataccatattggaatttatcgccggtttatcaattgaagaaaattttgttgcaattttaaatggtcagtgttcgacgtcggatctaccgaaaaggatctaccggttatccctacaaaacagcaaggatgatattacaatacctgatgcaaccgagagattttcccatgtgaggtcactttggcaaggtattgatttgaagatgcccctttcgggctttcgagttttgcgtgccttggatttaggagattgcagcagtcaaaatattgataatataggtaatttggttcacctgaggtatctaaggttgcgtggtacacattataataagcttccaaaagaaattggaaacctaagatttttgcaaacattagatattaagcagacaagaataaaagaattgccatcaactgttgtacatcttacacaacttatgcgtcttatggtggacacatggacaaagttgccaaatgggattgggaatatggaatgtctagaacaactgtcagagattgataccagcatgtatccaagtcttatgaaagagctaagcgatctgcccaatctacgggttctagaaattttgataagcacatgggagcagaccaaagaggaacaatttcttgattgtttaggctctatgaagaaacttcaaattgtccatatttttgctccagatatatcccttgatttcatgttgaataaagattggacccttcatgaactccaaaaacttacagttggtgttcgccgagaaagcgaagacatatttaagctcaacccattgtctgggtgggctgagtttagcccattctctatcctaccaaggtggatcaattcatcactcaccaatctctcatacttatcgatcattgtcaagatactacaacaaaaagatcttggagttcttggggacttgcctgcactttgttctctatacttgagcgtgacaggcgctttaaaggaaagattgatgataataggtcatagtagaggtaatggtcaggcaatagcattccaatgtctggctaacttcaactttacaagtcctgcaatgatgctagtttttagacatggagccatgcagaggcttcaaatgctttccttttgttttcaactaaaggagacaaaagtttttcacagtgatttggacatgggcttggagaatctcacctccctcaagactgtacattttcagattgactgtcgttacgctaggctctgggaggtgcaggctgcagaggttgcactaagaagtgcaaccaacttgaatctcaactccccaacccttgacttgagcaaacattttgaaagattgatgtattgggatggaatggaagagatccctgagatgaaaatattcaaagaagaaaatgtatttttttttgcagcaatcccttaaatttatttccttctcattttactgtagaattattggtttatcggtttgttgttaggttgggattgtcaagattggaccatggggtggaaatagagggaggcgttatgatattgaggtggctcctcaccatctagaaagcatcagagttcacagcgatttggctgtacattcatttgaatttgaatatagcgaccgtaatggacagaaacatgttgcgggtccttggggaggatatggtggtagtaatgttcatatggtgagcatgaatatttaccaagaaaaatttcttttgttagttaattagtacatgtttcccaatcatatgtacttgaataagtgagactagtcttggtaaaacgcagattcaacttgaatcttcagaggttcttgtggaggtttctggaacatttggtcgatttgctggatttcaaaatatcataacctctcttacatttgttacaaatactcaaagctatggaccttttggacaaagagagggaacccctttccacataccagtgcagtgtggtggccgcattgttggattcttcgggcgtgcagggtggtgttttgatgcaattggtatctatgtgaaccctgatctccaaacaataaaagacaagggcaaagtactgaactaagctcggattgtttcatttcatttattttcttttagctatgattccttttcgtgactgttgtttgcacttaggttgtgcttgccaagattgggccatgtggtggaaagggaggggaggcttgtgacatcatggtgcctccccatcatttggaaagtgtgacaatttgcagtaacattgtgatacactcactcacattttcttacaatgaccataatggagatcatcacttggcaggtttgtggggcagccatggtgggagtaatcagacggtatgtgtgtattccaaacaaaattaattctcaaaatatatgtacattttatgtttttctcttaatcatgataatgattaatgaattgttggggaaaaataatgaacttccctattcattatttacttgggaaaaaaatcaagataatgaattgttgtaagaaataagattgaagaaaaaaaatatatggtgcaattgtctcatagagaaatttagagaacttatcatgatagaaagacttcgagtaaattccaaaaaaaaactacaaatactttgaccaaattataaaaaaaactacatatttaagatgatctatcacaaaactacagatttaataataaatttatcgcaaaactacaagtttaaggctaagtatatcaaaaatacagatttaataataaattatcacaatactgtagattttggggtttaaatccttaacactaatgttatgtttgagttataaatgtctaatttttgtgattaaattggcattacgtgcagtttactctatctaaaaagagcattgggacacctacacaaaaactcttatttgttctagttagcagacgcatgaaactaacatgagttgcatactgtgtaactaatattgtataatgtctaactagtttttagacaaaatggcattaatttagtgatcatatctcatccatgtatccaaaaattataggaattacatgaatattccgtctgagcacaagctggtgacatttttcgacatgaatccatgttataccgttctaaagcatgtcatgtttttctgagtcatcttattatagtaattatttttgctttcctgcagattcaatttggcccttcagagttcataactagagtttatggaacaattggttcatacaatacaccatctgatgttgtaacatctattacattggttactaatgctggctgctatggaccttttggtcaagaaaatgggatccctttcgactttccagtccagggtaatggcagcattgttggcttctttggacatgcgaacctttatgttgatgcaataggtgtctatgtgacaccttccatgggaacaaggaaagaagaagaaaatgtattgatttatcagcaatttgtttgtgctctttattgtgtagaactttcttacatattgcattattttccccttttgttctcttttctttcttggtctatgtttaggttgggcttaccaagattggaccattcggccgacgtggagggaacccttttgacatcaaggtcacaccacaccagttggaaagcataacaattagtagtaacattgtaatcaattcacttgcattttcatacataagccatgacaaacaacaacacattgtaggtccatggggcagtggtggtgagagcaattatacggtgagtgtgtactgtatataaaagctactcctcctagttgtaaatgagtgactagctaggatttatatcagtcatgaaagtggtaagtattaaaaagtgctacatatatatcagatatccctcttggttatgggagggacaactctaaatataatcaagcatgcacccttgctacatatttatcagatatccctcttggttatgggagggacaactctaaatataatcaagcatgcaccctttggttataggagggagcaatttaaagataatcaagcatgtatagggtgtcttttctccttcttccattaataatatctgttgacaattaataatctccttgtgcatacagttgatttggtaacattttttttatccttcctgtttgttgtagatccagcttggtccttcagaattttttgtcaaagtttcaggaacatttggtccatttggtgaattccccaatgtcataacctctcttacctttgtcaccaatactcatcatcagtatggaccttttggacaaggaggaggcactccattccatgctccaatgtcgggcaatggcagcattgttggcttttttggccgtgaagggttatgtattgaagcagttggtttttatttttgcgcattatgacaacagtttgttctatgttgcatgtcaaaggttttagtagatttgtttgtgtgtgtgtcctttttttttgtttcctatgcagtgaagattcactagttccatgccccacaccatgatcctcactagttgttccggcaagctccatctagacatgtcatgtttgggggaatttctagaaactgcggattctcccagaatctacagcttcctaaaaaatcctgattctcgcacatgttataaaaaaatctatagttatagaatctaaaaaatgaacacaaaaaactgggaaacccaaattttcgacaattctcaccaactatttagtcattagatgtttctcagaatctcaagattggttttggttgacatggcattgatgtgaaaatatggcctccgcttaaccaaatcatatttttttaaaaaaaattgtaaatgaattgaaaaaaagtattacacaaaaaattatatccaatataaaaatattcgggccataaaatagttttgtgaactcactaaatgatttctagtagaaaaacttgaattgttttactataagcaaatttatttaggttgtaaattctctagtatacaaccatgatttgctcattaataatttaagtaaaaagaattgaaacttttgacatctacaaaataattaggagttatctaaaacacattactttggtatggttacatgtgaaagaaatatctaaagtgtgatattgtgaagaagattctataaatgatatatagtatttttgcagtagatctttcaggatcttggcaagtggacaagacagaattccatggaggaaataatttgcgatgatctttccaagtggcaaagattgaatagtagaaatagagggtgccctcctcccaaatgctacaaactagctactcaggtatatagcggttaaaatgctattgtctataaacaattttgtggttgtcaatttagttgtcgatgaaaaactccatacaattgtatagatggcataaagttgcaacacagcacagacaagatagcaccttggtcaactctctaccatcaccactacacttgttgtcgacgagtgcttgtcagcaagatggagcaccctcaccacactaatatggagcaaatagagaccggggatggcatacaggctatcacaccctgattttcgctttaggatttataaattatttaataaaatatttctagaacttgtattaaagttcaactaatttacaagtgaagttaatgtgggaaataaaatttcccaaataatacctgggttaatttaatttttattaaattctccatgattacactctctaaaattttcttagattttttagagataaaaaactaatttaataatacaaacatcatttcagcaattaatttaaatgaaaaacttattaaaatcatccagcatccgccgaggtacaagagaggaaagagtgtcgacaacttcggcactcctccaaaacttcccctaattctctacctatattctcaacactactaaagttacgcctaaagtatgaaagtgagttgtatgccactttgttgcgtgttgtgaaatgagaactttcttccttttatagcctgcttatgacggttgattaggtcggcaactcccacaaccgccattaagaggcatgaatcatggatatccacgtggaatgtggagatgaggggctgatggcggttcccttgaatttttcttttatttaaaaatctcatcatttaaaaatttggagttaaaatttggatcttattttattttgtgccaattagatctcaaatcctctcttagacatccctttgaatttctgtcaaaccctaggtcaaaattcaaatttaaatatttccaaaaattccttaaaatatcaactccaaaatcctagagaaaatcagaaaagtcactgttcattgggcctccttttctttttcattccctctccccaactccctttcactctctcctccacccacacctctctttctcaccgagcaggccggcccatggccttcccgcaccggcccagcccaccttcttcatcttcttcctcgaggcaaccacacacacgcaaacaaacagttcgacaaaatgtctcgcccaacgttgcacggccctcgcatcgtgtctgtgctgtgttgtgccgttcttcaccctcctgtgcaccgtgcctcacgccagggccgcgtcatgccaaacccacattgagccaaggtcgcgccgcaccaaaaccgtgccgcgccaagccatggatcccggcaaaatctgaccacgtccctcgctccggattccctccgggagacatggtgccacgccatcccacgtcaccctccgttccatcacgccgtcctatcccgaactcccgcggacgcgcgtctcctcactcgtcgcaccaccgttttgtcatccatctcctcccgggaaactgcctccgcatctccctctctctctctctctctctctctctctttcgcgtcgcgttgccaccgccgcatgatgccgctcgcgtccccttgctctgaggatgctatcgagctaatcccgaccgtagccgccatcggccgcacgtcacccatgtcccgtcactaatcccactcatttcctgctacccttcattgatgaaatgttggaacgtctagcaaatgattcctttttctatttccttgatgggtatttcgggtatcatcaaattcctatccatctggaggaccaaagtaagactatgttcacatgtccgtatggcacctatgcataccgtaggatgtccttcggactatgtaactctcctgcatctttccaaagatgtatgatgtctattttctcggacatgatcgaagatatcatggaagtcttcatggatgacttctcggtttatggaaagactttcggtcattgtctgcagaatttagacaaagttttacaacgatgccaagaaaaggacctggtgaagggatagttcttgggcatcgagtgtccaaacgaggaatcgaagttgatcacgctaaaatcaatgttatagatcagcttcctccccctgtaaacatcaaaggaatccgcagcttcttgggtcatgccagtttttatagaaggttcatcaaggacttctctacaatcgccagacctctgaccaatttgctagccaaggatgcgccctttgagttcgatgacgcgtgcctaaaatcttttgaaattctcaaaaaggcactcgtctatgctccaatcattcaacctcctgattggactctgcccttcgagattatgtgtgatgcaagtgactttgctgttggtgcggtcttaggccaaaccaaggataaaaagcatcatgcaatctgttacgctagcaaaactctaaccggagctcagttgaatactgaaaaagagctgctcgtggttgtttttgctatcgataagttcaggtattacttagtgggagccaaggtgataatttatactgatcatgctgctttgaaatacctgctcactaagaaagatgctaaaccacgtctcttaagatggattttgctgctccaagaatttgacttagaaattaaagataaaaagggagtagaaaattccgtagcagatcatttgtccaggctgcagatcactgacatgcaggaacaaccaataaatgatttcttgagagatgacatgctgatgacggttcgcgactccaacctgtggtatgccaacatagtaaactacatggtatccaagtacattccaccaggggaaaatcaatgaaaactgaagtatgaaagtcgccgtcatatatgggatgagccatacctatatcgggtctgctccgatggcctactacgaagatgtgtgctgactgatgaaggacttaagatcatagaacgatgccacgcctcaccctatggtggccattacggtgcattccgcacctaggccaaaatctggcaaagtggtttcttctggccaacaatgtatgaagactcaaaagaattcgttagaagatgcactagctgccagaggcaaggaggaatcactgctcgcgatgcaaagccccttacatacaatttgcaagtcgagatattcgatgtttggggtatagactttacgggaccttttcctaagtctcgcaactgcgagtacattctggtggcagtcgactatgtctccaagtgggttgaggctatgtcgtgcagtgctgcggatgcgaggcatgccaagaagatgttcacagaaaccatcttaccaagatttggtacccccagaatggtcataagtgatggaggttctcatttcattgacaaaaccttccgagacctcctacgagagatgggagccaaacacaatatggccactccttaccatccacagaccagtggtcaagcagaaacatcgaacaaacaaatcaagaatattctgcaaaagacggtcaacaaaatgggaacaggatggaaggatagattgccgtacgcgctgtgggcataccgaacagcgtacaagacacccattggaatgtccccatatcagatagtctacgggaagtcatgtcgactacccgtagaacttgagcatagagcatactgggccatcaggaattggaacatggattttgagggagcgggagaatggagaaaaatgcagattgctgaacttgaagaatggaaagagaaggcctactacaacgcgaaaatatacaaagaaaggacgaagcgctggcatgaaaaaagaatcaaaatcaagaaattcaagccaggagacaaagtactgatattcaactccagggttaagcttttcggccacgaaaaactgcgcagcaaatgggaaggaccgttcgacgtcatcgacacctcttcgcacggggcaatcacactctgcgacgactcaggtaacatatttaaggtaaacggtcaacgcttaaaaattttccttgagccaaatgaaactttagaagaagtggatgttattgaattagttgattatgaatagggatgaaaacggagcggatagtttccgtccgctccggacaaaaacggatacggatacctttcggatcggataattctcggatatttcggatacggatacggatattttctcccggatacgaatacgaatatggtatcagggtttccgtcggatacggataataattcggatatccggtgaacagtgctattcggatatccgcaggacccatgagacataccccatttctttctaactctataactttcaatatacctttatagattttaatagtagtttatctcttaacactagtccatactattaatattatttaaattttaaaaaatatttataaattatacctcattttatataaaatgagctaattatatatgttgatatttatttctattagaagttgagttggttttcgtgttccgagaaaaatttgtttccgtattcgtgtccgatcatattcgattcttattcgtattcgagataatccgtatttgtttccgtattctagctatccatattcgttttcgtatccggtaaaaaatatgaaaacgaatatggtatgagcattatccgtccgtatctgctccgttttcatccctaattatgaaccatgatgatctcatctattgcatgcttaaaaccctgtatagttgccatttctgcgctttgtttaggttttagtcatagctattaggaccggaccggaccggcggtccgaccgggaaaaaccggaaccagggcctcggccggtccggtccccttaaaagatcggctgtgcaactgaaccggggaaaaccgattgaaccgggtggtttttatgaaaaccgggctttaaaccggagtggtcagaccgggctagcttttggtgatgggctcaggcgagggccgctgagcaaagtccaccaaaaatcgctggaaaaggatgtgggagtggggatttgaccatgggttgcgcggttgagagctgcacgcactagccaccacaccatctcgttgcttctgttggtttaagacatttaatcctataatactttgaactgcggttggaccggcctaaccagtggtcgaaccgacaaaccattgaaccgagagctcgaccggttcattctccggtccggtcttaataactatggttttagtgggcctagaaaaaaaatggaggccagccggacccaccagggttcggccgaaccagggcggcgtccgaccgctcctatttttgaatgatagtctcccccgctcgttcccagtttgtttagatgcgcgtttggaggtagaatgttcggatctcaccagaacacttcttcttcctccttttctccacctttgcacattctcctctccaattcaacccaattcctcgaatttccactcatacccaccaatggctggcaaatcattgatcccattcatcggctcttcatccaattccatgtacaacctcaccggagagccaacaccggtgaatcgactcatcccggtggaaaactacacagtagaaggggtgaatgcactgtgggtgcagccccttgcaatagtgccgggctcccctgcaaatttggagcccgtcgacgagctccctggtttggccgaaccaggggttcggccgaacccttctcggccccgttcggcaacgcgatccctctcccctcgccatgtcacgaagacaacaatctggcgggattcgcctgcgcgacggcctacaacgggagagctcggtcttttgaaggcacgaatcctttttcaagatgacgagaaggctgcgccgcctcccgccgagcgctatgtgggcaccctgttcactaaggcaggggatgaggttctccacaaatatgtcacacccaccgctactccatccactccgaaggaggagcgattccgcattcaggggttgcgaactcccggcggtgggtatggcaaaggattgctctggcctttgacggcatcggagaaggagggggcagcagaatcccgtagccctccacctatgaaggtgaagcgtcatttgacgccccctccagttgtgagggctcccggccaattccaagaagatgaggtgaaattgccggagccctcgatccataagctcgctgcgcaagtgaagaaactccgcaaggagaacatagagcttagggatcgcaacacggagctaggggtagagtttgctgaaactagaaataattttgatacccttagtcgcggtttgcgcgctaaaatcaagtgtgcattcatagagatgtggaaggaaaataagtattatgctaattagatgtttcctttcccatgaataaaatagtagtaggtgtttggttttatctttccaatcatacaagcacttgctatgaataatgtggctcattggtgttaaccccaatgtttgccaaaatttgttttgtttcatgtttaataaagttcaggttttgaataagtgtgggggagatatcccagcttctgacgtgcatatactctgaaaactgttgaaatctctgaacacctggaagcactgaactctacagaaagttgcagagggatcatgcgccagagtggtaccaggttcggccgaaccagtgttggccccaatccctctcaactttcacaggtaagcaggtgagcacgtccgtcatctatatatctctaccatggtatagtactagagctgaaaattcagaaaacaactggttcgagcataagaaagataaaatttcccactaatgaaattcttcatatgattgatcttgtatattcattattctcagctgaacttgtgcttgtgaacaatcatccatgtttagggaaccctatgcatctaagtaaatgctatatgagagatgattaaagatgaaaggaactcttgtaactcttgttatgactcttgggaatttgttttcaaaatgaaattgttttaaaagcttaatcctccaattgacttcaccttatgcctaccaaggccatatgcaagtacatcaatgatcaaccttatcatgcatatgactgctggacattatattgagctttgtcaaatttgtgtgactcatgttagatatcttttatactctcatgattaagaggtcattatcatatctacttcccatttccacatataaaatttagctaagcttctacactagaagttggctttccacaaaaatatctattcaaaaaaattcctagtgtatactatgctttcttctcctaaaaaaaaactcttggaaaaaataaaatgagaaaaggagggaaaggcatggccaaagaaaaaaaaagaagaaaaagaagatggaaataaagcttgctctcaaaacattgagcaaagttgaaaagaaaatatagccatgccccttccatgatcatgccaagaaaacaaaatggagagaaagtataggaaaaaggagaatcatttctttattccaccattccacaaaaatattttattcattttccaccataaagaccctggatctaagagtatgattgatgatcttcttgagtccatatttttggctttgcaatatatatgatgcaggtatgtcacgatttatccctaccaagctccacatattagccttagaatagggatgaaatctggcacgttttaccttggtgaggatccaaaaagaaaaagtacatctttgagagacaagagagaaagtcaatatgaggaaaagagctggtttgcgaaaatttataaaaaacccatgagtctgacagagaagaaagaaggactggaatcgagatcatgccatttatcaattactcgagatggtaagatagctacttataaagttcacaggtacaggtatggttgtgaatgatttatatgcttgattcatatcttgaagaaattcattctacactaacatttactcagggacgagtaaagggctaagtgtggggggttttgttggcggctgttaaatgccgattctataccgccaacatctgcataaagttcggataataaaacatccaacatagtgataggtgctcaatctcacatattccacaagtgttggtgtatatttgtatgcagaagataagcccgatgttggaggaaatctagactaaagtgaggagaattatgtatccatacaaggatgggttgtgaacttcatcaaaatatcaaagactcagcccaaaactctgcgaaatggatagaggaggatcaggggaggacatgagccaaaggacatgct

SEQ ID NO: 5544 - DNA, 10521 bp, Oryza sativa
cctcgcaggtgccgttgaccccttccggctagccggcgaggcgggcggcggcgcggtggggtggtggcggcggggatcgcgcgaggacggggtggcggcggcgtgcgatatgaatcggtggggaggaggagaggagttaggttaaaagggtctgcacgaatcttaaagcatatccaatggtccaaaattcgaatgatatggggtgggattttctgtcacaatatgtataaacagcccaaaaaaaatagcagccgaacagaagcttaatttaaaacaaaagaatgcaactacgtggcgctcgttaaattcttagcatacatgagttctggaggaaaacaacaccaaaaacactattcatctcttaaggaagtaatttgataatttctatgttttttcgcatggagctagcatccaaatagttgttcattgtttgctatcggtcgggcgcctacaatattgcaatttgtcagtctatcatcgttggatacgcatcaagatccatgcacaaaaccaggcttggcctgatgcaatgagtaacgggctgcatctgccctggcccgttaagccgtgggccatcaatttttttggataatggatttttcattaatttggcctctatatccatatatatccgtaaagaatatacatagccaaaaacatacacaagggcaatacacacaaacacacacaaaaaaaaaaaagctagaagacttagcttcaaccttcatcgatgacttattctattcatcccagcatgagaggggtatgaggagaaacaaaactagtttgtgctactcgtcgccgcaccatctccacctctatggaactcaaccataaactgctgcaaactgctatgtccgctttccaccgtcgccatccaaaaacccccttatgcagttgttgcattttgaacgcctatagagtaccacgaagccgcttgccgtcccaccaccatcttccgtggactatcaaactcaccgtagctcctagagcatcatggaaccatccagcatgatatacaccttgtctttactgtcatgagctttgccgaagatgcaccgctaccattcacatctatccgcagccagaccttgacgccgtcactcacatgacagctgctgcctctaggattactccgtcaagagcctccattgccatcatccttatatgcatcaggaaagtcgacggccatcgcacaccatcagcccagccatcgacgaccatcgtccactgccctcgcctgaccgtggtcagaacggggcactggagctcacctaagtcgtcggtgcctctaggacgttaccattgagaaccttcgccgccatcgtctcaacttgtcatggttgaaccaacaatcaacaagaaccttcgccgccatcgtctcaatctgtcatggctgaaccaaccaaccgtcgacagtcatcaccatgctattgtcccaccatcacaggtggagggctagatccctccactgttgttatcgccggtggcagagccgtcactgcccaacaccaccaccagcgcgctccctaccgcctagcaggttgccagcgtgcgctgccgctgccaccaccgcctggccggctgccagcatgtgccgtcaatgaggtatgcacactcagatgtggcaagaaatttgagattaagccatcgtccaaaacaggtttcgtcaaaatgccatcgtctaaaacgggtttcaccaaaatgcaatcctgcacgtaatttggtttcatccaaataccattctcaaacaggccacacgctaatgtcatttctcccttttattgattgttcgcccatcatgcagaacatataaattccttatcactatgtaggaaaattgaactgtatgctaagtagcaataaaatgtggcatgaagcatgtcagaacttcaaataggtttccatcacttgaacagatgaagttacaacattgttgaaacgcaggcatacatgagagcaatggtatttgcaactggcagaaacaacactttctacacacaaaatcattagcttctagtttcagtgtggcagttactgcagggctcaataacctttaagctaacactcgagggtactctcccctcaacatagatcctaatagcgaggagagccttctcagcttccaagagagcttccttgctcatttgtaaacattgacatgggtcaatcttgtcatttctcctgtcatagccacgggtggtgtccaatgtaaggtactctagagacgaagccttctcgagaatgtggttggcaagatcgatcatgctctttgcagaggaaaaaccggttatcatcatgttcttgagattgtcatggcggtattctgaagcacgcattggatgcatggagtcaccactcaatgcttcaaggatcgaatcatgtcttttagctggccgttcaatctgcaaaggattacgtcaatgtctgctttttttttaatgagcaaaaggtactgaataaaagttagccatattaattctctccctcttttatttagctactactttataggaataggatagtgatcaaggcaagtaatttagttgcaaagtttatcaaggccatcaatagtgtcaatatttattactagagttgcaacgtttttatttttttaaagaaagctcatcacatatattttaaagcccataaaaattatattatcatcatgccaattttgctgccactttgtaggtgtcagttgagttagccataggggtcagataaagatagggatgcaagcggggcgggcaagcgggtgtttttagcccgcttatctcacttgtagttcattttttcttctaaattttgtgctaccatatgaaaaatgaagtagtaagcgggtttttatgcgggtagtgagactacccacttgcatccctagacaaagtcttgtctgattgttcgtggaccacatggtaattgggtggcaaccaccaccagtaagcgtcttttaagatagtacatatgagatcagttgcatcatttgcagaacaaagaaatgttacatttgtccaattcaagaaataacaaaaaacatttgcatgaaacatcataacaaataattctttaagagaaaacaataaaatcttgaacataagtggtacctgataaatgatagatagctttgacatataaataataacttacacgcaggataaaagtctccaaggcaggagaagcatcaatgaaggaaaccagagaacaaaaatcatagcccggggacaaatctggtgtaagcagcagtatctccaagcacttgagctgcaggaatttgccaagtacctttggtgtattgactgtctgaagaaaaagaggccgcaaaaattaattgagtacagtagtatacagtgcaaatctagtgatatactccctccgtttctaaatatttgatgccgttgacttttttaaatatgtttgaccgttcgtcttattcaaaaaaattaagtaattattaatttttttctatcatttgattcattgttaaatatacttatatgtatacatatagttttacatattttttaaaagtttttaaataaaacgaacggtcaaacatgtgcttaaaaagccaacggtgtcaaatatttagaaacggaggaagtaacatgctattattatggtgtgttgagtgacaagtgcaattgagctaataagtaaggctaaaaccgacctcattacgtgttgatagataaagcttctgtatgtttggcgcaatggatggaagcttcttgctaccataatgtagcgcgtcagggcttccgtcacaaaacatttgcattttcttcacttgtaataatgcttctccaagtgagatttgtattggggggccagcatagatgaaagtagagagctttggagcactactgtcaatcacctccaattttctaaaatgcaacacttccaggtaattaagctccagcagatgggggatcttcaggacaacaatattatggcagtctgaaagtaacaatcgctgcaaagcacaggatttggatagaaagccgcataattcctcctcagtaatttttactgatcttaaacgcaaacttgtcaaggtactcatctgaccaatttgtatgccagggtggaaagaacagccaccaagtaaaaaagactgaattgagcttgctacccttgatagaagtgagcatgggaaatcataatccatcttgctaactcgggtcatttctagttcaaattctttgattcctggtgcaaacgcaatttgaagccagcggtcaacataactaggatgcagactgaaacaagggtgggttgtaagtttaaacatcttcactcctgtgccagcatgattcagcataatggggtcgactctactgatgaaatcaattgttagtttatcattgctaggtgctctcttatctatgcgtagtgtattaacattaagattgagcctggggtagaatctccaagaacgcagaaaacaacgagatgcacaggcggcacgagctgcatcctgcataggcatgagagtgtgtatgtgataaaggatgtcctgcacaagccaacaggagaggataaaaacattagaaaatgttttattaccactataataataactggcatactgctttttgggaatgaatagtagaggaaactatcaatatgctaaaagaacattttcaaattgaacatggatgcactgctgagttccgtacctctggaagctgcatcttggattccactgtactggcagattgagaatcatcgccacattgacaaggggagttgtctatttcagaagctgaagaagtagctccattacctgcaactaactaggtcatgatgcagaagggagcattttgtttgcacgcatataccaaagatggatagttggacataatttaaagataactataatacaacaaagacatatttttgtgcttgagattactaaatatgaagattaagtacgggcacttaaaacaagaaaaccattagctcatgattaattaagttttaattattttaaaattaaaaaaatatttatctgatattaatgcaacttctattctgcataaaaagtttcagtacgaaatataatagtttgaaaagcgtgcccaacggaaatatcttaatcggaaaaagaaggagaagggacctaattaaataagggttttcaactaacatagaaaatcagagaatcatcattgaaatcaaaatttgagcaaagtcacttgagatttaggccacctgatgatgcagagaagtgcagaacaaatgtgcacttgagatttgaacctagctagttagaagaatccgccgaagcggctgaatccaaccagtttgattgattttacccaccagggaagccgtgggagcccttccaaaggaacaacaggtaatcgaacctaaatctagcgggtgatttgatcagctacgaggggtgggggacaggaggaggcttacctattcgcggcggcggctggacgggcacctccagtatctccatatggccgctgcttagtacaaaacgatgaatctcccaagagggggaaggagcctggggcgatcgaggctctcgagaagtatcaggcgcgacgttcgccgggaacggcgggagcggcggcgcgcgagatcggcggcggcgtcggcggcggcggcgcggggaaattaagatcgcagagccgagacggatcggaggaggagcggctaaaggctaaagtgctaaacccaccgctcgtttgttttaagtgggtcccaccgagtccgactgttcttcgtacgagttcaccggattacggaaaacccaagagaaaaaggtaaaacccgatgaattttcaatcaataccatacagaaaccgactaataccagttaccgtacagtaacacatgtattataagatgttttgactttagccaaaatcaaatagcttcaagtttgactaacaccgtgtttagttccaaactttttttttcaaactttcaacttttccatcacatcaaaacttttctacacacataaacttccaactttttcatcacatcgttccaatttcaatcaaacttccaattttagcgtgaactaattacacccttaagtttataaaaaaaatagtaatattttcgacctaagataaatttattataaaaatatatttaattattaatctctatctctatctctactattataaaaattgaaaatgtttttgccagtactttggtaagtcatccgtgtatgagtcagtttttaaattcgatcgcttttggaaatacatagtgtatttaaataggtttttaagttcgttcgcttttgaaaatatagtaagagccgtataagaattctctttaaaaaaaactcgcatgctaacttaagacgatcggacttctaattatagctcatgatttacattattgtatttgtatataaacttagctaaacttaaagcaatttgactttaaccaaagtcaaaacatcttataacctgaaacagagggagtggtacgtattggtctcgcttttacaaaattcaaagactcttatcacattatcccatatcatattattggacttgtttggtgtgacataaattggccataccaatatttggcaattttaatagtgttttgtgggtgtggctatttggcgcgcgcactagctctccctccacgtgttttttttttccattttttcgctttttctttttttatccccctcctccccttgcgcgtttccttttttcatgttttttcccaatctttttaatcgttagcacatgtattttcaaaatatttgagtcgaaagttttcaaattttaatttgaaagtttttcaatctaaagaaacttttcaaatcttgacttgaaagttttcaaatctcgagtttaaagttttcaaatgtgagtcgaaagtttttaaatccaagttaaaagttttcaaaatttatcttacaaatttaaattttaagtttaaatttttcaaagtttgagttgaaagtttttaaatttgacttcaaagtttaaatcttagtcaaaagttttcaaatttaacttgaaagtttaaattttaagttgaaaatttaaaaattgagtttagagtttcaaattctgagttgaaagttttaaattctacgtatggcttttaatttttcgatagaaagtttaaaattttacatgaaagtttcttttagatatagatttctatcaatatgttagtaaaaaaaactaaggaaaaaaaggaaaacattcccttaattatcgtcattatcctaaactaactcggttagttatgggagaagataaaacgcgcgccgccactcgctttctcagtgttttgtgtcttttggtttgaagccaacttttgataagcctagaaaaatagaccatttcaatagttaacttaagctattttgggttttttttttttgcagggaggctattttggttttaatccagacacaatattgccttatcaagattagccatgctaaaactagacaaaatttagtgttgacaaaattggtaagatcaagttagactacaaaccaaaccagccctataattcataagccgaagaaaatttcacaagggaaaaatggaagataaaggtaccagcacattgctactccagcttgctaccagacttttaagagaagtcaagattcaagaataatataaaagagagaacacaaaagaaacacgtaagagagataagaaaacatagaaaataagcaaaaatcctgccatctaaggctaataataggcttttgctagagaatgcatatgctacagtctcatgcctgagtttacaggaagcagatttcatctgaacacaactgatttctgatctgacactcacagaaggttatccacggcaaaagaggtgagaaaatttacttaatataatctcagaaaagctgagagttcgacgcaattatgcctcaatatatttatctgtcttcctgtttgtacatttcatggcctgcaccacatctttacttgattacttctcactgtgcagaatcgaccaatctgcaatagaatagaacaattagcaggagtggtggaatagattagagagtcaaggtttcgcttcatttcatcatgccatctcatgctgcaagagacatccctgatccatatagctgacttatttgaatgcatgctttgcttatgatgatcagtgagcaaagctggaggcttccagaggacagcgtttcccacagcacagatgtggaatagatggagggaaggcattaaagcaaatggtgcttggggaccagttaaagtcatgcaattgcaagcagcatttagcaccgaggacatccttctattataggagacaacaatactaacacttgctatctaatggtaaccatttataaagcactaatagaacttaactaacgtggctaaaccaccaaccaacccaggatacttatgacattatagtagtcaataattaaagagacaaggagtcatgaatttgattatcagtgttaattacactatattaattcaaaagtaaaaatcagatagcatcggttagacatcagacaagttaactgacatcagagcagctcttctagcatgtctttgtgcccccctaaaggagcttaagttgtatgaaaacatttgccatacatagcttttgcaatcagttctggtggagagaatgttagacttctcccagttcctatatgttcaggacataaagtaagttccaaaatgataaaacttgaattgtccatggcattgctccatttcaccagcaaggtgctacagacaagcaatggcatggtgtacaacaaactagcaggccaatgttggactcagtacatgtgccaccaaggtacttcatgccataggctctgttgtttaactcaacatggaactaaaaaggaattgtgtagaaatattaactggcacaatgtacatggttgcccgtcatccaagccaactctatgtgctcgaaatgtgctcctgtattgtgacagccctcctgtattgtgacagctctaacacatgttgcatatcgtctatcatcctgtttgtgataaaatatcagtaattgctcgagtttggaggttttatacaacaggtcatttgatttcacaattttctcctttaaaccagtgaaatacataatttaggacaaaaatacatgctggaattcaaggaactccaaaactaaacatatgtttgaactctagataacacgtaagatcctagtccctagaaatgcaaattcacatttcctttgctaaacttggccttgctgaggattatggacttagattacaatgaggcaacgtgtatacgaggcaactatacaaaatatgcagaaaccatcctatattacgaggacacaaacacaggtagataaggcctctagcaggtgccacagaagaactccagaagggtaattttaccatcctttataaagtacctagaggtaccatattttctagtgtaaaaatttggtacctctaggtactaagtacctcaatgtaccaaaaagtttagtgtaaaatttaggtaccttaaggtactttatcaaggactgtaaaattcctcactccagaaacactagagcaaccataaaaagagtatgggaaaaaataacagtatttgtgcagcttaacaataaatttcggactatcttaaatcaccgtactacatgattgcatcatgtgacaagttgagcatagaactacagctcaaattcccaatttccattaaccataatcctgtgataattacattggcaaaaaaagatcctaattaaccatgtcagaacatatcacagtatcagtgaactacagtcacaagacaactccattcccactgcagattaaatggatcgagtgtgattgtggcaagttacctgggctggaaagcaccgccaaaaggcattggggaatggggacagcgtgatatcatgccttctccaggacaaggcagcatgaattcccagtggcaaatccaacggtcaacctttgcgctgagtcaaaatggtcatccagtggcttaattgaacagcctttagcccacaaaatcagaagattttcatttatggtaaaggattcctcactgtcatgttgtctgttgatgaatggagtccttaccttcaaatcagggtattcactatcaaaactggccatcaaaaaattttataacttaagagatcaggttcttcactctgaacttcaatgcaaagcaaggactaaatattggctttcagaacaagttccagtacaggaaagccctgattcctatctagagttggtcatttgttagtggtccatgcagtctctataatgcaaccagtttggattcaggaaatatccaatccctatggggtggatctgcatgctcagcagtactacatcagttggcaattgttggtattcatgacaagggatatattctcaaggatgctctcattcagttcaaaggaatatactggaatggtgccaatgattctcctcagacttaatctacttcatacttcctctgtttcacaatgtaagtcattctaggggctgcaggaatt

SEQ ID NO: 5545 - DNA, 8556 bp, Oryza sativa
ggatctctcagggcagagtgagtatcaatatacctttctttaagacccatagagggcttaggcagggggaccctttgtcccctctgttattcaatctggtgggtgatgctttggcagctgtccttgaaagtgcaaaaacaaatggggttttagaaggtttggtgtctaatctagtgcctaggggtttaactcattttcaatatgctgatgatactatttttttttatcaagaatgaggagtacaacattagggtgctgaaatttctattgttttgttttgagaaaatgtttgggatgaaaattaactatcaaaagagtgaggtttatgttctgggagttagtaaggaggaggaattgagagttgctaatatgctgaattataaagtgggtagtttaccttttacttacttggggcttcctatggtggttgagaagatatgaatgaaagatttgtgttacattactcagaaagttgataagaggttgtagtcctggaaaagtggttacctttcttatggaggaagagaaattaaaattaactcttgcctgtcaagtgcccctatgtatgcaatgggtttttaccatctacctgagaagtttcataagataatggactctataagaagtaggttctactagtagggtttggggaaaaaaagaagtaccatatgctgaaatggaaagctctaatcagaccaaaggagtttgggggtttcggttttctagatactagggtgatgaatctgtgtttgctaagcaaatggatcatgagaattgagaatggagatcatgatatgtgtttacaagttctgagaaggaaatacatggtccagcctagtttttttttagagttctcctgggggggagggggttccagttttcgaagggtttgcatgactataagggttggctggaaaggttagtggttaaaaaagttcatcagggagggtgtgtgaaattctggagggatgtttggctgggtcaggtacccttgaaagttgctttccttgagttgtttgacataagttatcatcaagaagcgactgtgagtgaattatgggagaatgggacttggaatttggagtttagaaggaatctagatgataacagtggtcaagatttaattaggttgagaggccttttaaatgaatataatctggatggtagagcagatagagtggtttggcctaacaccagcaacaagatctttaatgtgagatcgatgtatagattgatcacttttgggggtgttaaagattctgaaatgatgagtatttggaagagtaaaattcctcaaaagatcaagcatttcttgtatatggcaggaaaagggagactaccatgttctactcaattggttaaaaggaagtggagagggggagatgagttgtgtaagctatgtggtaaaaaagaaacctcgaaccatatcctctttatgtgccctttagctagttttacttggtgtgtcattagggatgctcttggcttggacaaaagaccaagtaatatcagtgagggtttggatttggttaaggggaagaaaatgaatagggtttggggtggtgcttctggctactgtgtgttgggcgttgtggttggttaggaacgattgggtttttgaaaatgtgttgattaaatcccctttgcatattgtttacaaaactctttcttttgttcagaaatggtgtatcatgctaaaaggggaggagcaaggtatcttggaaggatggtgtgatcgtctgctggaaaaaatgggacaactgaagacaaatcgattgcctgaagatttgtaactgtgtagttcagttggcccttacctacgcctcatgggaaagacagcctgtgtgctgaactgtgtttttctgttttttaataagactgtttgtctgttgggctttctttcaaagccaggtcaatataattgatctgtttcaaaaaaaaaacaagaagacgcagcacctgccgcgcgagggaggtgccatccgccgtggcgcacgcctcctcctccaagtcatcacagattccctcaagcttggcatcgtcgacggcggagacatcggttgcggtggcggggaacgtcatcttcttccgtgcagtgtcctcgagccctaacgagacatctcggagcataatcccaagcgggcgtgccctcacaagggcccgagcatccactgcatgatgcgccagttgatgtccactgcctccgtcaaggcggagaggatgcgtccggcctcgtcctgacggttgagagatcggacctcgacatcaacgccgccgacggccgcaaggtccgccatggcattctcaacctgctccagcgatgacactagtacagtagataccaacacggaggtgggagaggccgaggaaccgaggctcgaggccgacaacgaggagacagaggcagaggcagaggtagaggcaaagtgcaccgcggagattggggttgaggagctcgccgtggcggcagtgtcaaggagtgcgcctaggaaggcgaaccggtgggaatcgaggcggaggcagagttcgccaaggctgtcagggtagcaaagctcaccacggcgatcgcggtagtggagcgcattgcgaggcggtcgaggttgaggagctcggcgcggcggtcgtggttgagggccccacaagtcagaggccttggctgtctcgcagtccacgtgaccatcgccattgttcctcactgttggatagtatagagagaggagaatactgcgtaacgtggattgattgtattgagcctctgggggccggtatatgtaggagtacgtggggaggagataaggaacgattacagatttggaaggagttcacacaaatcaatcatatcctaatatgactctaactaccatatactcgaacatccccccgcagtccatgcatgagcagcgcggacacttggactgaagaaaaaaccagcaagaatactcaacacgatgatagccctttatgccatagtcgatgtagataaagcaaaggagccgagagagccgtggtcgatgaagccgtgcgtagactagccgtggtcgatgtagccgaagtagggaagccgatgatgtcgaggtagccgagccgtggggcgcgcatggggcgctgtagagtggttgtaaacgcacgggagggcatcatggaccaatggtgcgcgaggacgtgctggagatgaagacggtgatacaatcacgatgatcgtggaggaatatgacgccgaagagccgatgtagtcgaaccgtgaagtacgagacgtcacgccgggtttgccagacccagggacaactcgggacgaacacgcgcaacggtgttgccaataccgcgtagacgaggtagggaaccaccatgaatcatacgccaatgtcggaggagactagcagagaaggccttcgagacggtcgcggcgcgagaacggcgtagaggcagaattgccgaagtagcacccgcagttgccggagaagagcgaagtgtagtcgaggaagatacggcgatgctggcaatgagacatgctggatgaagaagatggtgaagtagcaggaccaacggcctggacagcaacgtcggtagccatgtagaggtagctggaccaccggcctagaacggcgatgatggcaacttgcagacgcagcggcaatgctctaagtagacgaagaagaacccgagtggctgacgatgaccagtgcggatgatgaggttgtcgatgcgcgaacggtgagaaagaagacgaaagcggcgaaactgcggtccgagaggacaacacagctgcagctccatatcgatgcaacggcaagaactaaatcgacggtgaggccacgctgagaagggcctctcagcgttgcaacagccagtggacggggaccatgggcagcggcactgcggcccgagggaacaacgtagtggcaaccagaagattgatggcgtagtacacgtgctcgaagacgatagcagcagtgtgtcgtagccgggcgcataaacgggtgatcaagccaaaattgcatgaggctaggcgacgaagaggaagccggagttgatgccgatgttcgagatgtgcaaatgtcgacgaggcaatggacgacgcaaacccaatctctgatcgggggaaaaacacacacacacacacaaatacaagcagcaacagcactgtagcagggtagcaatccacacgctcgacgacagtccaagctgaacgcagcacagtccttcatcaagtcaacaagctaacctctctgtacgtacatatccacgtgacctctctcctcccttgcatgtagagctacgcaagttcatagcagaagggtacagatacagcagagagagggcggcctatggactagcggcgacccgttggcttggcaggggctgggccggctgggcgcaggtcgacggcggcgactggctgtggagcggagcagagaccggtggacagtgtcggctccaggaatgaatcgttgggtggtcctacttggcatcccaaattgtcacgatgttacaaaatcaagtcaaatatgtcaaatatagtggaaatataattcaaatattgcaatatagctcaaaacatcacaaattgattaaaaccaacatttaagccacactacaagaaaaatactctgtatagacatttttctagtactgtagaggcacttatcaaatacctttacaacaatatagaagcattttaaaaaatgtctaataagtgtcttatggtgaattgtctctacagacgaagagacattttataaaatgtctataagatggtagaggcattttttagagacactaaattgtaccgcaaacatataaaaccagtccaaaaaagagaataaaatagtttccttgcttttgataagtcttgaactcgtgatcttttggttaaatcattctaatctttgatacactaaccaactcaactccatgtcattacttgtatacttgttcctttagttacttatatttaatcctttagtacacattatcattctaaaaatgtctctacatagtttaaaatgtctcaacaaaatgcctttatatattagacgcattttatagtgccgaaagaatgcctctacgagataaaatctaacaaaatgatataaaaatgtctctagagtaaaagttttctaggcaatttttaaagtgcctctataaagtgtctctacactataaaacttctgattttagaagcaatttacaaaatgcctctacaaaagtgcctctatacgaggtttttgttgtagtgccaatcccatctcttgatttaatcgaatcccactttctatttcacccaattcaagtgcttccataatcttatgaacaaaacaaaattgaagtggcgcttcttaccataaatttccttgactgggaaatcatgtggataacattggtttggacctttcagaatatatgcacgctgaactgcgtcttgttcattgacattatagctcgcaataggggacctcagtcctggatcatattgaagatgattagcatcatactttggaggtgcatcttgctattcatttgttgcctcaacaactagagttggctcaggctgtggctcaactagtggcggctcatcttcttcaatttgagcttcctcatcaataagatctgccctcttcttcgcctttgcttcatgtttccgaaaaagcgatgcaatgtctccattccttttcatgtctcactgtaatttgcattacaaattaatgagatactaagttataatgttatattgactactaactaagttgttgctaaaagaaaattccaagtttcagttttcaatcacattttttcatccacatttttcattcatcgatgaccgatctattcaaagtatatactaaagacaaatgagtaactcgccatctcggtcttcacagaggggcagggagcagcaggggagtagggcactggaggccggagagtcgtcgactcgttgagtaggagggagagggacccgactccggtgcaccgtcgccgccgtgaggggcagcgggggcaaaatcgtggccggctggccgccgccggctgggatggtgctgcacgcccgtgccgggcccgggcggccgacggacgacggctgccgcctgcaagcgcaatggccgccgacgctggcacctggcgcagagcgagagtaggaggaggcaaggagcggggagtcgggagaccggagggagaggtagagatgagacagaagcagcgtgatttgggggaggattggagtggcgggcacgcctgcgcggtgcgcctctcctctgacctctgtcgtcctaaccctagcctgtggtgggctttttctggtttgggccgtcggggggagggggtcctcctaggccaaaatccagggtggtccagggaccacctggactacccactggagccgcccatgccggtggagagcaccgtccttggcgccccggcgaacagcaagaggcaagatcctatcggtcgcagagcccggtagaggtcgacggaccgtcggtggaggaagtcggccggcaacggggttatccgtggtgtcgtcggtggcaggcaacgaaggcggaggtcggttgcagagcccggcggatgtcgacgcaccgtcggtggaggaagtcggccggcagcagggttgtccgtggcgtcgtcggtggcaggcgacggaggtggaggtcgaaggcgtcggcccacgcagtcacgtcgaagtcgagggagcccggcatagcctgtgaagtggagtcgcggaaagccggcggggcggacgacgtcgccgccagtcctgcgtgggaggcttgggtggcatcggcggcgaccgaggctacacgacggcggtggaggcagcgaccggcgaggatggctcgacgaggaccatggccgtgacatggccgcgacgaccggtagattcatgcgacgacattacagctgctgatgcttgaattgatgacgacgtgaggagaagatgcaggactcctggaaatcgatctctccaactcaacgatgacaacgaacgaaaaagatgaggccgccagaggggatcgggatcgatcttctcggcgacgaaccacgaacgaccaatctgggaactgaaccagatcgatctgatgcgaagacgaaaaaggaaaaaaaaggggtgaccgcccccgggagatcgctactcccggcggcggcggaggcggaagcagagagagggatgctagatcgcccgctctgataccatgttggatagtatagggagaggggaatactgcgtaaagtggattgattgtattgagcctcagggggccggtatatataagagtacatggggaggagataaggaaggattacagatatggaaggagttcacacaaatctgtcatatcctaatatgactttaactaccctatactctactccatccgtttcacaatgtaagactttctagcattgcccacatttataaagatgctaatgaatctagacattattatatatatagattcattagcatctatatgaatgtgaacaatgttagaaagtcttacattgtgaaacgaaggaagtaacactcacctctagctaagagtggtaatgggtcgagagactcatgaatgctttacaaccctatgtaaccctcatatattttaggtgaaaatgtataaaaaaaataattccatcatgctttagatccaatctttaaatttttcaggataaaaaaactcaagacaatcaccacacctacctgcggccatcgatgcatcccaaacaaggtaagtcgataatgcgccatggcgcacccttcctcattaacatttatagcctccgtcagggatctcccattagccacgtccacttcactgccgctcatggctcaccagatcctcctctgcaccggaacctagatgccccaccactttgtccgataattgatttattacaagtttaattctagattgttttaaagataattttaaaaggaatgaaattgattggcattgaaattaggagtagggtggtcgggtggagcttcatcaagatcaaagagtgtcatggcctcctccagctttaggatgttacattgaaatcccctctctttcagtgaagaaaaaaattgtattatagcaaaaaacaaaatgtataatagcctttgtttgaaaacacttttacacattagcccctcaggattgtagtgaagctcagccactgattagaagatttggaaaattcaaccataaaacaaagttaaatcagctgacgatccaaaaagaaaacattcgtcgacgatctttagggtctgttcggcaactacaaatataaaatactgttcttgttggctgcagtacagtaaaaaaaaatcgggattgctatatgtcattcgaataaaatttagggaagaaatcttacagattttggaccactgcatccatgccaagattcgtgcgtcggcttctctcctccaactccagcgggctccccttcttctccagcgccggcgacaccccaactccggcgggttagggtttggggttggggtgagagtaggaggggggttgggagagggggaagaggggggtttcctcggggtttaaagggatggcc

SEQ ID NO: 5546 - DNA, 3083 bp, Oryza sativa
tggttggtgaagattttatatggcatacgatggaggtattgtgtgcgtataggatgcggagtcgaatttgaaggagtccaaatttggtatgattggttatgtaaagtttgtttcttgtacgagaaggtttcctatggggattaggacttctagtatgagtttagttcgtggctttaggctgcctacctcatgtataaatagagagggagcgtgaggcttcccggtatcgcttttgagagcattgagttgctagtttagttagggtttcgagtttagttgagatttttgtaagaagtgctgttggtgcactttgtaaacacagagagaagcaataaagttgtcatctacttaaagagtttttcgatttgtgttttctcgggtgcagcggtccaaccggcaggacacctgcggtcagaccggtggcatcgaggtcagaccggcggagcaacggtggtcagaccggtggcagcgacaggagctggcaggcaatctcggcggttcgaccgatcgatctatatcggtcagatcgacgttcttcaggtggtcagaccggcgctgctactttggtcagaccgcgatccttcgaatttgagggtaacttttaatttcgcaaaaagtttgggtttttgggcataccaaccattcaccccccctctggttggcttagttcttgtgattcgatcctacatatactagtcctatttggttacagttggatttaaagttgtaataggtgttagcggtggagttagagtcccacaatgtaaccatggcgactacaatgtagcgtagacacgcagggagataatggaggcgtggccatagactcgtagctgctaggtgctatattggttgggaggagcgcccataatcagagccccgaggatgtaggcttcggctgaacctcgttaacaaatatcgtgtgttcttgtgtcgtcatctggtgtgtcttgggtgatcaatgactaaagcgatcagaaaggttagtcgtcgttccactatatcgaccaacttttataatagtaaatgagaagatgttgcttgagatgttcaaacaagatttttttaaaaaaactgcatcattcgttgcatgcgaaaaaatgtgcaaagtatttccatcacccagctctttctgagcgctggcacaagagatgacaggaaaagattctctgaagtgtaaagtaagaaatacagaacaatgaagcagaaaaacactcggtcaaaaattggaatttcttatctatctttctttacccatacataaaatattgctaaactaaatttgagtgagttctctccaatccagagcaaacacatcacataaagtaaactatatgtctatatactaaaaaactaaggagattctctgaattgtaaaaaaacaaatacagaagaatgaagcagaaaaatcgtagcgtgttccctcattgaaaaaaacacatgacagaaactacaactcgaatatatcacaaaagcaatggaactcgttatctgtactaaagaacttatatgtgcagaccgactcaaatatgaaagatactctcggaatccaacacgcgattaaactcctccatgagttcaacaatgttacctagaagagacacgatcttataattaaataagaatagtttactggagttttataggctggagggagatttacttggtctaatatgcagttacagactgtgagaattgccttggacaaattttttgtttatagtacttgggaatagaagcatcatttaactgtggtgggttgtgttggatactagagagagatgggttagcttcaacatgagtgtttttagaacatttaaaaaagatgatgtggcatataaagggataagttgatttctgttatttactgatgccttttcttaaaaagtgacttagcggctggttaaaaggtggcttagcggctggggagcaaataaggttagtaagttcagggaaaaaaagtaaggtgttagaacagaaattgggggagattgatagcagagctgaggagagagatctttttgaacatgagtagaaaaagaggtggaaagcatttatttgcaagaataaatttggtggcagaagagatgtggggagaaatggctgctacaaggtgatgctaatacttctttttttcatgaagtagctgatgggggactcagaaaaagacacattttctctttgcaatcatggagtagctgatgggggactcagaaaaagacacattttctctttgcaaagtggggattaaacaatttctgagtttaaggatatacaggagcatgtgtatagttactataagaaactttttggtaaggaagagtgcagaaatgtacatttggggtttctctttgcaaagggggatcaaacaatttctgagtttaaggatatactggagcatgtgtatagttactataagaactttttggtaaggaagagtgcagaaatgtacatttggggaatgtttggagtgcttttcttagattaactgatgctgaaaaggaaaacatgatcagacctttctctcttgagaaactaggcaaaaatataaaggagatgaaagctaatacttcccctgggcttgatggcttcccagtggggttttataaggactgaatttggagggttaatcaaggaaatgttggatgatttacatgtgggctctctcaacactgataggataaactatggtgtgatatttttattgccaaaggttgttgaggctaaaaccatcaaacaatataggcctatctgtttgcagaatgttattttgaaaatcttgacaaagacaatcaatggactcaaacaacattcattcctgggaggaatattcttgagcggtgtgtcatcctgcataagttgcaaagagagggtgacatggggattatctttaagattgattttgacaaggcatatgatagagttaattggaactttttgtatgaggtgatgagaaagaagaattttagtgattagtttattggttgggtgaaaaagataacagaaggtggcagagtgagtatcaatatccctttttttaagacccatagagggcttaggcagggggaccctttgtcccctct

SEQ ID NO: 5547 - DNA, 76156 bp, Oryza sativa
  unsure (1)..(76156): unsure at all n locations
ttcattaatatcaatatgaatgtgggaaatgctagaatgacttacattgtgaaacggagggagtacctttcactcttcccctattggtggtcatcaggtcttcaggcaacatttcagagaatcaagttatttgcttgtaaaggcttaaaaatgaatgttgaaagttgaaacctatgacaatcagtgcaatatttgccaacaaactaaacacagaaattgtaagttacctggacttctcacccttccaccagtcactgaaggttcttcactgcttggtaagatttatccatgaattttatagagggcttgcctcacattgagggatatactgcaattttggtagtggtagattgtttcactgaacatgcccaattttaccctctgaagcatccaatttcagcagtcatagtagcagaatttgtcatggataatgttgctaaaactcatggtattcctacattaatagttactgatcaggatatatagattactcaccagtaattttggaacgacttgcttgcgaagcttgatactcaattgaacctagtaccgcactccatccacagcctgatggacagacagagcggattaatcagtaccttgaaatatacctacaaagcacactccatgaaacgccaaggaagtggccctcttggtttcccattgctgaattctggtacaatacaagtttccacactaccttgggtagctcccctcacaaggcattgtttggcactgaacctagttgcttcagctgataatgaagccactgatatgctgacaacaagggctgcttattctgaatttttgaagaatcagttggctagagaacatttgagaatgaagaatattgctgataaaagcagatatctgctggagtttcctgtgggtgacaaagaatatctgaagctgcaaccttatactgaatcgccagtgtatatctgaggctggcaagctgcaaccttatactcaatcttcagttgtcaatatgtcatatcttaagtgggtctataaattctcggcccctatgatgttcttgctcgaaatggtccaaatgcatacaaattacaacatccagagggcagcctgatgcatccaatctttcatacttgtcagttgaagccacatatacctgatcacacacaccaatctttttatctctctcggatataattgaatttgatgctgaaaaggttcaagtggaacaaattttgtgcaggaaactagttaagaaaggtaatgctgctcgccttcaagtgcttatcaaatatcaagtggacctcattagctattttagcagcaaggagaattatgatgtccttgtgacaagatttcctgcagcatcagcttggggacaagctgagtctcacggcagtgttgcagctatactagaggcaatgggccagcaaggaggacgcaaggtaggcaggacattgaatgaagagttgaagacatataactgagagtgcgggtggagggccagtgagccttgtaatatgtgagaggtgctcaggccaagtctagctaactactagctggaatagactataaggacagcatgctgtatcacgtacgctgttaagcaatgaatgagggaattagctgttcttctctgcctcttccttcttcttcctcctgctaatccatggggatgtacagagcaggcactgaaaaacagatatgataatgaggtaaatcatcatttctaattagaaaacagatgttaagaaagcgatccacatccattacaggggaagggaactggctccaatcagtgctagagtggggacacatacacacacaaaaaatatgtaaaccaacctgaccaatttttgttgtttgggatggacacgctattttgagcctgactcattgaagagatcaaatcccaaaagaagacatcaaatatgaataagaatattcttgagagctcacttgtgtatagccaattgataatctcatcgcatagtcatttgtgatatgttgcttctctgttcctgtaacagcatcatggtgctgagcaagagctagagcatcagctaaagtatctgttgtgagatttaatttgctttccccttaaaagaattccagaagccaagatgcctgaaaagtgaaaagaaataagatattaagcatatggcaccacaaagtaccaagggaacaagaaaatatatcacatttaaattggacatgtgaaagccagaataatgaaaagggtggtaaaaccaccaatcatagcacggactgttgttttaaggaaggtcttcttgtgaaggaaccagtccaggcattcgggttgtccgcataccaggtgtaagaaatacagtcaaatgcatgtgaaagaaacaaagtgaaattacccataccaattatgaatatgaaaatagaacatacaggtagaaatcatttgtcttgagaggccatggctcatttaagcatattttgcatcagtataaatggaagacatggaatagagagcattggcatggccaattaagggaatggaataaacacgttgaaatcatcatatcacaagttcaagatatctgcattatgtaatgccatgactgcaacttcatggtgaaaccaaaacaaagaaactaaacaatagtcagtattagtaatattaatgatcatctttaaccttattgacataatgaattagtttgtccatcattctgaaccaactttatccataatgataaatcataattgaattttgaagtctgtatccattgtaatcatggcatggtttgtcgtcataatatttgcctagagaaaagaaggaaaaaacatgaattaggatgaatcattcattcctaagcagatcgatagcttcaagttaaaatgttgatattcagaaataacttttgagtattaaaagcacaaaggtcgatgtatcatggaatacagaacagcaaagatgcattctcatcttctgacaaacacatatcactacaacatccggaaaatccagtgtacattcaataaatagtttgcagttgcatcaatccatatgagactaatggatttacatgaaacgcacataagagagtgtacattggcatgaagaaaagcgagaatatttttggagtctaatgtacctgtgctagagctgcaacaaagtcgttcacccattgttcaacattataacaaaaaaagagggcatccagcatagaggcaagcaatgtagaataagttcaatgtagtatgtgttaactagagttctcattaaattacctggaagacaaggtaattatcatcaacttcgaaataaaactcactaggagatggttcataaatttttgggaagatatcagcaaaggatgtgtaagaaaatgtgcatatttcatatgaaatatggattcctagacttaataatataaaattgaggtgtaacatttactatcaaaaaaagagagaaggtttacttaaatcagctgacgagccgagagtcttggagcccctctcacaacctcgagttcttctgttccctttccgcgtatcactatcttggtaatcaacccggagaaaaaaaatcatcaattcctgcatgaaacataacaacatgtttgctgaaccatcccttttctattaagttcaatatgttagtcaaaacactggatgggcaactgttattccaattaacgaatgggttgtgttagactcaatagctatgttgtgtggtcaatgaaagggctctcggtggcgtcactctttaggggatagcaaggtacatatactgacattattatatctcaacataataaatatctatgacgggcaataagtgataacatagttactgttgtaacagcacagcagagttcaaagtttgtcttatcttgcaaactagctatatgatgaagtagcagtgcatcatatacaatatttgcgttagtttctgcccatgaaagaatttgactcgcattaactctcaaagcatagaagtgcatcatatacgacatttgcattagcttctgccatgaaataatttaattcacaactctgaaagtgaaagcatgatcacacaaatgggtttggcacattacttacgcacctaggcagtaatcctgaattgcagagtgcgaaattggatcaatctgccaaccaatccttggaatctgacccccaactactccttgatgaacctgtgccaaatcatagattcatagtcggtatatatatcatgttaatgtagcagtgcacagccgcctcagcatgcatgcacatagccccattcttcaacttcacaagaagcactgtgttcgctatagaatacagacatgagtggcaatgctaacatatagagtaaccaatggggcatgaaaggccacacattagttccagccatccagtgctgatgagcccctccaccgtatccttaatcatgggctatctccaccatttctgaaattgcctagaaccaatgaaaccattggtcaagaaaactcattatgtctacaagtagatgcacattgcttcctacccaaccaaaaaaatgccccccacactgcagcactaaccattttgggatttagtttcagtaacttcaaatcttagaactggtagccaggaaatggctgtagaaacatcaggaaaatagtagtactgcgctttctacacccaaattccaattacaaacagccggtgcaaattttacgagaagaaatcatgcccaacagaactaaactagcttcgctaaacccgtcaaaaacttctccacccaaaaatggggaaagaaatccaaggaccgcgcagcacgggcctgcacattctgcaagcaagccccctgaaccaaaaacacccagaaacaagaatcaaaacaatcaaccgaaactatgaggagaaccagatgattcgtttccaaagttcaggtaaaatttgacggggagaaaccatcaatcgtgcgtaagctagcttccccaaacccttcgaaacttctccccaaaaaacaaacaaagacgggggaaaatcgcggaaaattccaagaactgcatcgcgcagctcgctcgaaccaagtactgacctcctggatggagttgttcgaactgacgtggtagtactacgtcgtcgcggccttgcgggtgtggagcttccccttcaccacccctgccgacgtatggtagggatgtacacgcactccccccgggtggtgggcggcggcggagacggaggcagaagcggcggcggcggcggcggcgcgaggacggtggcggcgctccatccgaagcttctagaatactagtactactttagtggaggctttggggattggatatccgaggccgtcgatgacgtggagtgcgccacaagaagcagccgtggcatgggccccacctgtcggtgactgcgtgggtcccacctgtcggtgacgcgaaaagcccgcttataaatttacgacttcaccccccccgacctctctctccctccctttccctccatccgcaacggctaccaaagccagagcccagaagccacgaacgaaatcccctttccgctcgaatccccccgccgcagcggcggatcggggaagccacggctccttctccggccggccgtcgcctcgcccggatcccctccgccggccggaagccacggctcctctcccggcttcgcagcccctccctccgcctccgcctccggtgaccgcccggtgatcgatcggggactactccatcaactcgacgcgcttcgccttcctcgccgtcgaagcggagatggagccgatcaatatcacctcggttcgcgagttggaggaggctataggcaagtacggcgccggggagagcgtacgggtcaccatcaacgtggccaacgttttcgaggccgatgagctgcttcggctcatcggcgatcgggagctcgaggttcgttgggagctgagtcccgggggcatggatatgctgagatccgcggcggactactacctcaatctcgacctcctctacgagttcatggaccttatgcggctggatctgcgcgacggcgtccctgtcaagaaatcgttgttcgattggatccggaccgcctccacggatgtgcttacttcttctcacccatcgtcgactcgtcgcatcctggaacaaatcacgctggaggcacagctaatcgggcgagtggccaagggattgggcttcggggcggatgacgtgcagcagtatctcatcaccccgcacgaaatgtcatggtatctggaagaggatgcagttgcggtaagaaagaggagagcaagtttgagttcgggtgatgccgccacgagtgatgttgctgcgggagcgagtgatcctgtggagttgctcaaaaaccacaagcagaggctgctggacaaggttgcgcatctgcaacaggtgatatcttcatcgaaatctgccccttacatctcacagttagagcagtagaaatcacaagaactagaatgcatttcaaagagtctcacatggcatggtacgcataggccattagaagtagagctctgagtacaccaggatcaggatgcacttgcaagacttccacatgacacagcagaaatcaactagtagtacggctttacttcagtgtggagttgcagtttttcgtttgacttgactattgtaaacagctggtttatgtcaacaaataagaccaccagtttctggttttacttgcagaagaaagtattgtgcactgataccatcaagtattacattccctctgcatgtttatagttttggatacagaattagccacggaataaaaataaaaccatgaaacagatacagggaaaccttcttttcttgcatgcacattacatgtttacaacctggtcttagaatgacagtattgattgttgaagcgcctatcgtgtgaagccaatacatagcatcttgatacttgattgttgaagcgaggccaatagtagctgtagaatacagtggaaggacaaatgcataagtaaacacaatgaagtatcaggcaagacaaagatctgtagaaagctattctaggatcagaaattccattggcttggtgattgaatggtgaaccaatgaataacgatggcttatgtctgaaagattatttaaactcaggctcaccattcacaggtattaatccaaaccataaattatactgaggttttccgagaagaaatttacatggctatggcttagtgatccaacgattgaagaatttaatagtctttacttggaagcaggatataaagggaggaattcaagaggctcgccaagctgcttcactctcagcaagtaaaaaccatgtagtaaaaatgtaatctgtgaaaacaaaaacacaaggaactcttgagagctaaagaaaaacattttttccctacagagtacagacaacaaacagattgtactgaagcatatttctaaatattgtcacacatcttagcataatctcccaatattaagtatacatgacaatcatgtagcaaatgcagcaagataatacatctttacctatgggtgtacttaaaaaaggtcactagaagaactcatcatgataatgtatacaacatctgaaattttcatgtaatctccatgaaatgtgcataggataataatggattcttgaaataaatatgttacaaaatgttaaatagcagaagtatgcttgtcaaagctggatgaaaaatgtagcccacttttcccctagcaaatgcattgtatggtgtaacttcagttggaaagtatacccatgtatcataaaaatattagcatgtgatttcccagaaatgaaaacacaaatcaaattcaggaactaagtcgtcagaactgttttagatcagcaaaagaaactttgcctttctttactgagcaccctgagcttcaaaacatgaatggggaaaactattagcaactgacaaaaacacttactagctaattaaaggtaccagtaataatgcataagtacatcccttgccattgttgtttggtggaatgatattattcagttgaggacatagcacaaaggaactgatggctccaacaactgtaactttgacacatatcgtattctaaaagtcgccttaggcgttaggagctgggtagccaccatgattagaaattacctggtgcattaggcacataatctgccttgagggttcttgagtgtacactgaagactctgagagtgtgtatacaatgaagtatgtcctgcacaggccaagatgagagcgtacaaacaatggagcatgttttactaatattacggtacgatgcattctgggaacagatagtagaagcaaactattaatttgctaagaaaatatttaagaacatgggactcattgttcattgctgtttgctgaaatatagctccagaaaatgcatcagtagtaatgatgacgattttttctgttcacgtagtttcatcaatagattgttttttttttctctcttttgtactactccatacctcttgaggatatggatatcaaattctgctctactacattattcagaatcatcaccaccacatcaaaaaaaaaaaaggtgagttctttattccagtaggtgaaatagctagtacgtgtacgcccattacctgagattttcactaaaacgaacgatttggtattgatttaagatccctagcactagcagcagaagcatggagatgaagggatgaggtgggcacctgcctccaatgtccccatgggcgaccaaccaaccggcggtgatgactcccctctcaagagacgaacctccgacgaaaagaggggcgctgaagaagccgaccgaacacctcctcggacgtcgttgaggcggaggatgggagaggattgcggcggcgctgcggaggagtcgagaaacggcggcgccgccacacagcggccatcggcggcggcgattaattccacggatcccccaaccagcctccgctgctgtgtggccttcgtcttcgtaggtttttgaggtctttgggctggctaactgtaactgggctacttcggtttacatgggacgatccgtgggttttcgttgtgatttggctcaccacaactatttttttttcttttaatatttacagaaataatctatcgacgcaaaaaattacaaaaatagaccctgccgccctaatggagggtggcaagctgatgtggcagacggcgccatctgccgccgtctgcgaaaattgcatttagccccctaaagagcatttggctggtacttttttgcatctggaccccttgccgccctggcccagatgcaaaaagtaccagccaaaaagtaccaggcccgggctggcttttttgcatagaggccctgagggcggcaaggattgtcgtgcaaaaaaaccctccctctcctgtctgccgtcaccgtccgtccctcccctgtttgccacgtcagcttgccgccctctactagggcggcagggtttatttttgtaattttttgcgccgatggattatttctgtaaatattaaaagaaaaaaatataaaaatgaaaaaaaatccaactagtgtgagtggatcgatctataataataaatctatttatagattaaaattattaggttatctactcgtgggttggcccgcttacatatttaggtctgtctacgtaaaaatgtaagaatcaataacaaaatttgtgacacctaaatattcagtctcaattggttcggtgaaacatattgtgtgctagctaggccattggtcgattgaatatcaattcaacaactaggggtcaggtatatagcaaatgtgctcattttaatataccacgcaacacactcataaaaaccgaaaaacacttgacagacaccgcgagtgacccacatctttactaacacagctggccggtccaccaagcctaaacatcatcgagtaaccgaccacatgtgtccgactaaagaatcgtcatcaccaatactggcatagactatacctccgtcgcttcctccgtgacaactgacaaacacgccacattaacagtcaatagagtatatatgtggtagttataagaacaggattgatttgtttaaattcttcttcttctatatattcttattacattccttatctttacccaagagtactttaatgtatataatgtttctaaggctcaatacaatcgtttaattatgcagtagtatttcggtatcagagcagcaacctagggtcaccgttactttatgctttttcattgttgcccttagaagggaccgtatcatctgccattccagttccaactggaatggcagagggctacagtgatccatgctattggccacttacatccgtcggatcaagcgtggacgtacgagacccgtcgctacagtaattctaataaagtaaccgattgtccgatgtttctactgttcctctttgccatttaccccctaatggcagaggatgcgaacccatctccctcggggcaaccacttgtttagtcttcggctttttcttgtgtcattgtgcatcgccgccagattgatctagatcccctcggacgagtcttctcattcgtttatcacgacttcgttagcatattcaagcaaacaacaattgccatccatcctcgttcttgtcattgcattgaatgaggcatggtgccatggggtgggagcgacgctagggtgcactgcgataaatgcaaccaagggctcgatgtcattgttggagtagctacatagattcttagggcgggtttggttgcctacatcaagcttggcccgcatctgtagatgcaacttcctcttgtttggttgcctgtgcggccttctcagcctggccccgctgatgcaaaaagggcttcccagccaggctgaggagaaacgctcgattcgagcttccgagcgcagccaggcccggtggctacagcgggttgcatccgcgggtgcaaggtatttctaagtggtaatatcaaaaaagaaaaagtatccaaagctgcaaaccatgcaaccaaccaaacaaaatgtattccaaactgtacatttcatgcaatcaaccaaacagaatctcctgctagccaggctaaactgatgcaaacaaccaaacaaccgcaagtgcatctcctcggtcaggccaaacttagcctggatggaagagatgggccaagatgaggggatgcaagtaaccaaacacaccttgtacccacggccggggactcgcctgctgctttcaactatggctttatggtgccgcttgctaaatctagctatattcatggagaagatgagatgaaggaaaaaatacatgaacaatttggtctaatatatactccagtgttaaaatataagttataatgttcagtttcataggtatatatggtgttaaatttagtaatagatagctacgtgttaaaacggaaggagtatggactaaccatgaaaatataaaattataatggcatgacttgaataataatgatatcttttaaatggctgatattttttaaaacttaaaacttataatggcatcaatataattaactcaaccagatgaccaacctacggattatctacttaaggtcaagcctcattgctctctgggaccgacaggtgggtcccgatgaccattgaccactggcccacatgccagtgagtgtgtgcttctggtttcccattttccacttcgtcgcttcgccccaccctgactccgctccagatctccccgtcgcgctccgctccgcctcctccgcgtcgccgtcgtcttcctcctctccagccgatgcctcctcccaaaccctagccacctcgcaaaaccctagatcccctcccccccgccccaccacgccgccatggatccctccggatccggccctcgccatgaccgcctcctcatctccccgtcgctctcctccccgtctgtagagatggtcgcgattcctccgatcgcacgagggtagggggaagaggcgagcgctgccaggggaaaggggacggtgaagaggactgctcagcggactccatttgttaatccgatctctaatttgaaagaactgtatcttttccgattaccggttttctgttccaggtgcaattctaatttgttttatctgaattatcacatggaatcgattccttaatgaactttccaactgaaactaactgctgctctgagcaatcaataatttagttactactaccaatcaggttatatatataccatggcattcttgttttggttaacgatctctagctgacaagattctgtcgttgtgattcccgtgattttctccaagtcgaaggtggttaattactgtatcgacttgggcagtaatctgcaaaattacaattttaccccgccctcatattttttttttgacaattatagccctccacttttctactgctgttaagtgaggtggtactataaaccggtggtagtataaaccgatctaaactcttgaataaaactagatgtgtggtttagattgttttctactgctagcagagagcaccgtagtgggactctaattcataggctaaagaaaatttcacaagagaaaaatgcaagaaataaaggtatcgtgcacatttctactccagcttgctacctccattcctaatagagcacaatggtgtattttcaacacatacatcacgatgttgtatcaacacccagataaacaagtcacttgcaagttcaattaaaagtttattcattcaaaattcataactttttaccaatacaacaaagaaatcagctttacacattgatggaaatgatagatatagaattttactctgcctaatatatgtaagctcctaaacaaaagctaggacataagttaagtacatgccatcacaagagagaaaatagcatacaccacagttgaacagtttgaagttgagtatatgataacaagtgacattatgcatactatagcctagggcctcttgatgtttccacaataactcgtttcctgcaaggctcaataacctcgaaattaacagttgaagggactttcccttcgatatatcttctaataacttgtggagccctatatgcttctattagatctgaatcagacatgagcaactctctgtctaactcagattccatccgatcgtccgtagtcatcataatgccacagtcccaggatatgaatctcctaatttcgtatttgaaaccatatattctagtgtccagcgtaaggaactcgagtgaaggcgtgttgtcaagaatgtgacttatcaactcaactagggtctttgatgacatcagtccagtgatctttacattcttcaggttactgtagttgcatttaggaagcttcctcaattccgaggaatcttcaagaatgcgatcattcttagtcccgacagagtccaactgcataaaaatattgatgtaacaataccacaggtaaataaggttttgaaagtatcagttccaaaaaaagccttgttgcagttgtgatatatcaaacagttaaccatatcagtctatgttggtaaaggttatgttttcctaagtttgagctaatgcttttaacctttcactgtagctagctttgagacataacaataaacaatgacttacatgtaagacaaaagtttccaaggctggggaagcgtcaagaaaaaaaacaagagaaaaaaaatcatagcaggggggtgattcctttctcggtccaataaacaccatctccaagtacctgaggtagagaaatttattaggcaccatgggtgtgttgacatcctacagaaaatacatacagaaaaaaaattagtatcatatgaaggaatgacaatgatatgcctacatcattctccaataatttgaacataaaaagtactattaactagttggcacatagaagctcaaacaaacctcatcacgagtcattagaaacagattttcaacattacgggcaatggttggaagcttggtacgggcataatggaacatgcggtgccaagggtagagcaatagatttacatcccttaattgtactgcatctccgagtgatattactgtcagtggccctcgataatgaaaactagagagcattggagcatttatctctatcatatctaacctatggctatgctgcacacgcagacagttgagcttttgcagcacacttgttgtcttgaggaaaccaatcttgcaacaggaagagatttccaaactctccaaattgaaagaattggagatgaagcatgccaattcctccccagtaatgtccacccaactcaaatgcacactcttcaagcttctcaagcactcaaactgaagtgttggatggagcgtgcaggaagataggtggaaagattgaactgaatttcctctacggttatcagaaagcaaatgtgaatatgggaaggtgtattctgtcttgttgcgtaggggaagctcaaaggcgaattccttgattttgagtgtgctagcagccttaagccagcgatcaagatgcgagggatgcactgcatagccaggaccaagttcaagcttgaatatcttcacaccaacgcccgagtggtttcgcataatgttgtccactatggcgatgaaatccacaggtgtctcattgtcattaacaccttttcggtttagcgctaggttttctgcattgaagatgaggtttggatagcatctccaggaatgtagaaatgcatgagatacgcatgcagcacgggcagcgtctcgcattggcacatgggaaagtatcatcagcaggagatcctgtgcaggcatgggaaatatatatctttgatattagaatgatagtagctcttgttgtaaaacaatgttaccagtaatggtcactttttttggaacaaacaaacagtgcatacaagtgtggagtcaaacatggaatataaatagagcagatgtagcttgaaactgcaaatccaagactcagcaggactattggcatattgtattttgtcgaattagtggcttattcattacagctaaagtgattccacattttgttatatcattgatggcttccattgaaacaaataaacattacgccaatcataaaggtgtggagtcaaagatggcatataaacagagcacaaaaacataactagtaaaaaccacaaatcttatgcaacacaagacttaacaagactatttgcatattacttttgtcagattaccagtggcatcatcaaatattttattgtacaaagaaagtgtctaatctgtctaaaattcgaaatgtgcaggcaaacatgaaactatcatataggtatttaattaatttccctgttggacacttctgttgttaatactttgtacctctggaagggaaggaatatctagtttcgttgttttgtcacatggggaagaatcatctcgttggagaggaaactcctttctcttggttgcaacctttctttcagcttgtgaagtgctcgacccgcctgcaattcagttatgtcataatcagcgatccaaatactggtggtgaccaacaggtaaccaatctgaactcggtgactggtaccggaacaaaccagccaatttgaatataaattttaaaatctaaactatataccatcatattgttatagtctcatgcatcatattccgtatattatgcctcatgtccctcatcagtctattcaacataagctggtgatactattttgttaaaaaaaaagaaaagaaaggtgccatcccgaaaattttggccaaatttctgaatatcacttttgtgaagatataaagaacgaaaacctaagaggtcacaaaaatagttgggatttcggccaataaacaattaatctaagtttgtgatcttgaatgttgtagcactttgccctaattgtccgctaaatcaaataactggaagtgtaggtcgaagggatcagaaaccacacagagagagaggcagaggcatacctacccgcggccgccaccgccgccgctgtggcgtggataggtctatcatccccactccccaggcgaggagtatctcctcctccggatgaatctttgcgagagaagatgacgagaaggaaggctctgatctgatgaatccattccggatcccatccccacccagtcccaggattgaccacggtcactgcaggtgggccatggagtctgggcccactagtacacgcgtggcctcttctactaggaatttttttcgtttttagattttttttttaatatttacagaaataatctatcggcgagaaaatttgcaaaaatagaccctgccgctccaatggtgggcggcaagctgacgtggcaaacgggggaggaacgggcggtgacggagggtgggtattttgcatgaaaacccttgccgccctctggtggggcggcaaggggtccgaatgcaaaaagagccgcagggggccggccattttgcaggcggccccttgccgcccactagccgggcggcaggcctcgctgcctataaaaggcctgccgcccagcccccagccctcatttctcacctctcaactccagtgaaaaaaaagaagagaggggaggagaagagaagaaggggcgaagccctgccggattcagacgccgatttcaggtaatattcgtatatcctatatgtgactattgagttaaatagtgtgtatttttaaaaaatttgtttgaataaatgcattatatttttatggttttagttgtactaatttagaagtgtgtattgtagatatcggaacaacgtagatctgctagtttggaatcaatactttaccgttgcattggcttacacaagaagatattacgttgtagatgtttattgcatgaaagagtaatatgatctagttaattcgttgacagatatgtcgaacaaaccaatattccaagtttaccatagaccaggaaacgtccgttacgggccaactggggtagatctgtcagattttattgtatcagaaaggggaattgagagaccggctgagaggagtgtaccttctataaaaggatggttaatgaggggcttgaaagttgatccacagacaagtgacataacaatcaatgttatagtaagtcgggcaactgagggtttttattgggaactaatgccagttcaaaactctcaagtgtggagatggtatgtggaaaatgcaatgcaacgtgggtggcctctagctttggttccgtttgtgcacccgaaggatccaggtgtgcagatgaacatggatgatggcgagggaccaagcgctgaagtaaatgagacttctgtggaggaggtcaacgcaggagtggacaggggcgtagtagctccagtgggcattcaaccaggtggagtggccgacgagggggagactgtcgcagccattgtggatgaaatggagagggaggattctgacaacaagcgtgtagaggaaggtgattcgtcagatgaggagacggatattaatccagcagaatgggctagtcaggatttttctgggctgatcgtctctgaagaggatagtgtgagatgggagtacaaagaaaatgaggttattcagggagcgatttatagtagagcagaagatatgaaggaggcggtaaaacattttgcagtgtcacttcatagagagttttgggttgccaagtccaaccggtcgcaatatgaagttcggtgtgttaaggaaaaagatggttgtccctggagagtgcacgcgtataaggggaaatggaaggattattggacagtgtcagtcgttaccaagcatacatgttttctacctggtgttcagaaataccacaggaacattacatgtgcatttgtcgcatctgagatgtatgcgcatgtcatcgataatctcacatacgaaccaaggtcaataatccgacacatcgaggagacatacaagtatactattagctatgccaaggcctggagggccaaacagaaaataatagagatgagatttggaacatacgaagcctcgtatgacaatttgccacgcctgcttggtgttatcgaggaaagaaaccctgggagctcttacgaagtgaagaaattcccatcaattgaacatcctggcaagagtgtgctgtaaagggcgttcttagctctacatgcatgcaagatggcattcgtgaactgtcgtccagttctctgcattgatgggacattcttgacaggaaagtatcggggccagatactgacagcaataggggtagatgggaacaatcaggtattgcccttggcatttgcttttgttgagagtgagaataccgacagctggtactggttcctgaaattggttaaaacaaaagttgttggtatgaggccaaatgtgtgcctgatacatgataggcacactggcattctgcgagcgatagaagagttgcagtttgggagcatggaacgaggataccctggtgtttgggacgatgtacagagtaggtggtgcatgcgtcatatgggagctaatttcttcaagcaattcaagaacaaggagctcatgaacatgttcaagaggctgtgtaatcagaaccaggagaaaaaattcaatgagctttggaagagattagatgagttgacagccaaatgcagtgatcagcgtgcagcggctccatcgactgccgttgatgaccctcctcaagctcttggacctctcccaacggatagtccaactttggttagaagaactggattggagattcagaaattttctcagtggattctgcatgaaccaaaagagaaatgggctaaggtgtatgacaccggtggtgctagatatagaataatgacaacaaatttggcagaagtttacaactgggtgatgcgcggtgtccgtggactgccactagttggcatagtggagttcattttacatgggacatgcaggtattttagggatcggttccaggcagttcttccctctatgccgaacaacaacattttgtttggaactttcatgcagaaaaagctagaggagttgcgtaaaaaggccatgaaacatcgagctctagtgcaaggtacccaacaacataggttcgagatactatgtcaagataaggcaggcaggggtatctaccgcaagagagtgaagcaggagtgtgttctcaaagccgacggcacatgtcattgctcttgttcaaagccgaagctgctccacaggccatgcacccatgtcattgctgccgcagcggagtgtggcataccagatgcagtatatgtgtcgcagtacttcagtaagcaagcaatatatcatacatggagcggcgagatttacgggttcggcatagctggggagttcacagagactaacgatgaagtactcaatattcctgacccatcgaagctccgaggcaaggctggaaggaggaggactcgtcgcatccgcaacaatatggacgagtcggaggctggcagggtaaagcgttgcagcaaatgcgatgaacgtgggcacacctataagcattgtcctaaagacaaggagaaaccaagtgcggcggaggcaggactatcaggatcagcagtagatggagctcgccctacgggtgaaggcactacctccactcgaccacgtcctaggcgtcgtcgtgccacgtctggctacgtggtgtagttcttatgttctatgttggcatgtgggtttgcttgtaatttgtttcgaacttatcgatgtgtttatgtttcgtcgtgtaatttcagacttcggcttgtcatgtctttaggtctcgtgatgtaacgtcagactaaggcacgtagtgtctttaggtatgctgatgtatgtcggacttcgacacgtaatgttatgttatgttatattatcgaactctacatatatgttaaattgcacgtcatcgttatgtaccattagtaatgtttgctttatttaaataggctgtactcttattgtacgtaattattctcatgatttttttactatttcattaatttgcgagtcatcttttgttttacattactactttttgaattgttctaacacgaaacactatatttttcagagatggcacgtcaggatacacctcagttgttggacccggcgatagatcaccgacaccggtctcaccttactgcggtgcagggggctcagcttgggacgttccgggcacggacgtgcggtgagctactcacggttcacgactcctttgtcgagaggtacgaacagtgttttactataagttagttgcactgtaatattttttataatgacatattaatttgttattgcaggctacgtgaggccggcctcctaccgatgtgtcggctggtggaggctgcggccggcgacgcggacccggccagacgatggactgtggacaggtccctcctagcagctttggtcgatcgatggaggccagagacgcacacttttcacttgccgtgcggtgaggtagcccctaccctacaggacgtatcgtacttgttggggctaccgctcgcaggagacgctgttgggccagtgaccacggctgtggactggcaggacgatctgacggcacgtttcgcactagtacagcgcgcaccgcacctcccgctcgagccgttggcacaccaccgcaacaccggacctacgaagaggtggctgcttcagttcaccgtgagtgtttttgtaccgaaatgacaatcgtattatatatttagtccgcagttaaggtgcctaacattttatcgacggcttgcaggttgagcagctacaggcggaggccgacgagtactcctacagccgatgtttggaggcgtacttgctctggctttttggctgggtgatgttctgtggcagtcacgggcacgcggtcgacaagggactcgtgcactacgccaggagcatcgccgacgccgcggtaggcgaggtgcctcagtggagctggggttccgcgttgttggcggctctgtaccgtgcactttgtgagtcttgcacgaagacggatcccagcgcgacctttggtgggtgccctctctttctttctatctgggcagctgagaggattgcgatcggccgccctgaggtggaccagcacgcgtacgaggagtcactgtacgaggagcgaccagaggtcgactaccctacgatgggtactctgtggtgccgtcgtcaggtacgttgcatcgatcttatcgtattgttaagttaattgctaagttcattgtacatcacatcgatcgtctcgtattgcagcgccgatgggctcacgtccaggttaggcggtcgtatcctgagtttgttatggagttcgaccgccttctgccgactgacgtcgtgtgggagccctacagtgccgcggctacccaggctcgtgcgccgttgggtctgtccacactctgcaccagggaccaggcgtactggatgactacggttccgatggtcttcgacatctgcgttgagcctcacgcccctttccgcgtaatgcggcagttcggcttccgtcagccctttccagtatcgtttccaaccaccgtcccagctgctgttcaccggtaagatcttgcactacgctttccgttgttgcattaaaatctgcctgttcacaataatttgtaacatctgtcgtttcacactaatattacacattaatttgcaggtactcgcgcaagggtcagcatttagctggcgactggcccgccaagttggcgacttttgttgaggactggttgctcgcaaccgaggaggtcgtggaccacgagggagagccacacactgaggagtcgtaccaggcctacctacgctggtaccagccacgcacccgtactagggtcaccttcgctcccttggagcagcagccccacgttgcgagcactagagacctctacgccaggcaccgcgactaggacttcgctcgtgctgtgagtaccctgcatcgcaccattcctttatgttttcatgtctttctcttcgtcaaattttacgaatatttacgaacaaattaaccatgcaggtcgacgacatcaaccgggtcgtcgttgacggttcaacgacgatccaacgtttaggcgcggggattccggtacccgtagaggagcacctgacgacgtacacgcggatggtggagtcgatgcgctcgattctccgagtgctcacctgtcgtgcagacgacgttgctcgggcagacgcagctgtacagcggccacccgtaccgactggtccccatccagctgcgcacgttcctaggccgactccccctccgcacggaggtaagtatttttattactatttctgtacatgcctcgcacatataagtgagccgtttcacttgccgattgcttcagggtttcgtgcaccgttcagcaccccgccttcctcggctaggccttctgttgtgccccccacaggtacttaaaaaaacaacattacttcgacaatcaatttacatacattttatttcttagcttacaagggtcccgttgtcgatgtgtaggtttcgcccagttcgctatgacgcaggccgcccacttctcccaggctgcagggtcagcgtctcaggcagctgcgtctcaggcagctgtgtcgacctcgcactcagcgcagttctggcagtacaccgggacttcgtcacaggtagccggcacgtcgagtcagggtccaccactggaccatgctgggacctcgtcggaccgcttgctgccttccaccttcctcttcgacatcactgacttcgacttcgcttcaggctcgacaaaggacgtcatcggcccctcacagctgggaggcgcaccgccggtgcagacgcaggaccaggcgcaggccactcctccgcgggacactcgtgctacccgtgctgtgccaccggatcgtttcaccttctcccaggaccacgtgcgagcacaggcccggaggaccaagcgtggtcgcggcgcggggcagggccagtagagcagtcttctctttgtttacttgcttcactttccagtactgtatgcttgtgtaatgactacgttgttgttatatgtgcacgatacctttcggcgcatgcacgatacctttcggcgcatgcacgactactttctgccgcactgatgcagcctcctttattcgcgtgtgatacgagtatttgcccgccatttggcgcatacgaccaatgtaactttcggcgccgatcatgcatgtatctttcggcgccaatcaagtgtaaccaccataccccaccacgttcacatgtcaggggcatattgaaatttctactgtcatgcttccttgtcccattactacatcgtcgttgtgttcaactattgcactacctccctcctagttcgaatctaatatcatctatgtaaccgcaatgcaaatagttgtatcatgttcaaattgtactactatttcttcatgttacataattctccttgtttaagtccatataatgtttctacgacccagactgcgataggcctatataaattatccgagtactaatacgtcgaataaggtacaaaataatacctcacttaacatatgaaattgcgcaacaaccaacttcaatacatttttataacaatattaacaagttttaccaataaatacttctttatttattattaacataacatagaaaaatcttttggccgtacttttttcatctaggtcccttgccaccctctattggggcggcaagggacccagatgaaaaagtacggccgcaagctctttatgggcggccaaaattgcaattagccccttgccgccctctgtatgggcggcaagggcctaatcgcaattttggccgacggcggcagacggcgcggtcgacccaccgtctgccacgtcagcttgccgcccaccatttgggtggcaggggctatttctgcaatttttttggtcgatagattatttatgtaaatattaaaaaaaaatctaaaaacgaaaaaaattccttctactagtactaacaggtgggccgtgggccttgagcactggagtactatactgctccggtctgcgggccccacctccatccgtccgtccggccggtgacaatgcctcccaaaccggcagtgtttggctaatgggatagggaaaatgatttcccacccaccaaaagacatctttaaattctaaccattcatttctccttttccatttaatcttaaccattcatttatttcccaatcccaataccaccacccatttcccattatctaaacacaccctagaatctagatccacagccacggcgcggccttcctcatcgatgttgccgtgactcctcgctctagcagcggccaaggttacaggtgttgtagccatcggataccctgttatggcgtgttgccgtttgcgtgatagcaatatctttctttttttttcttcttcttctttttcttcttcccaaatttatcatcaatttagcagtactgacaaagctcgttttttgctttatattgaactagcagcatatatgaagtatagtgaaccaaaggctttgccttggaataatcctgatggtctatgctattatagcactctgtaaatttgtttgctaccctgctagttgcttctgtacagttgttcagactttttagtgaactctacctgaaaatcaatgtcagtactagtaataaattggtggaggggattattctcgaatttttatttttcacatgcttttagctatctgtcgaccttattcattatcccatttgttgtgaggtgatacttggccattttataattgatttcattctgttcatgcattcacttggtatttggtatgaatgatctaacttcttatcttgaattggttatgatcttccctccataagtttgaatagaattgggaaatcattgggtaacaatagtctttcaaaagtttctataggaagtattgttagcaatacctcaatcaccattaactgttgaaatggtgataccaatatttcaatcagcattaattctggtgttgtgatctcctgtgaatggtctccaactatgtaattcgttttgacctgactttatgcaaaatacaatgatgtttcagttacatcagggtttcatagtatgacatgttttctgaaatctgaactgaaaatagagctttgtagatctgaaaatagggtttacatcagggtttcatagtatgacatagtattgtaaatcatatccatctgttggatttggtgttaggttttagaaatcatagcagagtttggaaatcatagcagtgtttccttttaaaaaggttttagaattgaatctacttgtaatttatattatcatgtactacatgatactaaaatttattttagactgcccttctattctgtttgcacgggctgccctgcttcaagtgccattagttactgacaatgaacttatagatttatttctgaagttttcaaatataatggttggatcctcatggttaattttgcttcccttagtacatgtctgaaattgtcattttaattaatattttcatcaacgaaagtatcatcttagttatttttcatcaatgaaaggatcattttagttattcacaagtgttttactattcacacccccccccccccaaaatcccaacataagttttgggatggaaggtgtagctgtttagcataaaacaccttcgtaattaaatatttaaatccaacgacttggatatctgttcttttttcttcagtcagactatttgttctgttgcttatgtttaggtattgaatttattgcatgtcaaccttgcatgttattttggagctggcagtgtttcagtgtgggctgcgctagcggtaacaaattgaggcaaactctggatagttctaccaaaaataacagggatcaaggtcgatggggagataagctttatcttcgagagcgaaaaagcctagatcaggcccttaatgactgttcagtggtaagagaggtggggatgcaaagacagccagtaggtttgctagcattgattctttttattatttgtctgcgatcagcagaaagattcctggtgcttgactgcttgttgtggccagagggcttcttttttgttattgtgcagccacctattaaactttcatcggtatagcggtcagaatttcacaacagcagttctatgggtcagagtatcacaacagcagatatatctgttggctacacttcaatgtatggttttatagcatccaacccacatgaccattatggctgctcattgcaacggtggtgcttatgttaacaccagttacataagttatccctgtgaagtatgttgtcgagttgctggcttcttatgcattgggggttggagtttacacttggcatctccatatctgtttcagtacttcatccaggcagttgttccatatcctcatcttgttgcaacaatcgtctctgctgctgtctttctcttttagtattcacacatctgccatctgggtccagcacaatggttttccatgtgtgttctcttcttgatagcatcgtttccagtcacatcttcttaaaggacatctaagagcaaagagttttgcgggtgatcatgaagcaaagaagttcaccaatatgttggctatagaagaggtcaaaatgtcagtgtttggtctctatgctgctgtaagtttcaactatggagtgtggactaggtgttatgcatggtgcacctggtcacagcttggcttttccaccaaaaacaagaggtcatgagcagaggtagcttgaatgcctgcgattcgtaacttttctattgtattatgtatcgtctgccttattctcagtataactcttgctagtggctcagaccatgctgtttttttccctggtacctttccttctgcttctgaaccaggattgcggacttctttgcagggtttgatgctgtcagcattcctgttaacagcattgtatataggatatggagacctaagactagcaatggagggtgggcacttgatattgggggtcctaggctggctggctctttgctatgacaaacattgcccttctcatgctgccgttacctaatgctaatgtacatttcgattgcttcatttgagattttatatatgtcaggcagacagatgcgaattgtgaagttacttctgatgctggctttcaacaatgccgccagttataatgccacaaacatactatgcaggtaataggatttttaattaggtgctctttattctctagcatcactatatcgtggtgggtaggagtttctgggataaaatacatttaaactaggagatgcaagttcagaggtatgtatattttgtcacaattgttgtgaatagaatctctagcttcctgaacaactgaaccaaaaaaattcggtgctttcttgcaggctttcagtcatacaacagtgattgctttcttaggttctggcagcatgaagtcatcttttaccgtgagttgggagcagaattgtgcaacaatcgccaattgtcatcacttttgtactagatgatctttctactggactagtggtaatctaaggtgttgacgtgttgtgtagcatattatatccctaaaatggtaccgaactcaactcatacagcacatcaccttggacttgtgaccagacaacatcgtgtcgatatgttctttattataagcctcaccaggaactgaccatgcgaatctgcattggtttgttgtcaaagtgactagtaattccgaaatgcagtgtaatgttctccaggtccaggagaccactttttgcttcagaaactaacccagattgggaggacatgtcgtcggtagtaaaattcgactcccaactaatagacccactaaaattcaacgaactggaacaacaatcggtagctgcacagattcgactcccaactaaaattgaacgaactggaacagcaatcggtagtgaacagaaatcgggatcagagcttacttcaagtctgacaagaccaccttgtcgtggagagtggcctcgacatcatggatgagcgcctccaggtaccaacgtacagcagtggcgcggaggtgggcgttgcgcgcgtcccaggacacgcgattcgccaaggagaccagatcgcggaactcctcggcggtgacggcgcgccccgcggctgggagaggttcgccgaagcgcgcctcgagcagctccagcccgcgcgcgtggctgacgaggtcggaggggagcacggcggcggcggcagtgacgcggtcgaggatccgcttgaactggagcttccgcttgttgaggtccttggacatgtccgacgccttgccgagcttgtccatgccgacgatcacccagcccatcctgcccctcgcgtacccaagggaagacatccgaggcgtcgacgaggcggtcgagctcctggacgacgacgcgggccaagggcggcgggtggtggccgaagacgtcctccagcgccaggacgtccaccatggaggtgacgaggaagtcgttgggaccaggtgccgccatggccgctctccttgctcgctgctcgggctcggatagaaggcgaggggaaggggagggctcgggctgagagggaggcaattggggcgatttgaattttcggtttcgactcgccgcctctaccttttataaagtacagtagtacacgatcgaggtggagaaaactgtggcggattcgattatctttttttagtggaatggcttaggtggtgtttgcataaaaggacttaacgcatttagatattaatttagagtctacttacaaaactaattacataaatgaaaaactgcttttgtaattacataaataaaagctaatttgcgagacaaatttttttaagcctattaatccataattagagaatgtttactgtcgcatcacatagactaatcatagattaattaggctcaatagattcgtgagagagaatgtttactgtcgcatcacatagactaatcatagattaattaggctcaatagattcgtctcgtgaattagtccaagattatggatgggttttattaatagtctacgtttaatatttataattagtgtccaaacatccgatgtgatagagacttaaaagttttaattacatctaaacagagtcttatactactcattaaggctatgtttaaggtttccttcaaatttccaaaaattccgtcacatcaaatgtttgggcacatgcatgaagcattaaatattttcgggaaaaaaaaccaattgcacagtttacatgtaaattgcgagataaatctttgagcctaattacgctatgatttgacaatgtggtgctacactaaacatttgttaatgacggattaattaggcttaatagatttgtctcgcagtttataggtggaatctataatttattttgttattagtctatgtttaatacttcaatgtgtattagtatacttaaaaatttttacacctcaacaactaaacacggcctaaattagggcatgttttgatcccctggcaacattttttaccctgtcatatcgaatgtttggacacatgcatagattattaaatataaaagaaaaaataactaattacacagattgcgtgtaaattgcgagatgaatcttttaagcctaattgctccatgatttgacaatgtagtgctagagtaaacatttggtaatgatggattaaatttttttaatgccgtaatgatggattaattattttttttagggaatgacggattaattaggcttaataaatttgtctcacaatttacaggcggaatatgtaatttgttttattattcatctacgtttaatactttaaatgtgtatccgtatatccgatgtgacatgccaaaacttttcacccctatatttaaacaacccaacccagatcatcaatttactgtttaaaaaaaacaggagtacaatatattccaagcagcaaaaccaactcatgcgtgaagacatcacaatatatatcacccaatttgagatgttagagtatatgatagttagagtcatattaggataggattgatttgggtggcctccttctatatttgtaatccttccttttctccttctcatgtactcctatatataccggcccttgaacctcaatacaatcgtaccacgttacgcagtatacctctccttctatactatccaacatgatatcagagcgggcaacctatagctgccgctcacgcttctgctgccatcgcccccggttctggtctcccgggggtggccaccgttttttttttcttctctcgtcgagtcgtcatcctgagagatcgatctctcaggcatttgcgtagtcatcaagcagcaatagtagcgtctccggtcgtcgtcgttctgcccgtcaccccttccgcgttcggcctcgggactgtacccgtcacagatctgtgccgcgcatgtcgtccgccagcgtccaccaaatccaagccgtcgtcgacgtgcggaacttgctccggcgtgacttgttgacggtcgttatccataagtttcgatcgtcaatattaccaaaatagaggagaactagtgatacttgcaatgcatatgtttgttagaataataatattccactagtattaggtatactaaccttttgcagagaatgacaataaagtggaggagaatcgacatcagctcaaacgataaattaatcggacgatgtcgagaaccagacttaagtatgaatgggccaagaactcagaattgacgtgacaaactgggtcagaattcacaagtctgcagagaagaacaacagagtaggtcaccagccgaaattgggctggattgggccggccccaggttcggctgaaccagggggttcggccgaaccctcctcagcgccatccgatccagggcttcgcctgaacggtgtggattagcccccaatggcggttggagggaatttccgaccattccaaccgtcacaaccgtcattgggaggctataaaaggagtttctcattctcacttcactcacacacctcaagcaatagctctctcatttctttcaagcttagtttagtagtatctatctggtggaataggaatagagtagaaatcaggagtccgaaagccttcgggagagttcgggtatggctctagtagcttttctcttctcttttgtaagctttgtatttttattagaatactcttctaaatacatttatggtattgaaatactttccgagtatatgaatgtctactttacattatgttcatgttatacttaatatatggctagcttatctaggaaatactttggtgcgggtataatgtttgcttatgcaattactctatgtcatgacaatgatattagagtagtatctggtagtttaggcgtggtgtctagattacgggatatcattatttagggttatatattacggatgagaggtgggccgctgatgctgacaactcagtacgggtattccttcgccccggtatataatcctaagttaattctctggggaggatattcctccatatttagccccggttgtatggtcatgacggactgtcgtaaggaactcggcagtcaggggtggcttctcgaagtaccaggagggcatcggatagagggtattagctagtatgtcagttaactagaatgtatgtatactatgtatattacaagtataggaatatatttttttcctcttttctttccacttagcttagatgatttattatgagaatgagtagttaaagcttgtgtctcactctactcttgaattatcttaacccctgcttagaatatgattatcacaagtaatatataaactattagttgagttctctctacatgatcttcccgcaggataaaaaaaatacgatacccttggaatactctcgggtgaaatgctacaatggtatatccgtgcgcttgcggatgaactctgtaactataatatactagaagtatttctgcgccattgctgggaattatatttctagtaatgtcgttaagaaataccaacagcgacgccgccggcaccatccgccagcatggcgctgggggacgaggtccctcctccgtcttccgccgcccccgacaccgacctgcacccgccgccatccaggccgacggggccccgcttcctgccatctgccagggagccggcctcggcgccccccaccggccggtcaccgcccgtcgacttcgcccgccgccggccaccgcctcccgccggccgaatgacgtcacaccgtcctcctgccctctgcatatacgccattggtcaccacgtcagcccttgtcgtctcttggagctcatgcgctctctctagtggtaaattattaagcgcgaacctaagaggggcatttggataattgccgaacctaaaagtggcaaatagttaaattccccccttgtcaagagcagagaagggataaagcgttttgaccaggaggacgtggacttggtctatggaccattggcattggactttgctggactgctactgattgctgctcgtgctgttattttccttttacgatcagagatcggtttgcgtcgcccatgccatcgtttcactgagatcaaggatgttgttgttttgctgtcccaggctacaacgacattgtccaacatcgtcgtcnnnnnnnnnnnnnnnnnnnnnnnncgccgtggtcaccatagtgttttttttaatttctttttctttatatttttttcttttggtcgtcgtgtttgttggctcactacaaaaaaaatatgaccttttatgatgaattcctcgtgacgtcagagctattcatcattagcatattccattttatgacgattagtatgagatgtagtggcttagtgacgaaaaaaaagtgtttgtcgttaataccaactggaaatcgtcataaagtatttcaatgggacattgtgatgaatattaatttttcataaggggcaaaaagcaaacgtcatagatttatataatgcatttctagaaaaatatattaaaagttgaagcaatttaatcaagtgaattaataaggaaacaaaaattttcctttaaaaatcatggccggaaatatttttttaatatactaagtagtctaaattattctctgtaattttccgtgaattttcgaagctcaataactaattttaataccacaaagtttatttaacctattaaaataaataaaaaacaaattaaaatcactctctctgtccttgggcctttttcggccaagtgttactctctccctctctcagtccacaacctctctctccctccttggtggcttcctcttcccctcctccctcctcgggccgctggcctagtccttttgctcctccctcaccgagaagtctatttttcctcccttctctcaattccaatattttttcgggtagtaaatgatttcaaatgaaaaaattttcaataacaaagttttataacttatcaagatttacaacttttgttttggtcattttgctatatgactttgtttcaataatttgaatttgaatttcaaattatgacaacttcaaacaacattttcaaatactaaatgatttcaaatgaaaaaagacatcaacaacaaagttttgtaactcatcaatatctacaacttttttttggtcattttgatatatgacttgtttcaataatttgaatttaaatttcaaattatggcaacttcaaacaacattttcaaatactaaatgatttcaactgaaaaaaatcataaccaacaaagttgaataactcatcaatatctataacttttattttggtcatttcttcatccgacaaagtgatactaacattgttcacaaaacttacatatctctcttatagtttataaactactagaaaaaatgcctgtgcgttgcaacaggtgaagtctattttaatcttattattgttatatgatttagttaagatgaaattcaccgtgggatttcgcttggatatatatatttttagaaaattatgagctacagttaggaatctgatcgtctcaagttagcatgtgagttttttttaaatatatatttcttatatgattccttctttattaccaaaagtgaacgatcttaaaaaccgactcaaatacgaatatgtatttttaaaagtaaacgaacttaaaaaccgactcatacacggatgtcgtaccaaaatactagcaaaaaacattttcaatttttataatagtagagagaagatatagattaaaaccaaaacataaaattaaaaccgactcgaatatggatgacgaaccatggaaacattttcaatttttataaccgactcaaacacggatgacggaccgcgaataacatcttcaattttataatagtaatagatataagagatatgtatattttgcgaacaatttacaaatcacttatttacaaatcactttggcggatcaagaaatgaccccaaataaaaagttataattcttaatgagttatagcgctttgttattgatgacttcttcagttgaaatcatctggtactcgtaaatgttgtttgaagttgttataattttaaattcaaattcaaactgttcaaacaaagtcatatagaaaaatgaccaaaacaaaagatgtagatattgataagttatacaaatttgttgttgacaactttcccatatgaaatcatttactaccccaaaaaattatttaaatttcttatattctaaaattcaaattttatatagttcaatcaaactcggatggagaaataaccacaagaaaattggtagatctcagtaagttctacaactttggttttgacaactttttcacttaagttcatttagtatgataaaatttgattctaagttttaatactttgaaattaattttttccctccttacttcaaattttttcatcttctctcttgcctcctctcctgatattttttcatttcctctcctcgagaaaattgcatatgtaccactcataaaaactggcttcgctataatgccaccctcaagataggattcgcccaaacaccactcttaacacgtgggtattcgctggaatgccactttcgggcttttttccatttcggaaatacttttcatcaatttcattttttcttggactattatgcccctgagtcaactgattcggtcggactctttcttctcttcgtttcaatctagcgagcgagcgcgagaagtcgagaagagaagtggcaacgacatcggcgctgcccaccaaactgcatcgccgacgctgcctctctattccagccgccgcggcgcgcctcaccggtcccgccccccaacagttgtgccgccgcctctccccggcgagtctcctccccagccgcgccgcctatcctcagcgaagccctaggccgagccggccgcatcgacgcgtacggccgtgccgtgtctgccggcgaggtgctggcggcgcaccccaaccacgtgctgagccggcagtgctcgtcgcagcagggggcggtgggccggatacacatcgtgtcgccggagtcgaagctggagccggcgagatctacttcctcatcccggccgcctccgtccccgatgccaagaggaggacgagcaccggcggcgccaccggccgagggcaccacgtccgcagcaagtcggagggcagtgccgccgtcgccgattggttgggcagcctgggcaacgcgtcgccggagacgacaagggtgatgagggcgcataagcagcaccaccaccaacaccggcggcgcatgagcaccgggagcctgcctcgccgtggcagcgcacatcttgtgcatcactgatgacccctgagcttagcttttgttttttttcttctcttctctgaatttatagtggttttcttgtctcctgtgtaatttcctctggtgcccggtaaatatttttttcactttttgtgtcagtgatgtgccaattttacattctgaaatcaacaactgtgtataattttcaagcacaaagcgacttctattctagtagtatcttcttgtatcttcgaaaaacattttgcaacttctttttaaagttcgtttgggttaaccaaagcgaacgaacttgctcatacaaaattaaacaagtcggcagctctgcttgatgcgaaattaaatgaaaattaaacctcttgcaagttatatatatgaactcatgaagtgaggttgtgtgtcatggactcatggtgtatgtcaccgaggaggcggcacaactgcgcgcggaccaggaggaggcgaggagcggcacagctggagaggacatcggcgcggcggctggagcagaggtagcggtggcgcagtggtggtgggcggcgccggtgtcactgccgcttctcttctcgccttctcacgctcgctagattgaaccgaggagaagaatgagtctcaggggcataatagtccgagaaaaattgaaattgatgaaaaatattttcgaaatggaagaaagcctgaaagtggcattccagcgaatgcccacatgttatgagtggcgtttgggtgaatctcatcttgagagtggcattatagcgaagccagttcttatgagtgtagggatgaaaacggagcggatagtttccgtccgctccggataaaaacgaatacggatacatctcggatcggataattctcggatagttcggatacggatacgaatacagatattttctcttgggtacgaatacgaatatggtatcagggtttccgtcggatacggataataattcggatatccggtgaacagtgctattcagatatccgcagaagccacaagacataccccatttctctataactctagtagtttatctcttaacactagtccacattattaatattatttaaaattttaaaattatttataaattatactacattttatataaaatgagctaattatatatgttgatatttgtttctattagaagttgaattggttttcgtgttccgagaaaaatttgtttccgtattcgtgtccgatcatattcgattcttattcgtattcgagatagtccgtatttgttttcgtattcgagctatccgtattcgtttccatatccggtaaaaaatatgaaaataaatatgatatgagcattatcggtcccgctccgttttcatccctatatgagtgtggtacatatgcaattttctccctctcctctcctctcctgtcagcctctcactctttctcctctcccctctctctctctcaccgacggcgaggacgggagctgcgcggcgcggcagcggcgggctcggcaccggcggcggcggcggcctcccttccccgacggcggcgggcggcgggcacggcgacggccggcggcggcagatctgcacggcgacgggctgggctcggtgcagtcgaccgcgagcgatgggcgctgcccccagccaccccgcgggcgcacaaggtgccgtctcctggcggcacgcgcgagggagacaaacaacgcctgcgcgagggagtcaatgcgagggggttcaggcgaggctggcggcgaggctcgcaccgcggcggctcctctcctccggtggcaaggtgctcggcgaggaggagaaggctgccgagaacatctacatcaaggtatgtccaccctgttcgcttcccaaatcttccttccctcgtgattcttgctgttcttgctgcggtagatgggctccagatgcaactagagatgtattggtgtgctgtgtagaggtttatggtgccaagtggtgtgtatgtgtgtgcgtgtgttgcggtgggggtcgattcctcttcgcttcttgctccgtcgcttcagggattttggctgatgggacacgtgaaccgtacggtttttttggtagtattgtgggtgcgcatcattttgttgagcggtatggttcggggaaatggatgtgctcctaattgaaatgaggctgtttttcctatgcgaattgctgagtttgcttcaactttcatctgttcatccatccttgtgctgttgtgcacctgttcaaatcaaatttcttaggatgacatattggtctgtgtactgctataataatagattacaagagcagtgtgcaaataagatcacaatttgatgatatattatatatatactgatgcaaacaattaatcagcaacaatttacaggttttgaagttgcatagagcatttaacaaacaagattgatgaattagatttcataaatacatatgagttttacgtttgggtctgcaatttctgcagagataaggtaattgatctgtcgtcagaagtagttaattcaccatgctatctgtacaggttgagactgaacattgtgcttgtagctaggtggagtactactcaaatgtttctaattaagaaacaccccctttaggatatgaaactcctgtttttatagagaaataaaaaaaatagctctaaaaacgccgcctcaacattagcttttcttgtagcgaaaacatctaaattcacagtgcaactgttgagttcaagatttcgtctacttccatctaaacatgtgaagcataatgccccattattcatgcatctgaactactacgtcagtggccaatgcaaatgccatcacctaaaaagaatcatgatcaggagtagggccagaagttgttgtcaagccatggcatgtttggtgaactagcacggccaagagatgctacaacaccggcaaatggtggcgtcatgggcatggggttcacttaagcataatgcatacactcatggacaatttagggaaggaattgaagaataatcagtccatcaatcaatcagcatccttttcttagatcatgcttggtaaatgtgaagttctcttgtttgtttgtttatggtaggtgttgttttgagtaagctgggtaggagtacttgtttttggtgactctcactcattgacctgagctggtggtgattagttaaaaaaaaatggaaatgggaggaagtactacatcagtacatgcatatacattgcaaaccaccacaaggaatcaggcatcagcatcagcatcagtcatcacttggatttgtctgcgtttgtgtgtgtgtgcatcttttgtgcatgcatatatgggtgctagtataactttatataggaggcatttacacacagccacagcagcagtgtactgctctgaagatctgcaatatatgttgcttggtgttgccgaaaaggagaaagtccttcacatctatcactgtctaactctccaccagaagcaatttgcattttttgcattcctcacctcacctcacagtaacatagttcttgacttgtattcaaattgaaggcttgtttgttaatctcatcagaattcagaaaccatccaattcatctttcagaagaaagtatatatatatatatatatatatatatatatcgttttgcctgatctctgagcatgcttagtttctttgttacaaaatgctgaaccgagctgaactgaaaatttcagaaatgtgtgatgtgcaggtggagataacatgcagagggagacagctcctcccgatcctgacattgcagcatgtccgtgacatcagtaactgcttggatattttttattcatctattatactgcttgaacagtagaagaaactaggatgatatggcagttactgatgttttatcttgtgcatatgcagtgctgctaagctcacttagaagatcttggtcacgcggcatccggtgaaattttggttgctgtgattgtatttggaatgtggctggatttggctgttaactgtgttgtaaattttgtgttgtattggatgtttgtcgggttgtgttgatgctaattgggctgtaacatttatgctatatgggtttttattgtgtttgattgttgggcctatatgggcctagcccacttgttatttgatactaatataaatgaatataatatggcgggctgaaaaatgatgtggtataatgtttgggtctatatgggcttttgtactggacttggcccatttattatttaagcaaatggatataatataattgggttaaaaatatgctatatcatagatgggtcaggctaaaatctagtcgggcttgccattgggctaagctcataaacaaggtactcaatacatgaattttaatgggccactagatattttatgacttttttagactagataatgacgaatatgagcatcataaagttactttatgacgacagaaggatcgtcactagattaatgatgaaaaaataaggtttcgtcatagaacgcctttagtgacgcatgataggtgacgggaattttcgtcacgcgagtgtcacagattacgaaacgtgacgaaaattttaatgtttgtgacgtaaatgaagcgctatctatcataagatctcttatagtggcttcttgcctgcacctgcgcactcttgcgcctggcgccacaatccatgccacgaaccgcaaccgcacactattgggtgacttgtgctatattgatattggcgataactggctactacgactacgacaactttatctcggctacatcgactacggcacaaaaggctatcatcgtgttgggtacttttgccggttttttctccagtccaagtgtccgcactgctcacgcttggactgcgggggatgttaaagtatatggtagttagagtcatattagaatatgattgatttgggtggactcattccatatatgtaatcctttcttatcctccccatgtacacctatatataccgccccctgagactcaatacaatagttttatgttacgcagtatacctctcctcctataatatccaacatgacaatccaaagcaaattaatattaggagacttgcaatacctttcgacgtgatcactgcaaaatcagtgtgttctaaagatcaaaattcatacagcaggtgatgatcgagcatattgacaaatgacgaatacaagaacgagagtgtatccacgcaaaaaccacgagccgcttctccgtcgatcgagatagtacgctatgtcaccacgagccgcttctccgtcgatcgagatagcacgctatgtctccagggacgctgcctccgtgtcgagctcagccgcgcgcctctccagcgcagaggcccagtcacgcgagcggatcgtgtcaagcaactcgctggcctggagaatcggctcggagaagcgcttgatcgagaggtaatcgaggcaggccgaatcgagagcgcggaaatcatcgtggtcgatgtggctgaggtgaagccataccttctccatctccttgccatgacggatcctggcacgagctacctcctgtgcggaggctatctcgtcgtcgtccagcgacaccaagtcccacaactcggaggggatccgcttgccatcgaccatgacctcgtcctgcttcccctcaacctcctccccctccccctgctcctgggccatcgcggcgtcctcgacgatctccccctcctccaggtccatcccggcgtcctcgacgatcctatccgtcgcatcggaggaggccccctcgccgccgcccacgaactcctcctcctcctgctccatcgcggcgtcgtcgactatccagtcggtggagtccgaggcgcccttgccgccgcccacgaacccctcctgctcctcctcctcctcctccccggcaacatccctggcgcggcgacggaaaaaactcgtacatggcgttctgctccactaagatgcgcagcagattgcgggccacgtcgcgcgtgatgccttcctccggctcatcatccacgacgagcagctcgcgaagcttctccgcgcggttgcggaactccgcggcgcgcgcacgaagggcggaggctgtcgtggtcgcatccgccgccatggcgtatgcgtgggcgtgcgcgtggcgtgagagagagaggagaggggtcacaggtgggaccgtgggaggagagagaggaagagaggaggaggctgagctggaggaggggaatacgatttttactttatggtttggactatttatagcccagcttaaagcaagcaatcagatgatatttcttttttttggtatttacagaggctatgtgtattgaacatatttgacatcaattccaactggaatgcccgttgctcactacgaaaaacagttccaaacctattttgcttcaagcatgcatgtgacatacatgaacaatgggagcaatgatatacatagattttttttctatcttcttactttcactctccagtctccatggcaaacaaatacacaccaaattcgccataactaaagccttttgagacaccatgacagactaactaacggatgaaacaaaattgcgtaatcctaaccaacctaatcacaatcaagaacttgagccggtcgttgagcttcttccggcgacgggcgctccgccatgttcttggccgggatcccctccgctggcgttgcgacggatggagctcgcgctcattgggggaaacgagagctcgcgctcattgggggagacgatcgtcagaggcccagcatcacggccttgccgcgtccacatttgcagagaacgtgtagtggtcacgggcacagaagaagcggcggcgctccgggcacgcccactgcgtcgaacaagttgaagccggtgaggccaccgaactccggcattttagccggatgccgacgcggtgccaatcgaagccgacgaacaccgccgcgttccccagcgccaagaaacgccacccggagacgtcgaatgatccggctgttccggccgctcgccgtgttgaatgatcccggacgcggaggcggagcccccatgaatagatggaaccagcgccagccatcgacccccgtgcgagccggcgacggcgccgacccccgccgcattgtagtaccagtcttcatcagccagcccggcgcgcggaaccccatgtcatgcctccggcagcggccacggccaggaggtgtgctggtcgcgcgcggtggctccctgcatcctgcgccgacgacgccgtcaccacatcaacccctgcggtggctgcgccgcgctgctcgactgctcgcgcccatatttccacttgtgacttgtgccactgctgctgcgagacagccagatagagtatgtgtggaattactgctaaaagcccaatttggaacaaaagaaaaggcatatactataagttttaaaggattcctatcttgtgagaagtaattatatgcagcattttgaaacaaaaagggttaatccctatcaatgccgttaaaaatttggctgtgtacatctgattggatgttgagactgggtttatcccattttctaaaaaaaataccgttaaaaatattatgaaatgggctggaattttggaggaaaacaagcatggtatatctcaccttatgttttttttgcacgtttgtgacttgagtttttgaattatatcacgataaaaagaaccaacatttcttcttcagctttcaatgtcgttgccatggtctcactctcacgaacttatcctattgttaagcaccacgggaattttccttgttttgacatcgagttggcccaccctgattgctccatcgaatcccctacttctatttcgacatatcaacgccgttggctcatttcaccattcactgatttatccccatctttattgtaaatgatctgaacataggttgcactttccaatatgttaattcactaggccatggttaacgtccgtagcgcctatggttcattccttatagtccattgctcctcttggatttagggcctacttaagttaagggaacttctaataaccatggctactttaagaagctccacaccaacttctcaaatactttagattctcaccctacattttaagagtagttgtagagtcgatgaactagtagacattcttttccaccaagaagatactcgtgaagtacttttcacagtctctaactctacaaacaaagtatgacttgttcatgatttaaacttttagattaattacggacatggccacataattattccatcctaattgctccaccgattgccatagttaagtcgaatgatttagcccataaaagttttatctttacatttaaccttgtgaaagcctttctcggagtttattcttacacacgacatttgtgtaagaataatataggtccgatccgtcgttgattaaaagctaactccaagttaccttgtaaaacagaccaatctaaatttatgcacatattattcacatcttaactactcctttcgtccataaatataaaatagttttatctttttatccatccaaaaatataagatatttgattttttttatttgtagacaaatatatgaaatattaagatctcgaggacatcaccttagttatccattcaatctctcagcctaccttttttttttctttatttctgttaaatatgtcaaaaaaaaataacaaacataatctcatttatacctttttgttgctatcttaagttttatactagaaaattggtataatcccttaaataggtagcaatgtaaaatgagttagaaataaacaagattaccaaccaacgtttatctacttaaggccaagcccattgctctctgagaccgacaggtgggccccgatgaccattgaccactggcccatatgtcagtgagcgtgtgctgctggtttcccattttccacttcgtcgcttcgcgtcgccccactcgattccgctccagatctccccgtcgcgctccgctccgcctcctccgcgtcgccgtcgtcttcctcctctccggccgatgcctcctcccaaaccctagcccacctcgcaaaaccctagatcccgcgcacacccccaacgacgccatggatccctccggatccggccctcgccacggccgcctcctcatctccccgtcgctctcctccccgaccttctccaccagctccccctcccggtcccccgcaccgcaccacgaccgccgcaactccacctcctcgccgcagccgctcctccccttcccttccgcttcttcctccaggtccggtggcggcggtggagcagccgggggcccgcgcgccgcgggggcgttgtcctccgcgtcgcagccggcgttcgcgcacaacgcgcgggtggcggccgcgctggcccccgccgcggcgttcctgctcgacctcggcgggctcccggtgttcgccgtcctcgccgtcggcctcgccgccgcgtacctcctcgacgcgctccgacagcggcagggggccttcttcaccgtctgggccgcgctcatcgccgccgacgtggcgttcttcttctcggcctcgctctcgtcggccgcgtccgcctcggtgccgctcaccgtgctcgcgctcctcctctgcgccgagacgtccttcctcatcggcgtctgggcgtcgctccagttccgctggatccagctggagaacccgaccatcgtcgccgcgctcgagcggctcctcttcgcgtgcgtgcccatcgcggcgcctgcgatcttcacgtgggctgttgtgtccgcggtcggcatggccaacgcctcctactaccttgccacattctccatggtgttctactggttgttctccataccacggccgtccagcttcaagaaccgaaagcaggatgctccgtggcaggataccgatggcattcttggccccttggagagctgcgtgcatgctttgtacctgttgttcgtgccagtgttgttccatgctgcatcgcaccatgctacgctcttcgcgtcatgggccaatgtgtgtgatctgctgctgctgttctttataccgttcttgttccaactctatgcctctacacgaggtgccttgtggtggattaccagagatgtgcgcacaatggatcagataaggatggcgaatggcttggttgcgctggttgtagtggtgctttgccttgaggttcgagttgtatttcactcgtttggaaggtatattcatgctccaccacctctgaactacctgcttgtaacggtcacgatgcttggcggtgctttgggtatggcagcacatgctgcgggcaaggttggagatgctgttagctcggtagcctttaccgggttggcagtgcttgtcagtggagcaggtgctatagtcatcggattccctgttatggtacgttgcagtcttatggtatcctcttgtagtacttgcaaatttatcatcgaattttgttttttcttatgcttgtagctgtatgttaatcttagtcactgaccaatgtgtttcaaggtgacacttggataatttacagttgactttattctattcatgtatttgcttggtcttttggtatggatgatctaagttctcagaagtcgttggttctggtgttctatctgttaaattgattagaatttgagaactcattgcataacaacaatcttttaaaagctactatgggaagttattgtagctgtatctcaatcattgttaactgtggaaacagtgttaccaatgtctcaattaacattaattgtggtgttgtgatctcatattgattctctagtacatggcaatagctggctgtgcatgctctccaactatatactcctttctgagttgatattgttctccctgaatttgtctactcaagctggtgtgattttagtttttatacagaaatgctgtacccaaatccatatattcctattgtgacactcctcaccactactgcctacaaaccttgggtaactttgctcctaagtataccatgattgtgaatttgtgatgattctcttgagtccttagctatttgttaagatttagtcagtatttctatttcagggtaattctagcaagctttgcatgttcatagttgcccatgcttgaaaaggaaacttgcatacacacacatgagcgtagtcttatttaacatcataaaaatgatgttcttgctagacttcaggtgcttaaatattcataatgaaacatgttctagagtgcatgggcatcatgagaattctgattgttgtagaatagctgtctcacttccctttgaccgactgtggtcttgaggcagtagtctgcccatagattttcttctattgtggttgtcctaccataccctcgaatatgcagcatcagcataaaaagttattacgtagcatttttatttttgatcactctatacttatttctgtgaattaatcttcttgcagttccttccacttccaatgatttctggctattatgcggcaaggttctttactaagaaaagcttatcatcatacttcacctttgtagcaatagcaagcatgatggtcctttggtttgtagtccataattattgggatctgaatatatggattgctggcatgccattgaagtcattcaccaagtatgttgttgcagccgtaatcatggcaatgactgttcctggtttggcgcttctcccaacgaaactgcggtttcttgtagaacttggtcttactggtcatgcattattgatatgctacatcgagaaccgattgttcaactatgctacgatgtactactttggatttgaagatgatgtcatgtatcctagctatatggttttgtttacaacctttctcggattggctctggtaaggagattatctgttgatcagagagttgggccaaaagctgcttggatcttgacttgtctttattcttcaaaattatcaatgttatttatcacatcaagatcggtgctatgggtttcagcggttttgctactcgctgtcactccccccttgcttctttacaggtataccacagcatcatgttctaattgagtgttttgacttctttatataacattcttccctgtaccttccagagacaagtccaaaggggcttcaaggatgaaagtctggcaagcttatttccatgcatctgtagtagccttttctgcatggctctgccgggaaacaatcttcgaagctttacagtggtggaatggaaggcctccttcagatggcctacttttgggttcctatattctgttgacaggtcttgcttgcataccaatagtcgctctccacttccctcatgctcaggtatttgacgcttacccctctgttgtaaaaatatcgatcttctcataatcatatttgttattatctgttcgtgatctgctctgtacttttgcactaaaattcttcaagtttgccttctcaacaaattccctagtgagggtttgcttcccagtggttatagatggaccactgacttaaaacactttgaggttgaggttctgtggaattttaaatgatgacatcaattgtcagctccagcttatttaccttcttgagggtatcatgttggttgacattgctttggggacactacttgctaaagaacattagatgcaaacattagatgatgatatgtccaatacatgctacacactggtaggattcaagctaaccttttttggttggacgttaccttgattttggtaaagttttattaagttccatatgttggatttcattttaggttatctttttaaagagtttttgaagtgatcctactcgtaagttttattatcatgcccataatgttaaaagttattttagattggtctaaggctttgcttgcacggaatgcactgtttgaagcacttttacttactgaatactgatcactagctaaatgcctatgcttctctatggataaaagaaaatatgccatagtattgcctaaaataaatgtattctttttttgcttcaggcatgttactcgcttgtttgctataggctgtgctcaccttgatcatatatatgtggcaacccatttatttataactattctgtaatagaaaaaagagtatcagggcgcaattataaaagctggagaggatagatgtatggatgaactttgaaaggagtatagatgaacttactccctctgatcccccccccccaaaaaaaaagaaagaaaaaaaccaacctagtatgggatggggcataatctagtacaacgatgtagacacgctcctgtccagattcattatgttctatctcgtactaggttgggtttttttgggacggagggagtacaggtttatacccgaagttatgatgatgcttggatcctcatgtgttagttttgcttttctcatatgtgtagtcggtattattcatattagaaagcatattattcagtgtttacagtatctgtttagcaggaagcaccttcattttgaaatatttaaattcaacattttgctgcccctatatttgttacttgttcttttcctttctcatgttgaagtgtcaaacttttggtaatgtgaacgttacaaggtattttggagctgctacaattgattctatgttacgatttgtttgcagtcagccaagagattcctagtgcttgttgtggctacagggcttctttttgttatcatgcaaccacctattaaactttcatgggtataccggtcagagtttatcaaagctgcacatctatctgatgatgacacttcaatatatggttttatagcatccaagcccacatggccatcatggctgctgattgcaacagtggtactgacattagcagcagttacatccattatccctgtgaagtatgttgttgagttgagggctttgtatgcattgggggttggaattacccttggcatctacatatctgttcagtacttcttccaggcagttgttctgtatcctcttcttgttgcaacaattgtcttggctgctgtctttatagtattcactcatctgccatctgaatccagcacaagggttttgccatgggtgttctctttcttggtagttctatttccaatcacatatcttcttgaagggcatctaagagctaaaaattttgtggatgatgaggaagcagagaacttcaccaacatgttggctatagaaggggccagaatgtcacttttgggtctatatgctgccattttcatgattattgcattagaaattaagtttgaactggctttgctattgcgtgagaaagctgcagacaaaggtgtaacacatggtccacctggtcggagttctgcctttccaccaaaggcaaggctacttcagcagcgaagagctcatgctgcgccaactttcactatcaagagattggcagcagaagcagcttggatgcctgcaattggcaacttttcaactgtgctgtgcttcatcatctgccttattctcaacgttactcttaccggtggctcaaatcgtgctattttcttcctggcacctatccttctgctcttgaaccaggattcagatatcattgcaggatttggtgacaggcaacgttacttccctgtaacaatctccatttctgtttatttagtattgacagcattgtatcgtttatgggaggagacttggcctggcagtggcgggtgggcacttgatattgggggcccaggctggttctttgctgtgaaaaatgttgcccttctcatgatgacattacctaatcacatactcttcaatcgcttcatgtgggattatgtcaggcagacagatgcgaagctacttctgacgctgcccctcaacttgccgtcaattataatgacagacatacttactgtgcgggtactaggactgttaggtgctatttattctctatcacagtatgttatatcaaggcggataagacttgctgggatgaaatacatttaaactaggacatgcaacttcttttgaggtaaatcttgtatgccctgcgtcaatggttgtgaataagagtctccagcttctgatgctaatatttcggtgcttgcttgcaggctttcaaccatatacgacggcgattgctttcaaaggctcttgcttgaagtcacatttgtctggtgaactgtgaacaaaattgcgccttgaagtagagaaacaatggtcagtagtcaccagttttgcccttagatgatctttatactggtaacctaaggtgttgtagtataaatgttactgaactcagctcgtacagcacatcaccttgggtcctcagaacctgtgaccatacagcattttgtgtcagatactttcttatataagcctcaccagaactgacatatgctgagtctgcatagattcttttgttgtccaagtgactaattctgaatggcaatgttctccacggagctgtctggttctgtttgcttcctatattaataccttttcaatgtacattatatatgatagggtatatgctgaggtcttggagagttggagtgactgatcttctgtttgtcagtaatcagtcagttttttcccaaaaaaacttttgatttcatgagatagttttaggatctgctttctgacttgtgaggctgttctttggtactacatgaagatttgcttcgtattcggaagtgcacgagtttcttcaggtcgcagtgatagacacgggatattctaaactaccatgtttgatgtttcatcagaacattgtctatgcaattttccgcttcaatgcatttacttatctcgaaaattggacctgttgtcagtcatcacaattaaaagtttttcttttttgaaataagaagggtgtttctcctgtggtatttttgttccgttgaaaacgtaatatgaaaacccgcttccttggtcacaaagcgaccgacgaatgaccggacgcgctgcacatggcccagacgctgccacggttgccaccgagccgcaccgctcttggtgggtcccaccagccaagcccgaatttaacgaggaggcgatggggcccaccagtcagccacacgtctcccaccacctccgcgatcccctctcctctcacctcgcctcccatggcggccgcgctcctccgccgcgcgctccacctccacctccacctccgccgcgcgctcccctcccctccccgcgccggcgcgctcctcctccccgccgccgcttcctcccccgcccaccgcttcctctccggcttcaccaccaccacccagcagaacagcgcctccaccaccaccatcgacctctcctccgacgagagccgccgccgcctcatcaacaggtgcgccgcccatcccgcttctctctatccttttcctttccccgcgatacctcgtcgccggcggcggttgttgacgttgtgttgggggtgggtgctggcgcaggctggtgtacaggagcaagcagcgggggttcttggagctggacctggtgctcgggacctgggtcgagcagcacatccactccatggacgaggccaacatccgcgccctgctccaagtcctcgacctcgtaagatatctttggctctttgcctgtctcccctcttatttcgtcatgtacaactattcatccgagtaaacctgttgccttgctgtaacagtagataaatcagctagttgaaactgttcccaatgaacccattgtatatggtctcagttatattttactgtttatttttccctggccttgggtcaatttgtaatttataagtatttgtttgggggtttagcctccattctctaaggctgattcgtagttgtgtgcttttgtaaagagctatggttgaacacctttaagagaatgtaaagcatcttgatgagtactgctcggtagattcagaagggccatgaggttttttgggaactagaaattattggttctgattgttgatgctgaagagttctgactatccacgtgggttagttttcttgttcaacaaagtcaggaaatagtttcagcccatcagaagtttgcattctagccatcctctgagtatcctctgagtagttgcaatgaatacatgggaatttgattgggcaattcagcaattgtggatcctagatccaagataaacatccagactgtacattcatggataaagagagtataaatccaggcagtggcttttgtgactgaaaaattcatagcataaagtggtataactgtaagtcatttgaccagacaaatttggtaacctatgagtctggttttcctttgaaccatttatctgcctcagagccttcaaattgtttttttttgggttgaccagaaatgtcttcttaaacaaacaagaataccaatcacattttagaatgtttagaatgtctatgcatcatctctcatgcttaacaacgttttatataacatgcttcatactgctcataacttcttggaaggcaagtgccatgatccattggacagccagtgcatcaaagtatccatttattcttgtgttgaacttgtagattggctctaagctctaatttatggcttttcaggaaaacccagatttgtggaagtggcttactagtcaggaacaaccacccgaggcagtgaactctaatcctgtatgtcatatcacagaactcttctatctttcttctatccttctgaatctctggttgcttctgtactcaacgggttttgtccaaacaggtatttatcgctgttaaatcgaaggtcacggacaacctgagcaagcactcttctcctgagaccagatcagcacctggtcagccatgggtgagagggtgggatgacaagcgaggcattgaaggaccaaagtatggaaatcagtgatgagatatgcttcagagaatggtagcggttttatgcctaagtataatcctgttttgttgcccctatagtttggtgcttgtgtagaataaattaaatcatggtatccaatgatttggaaatttggagtgtcaccatgaatttggattgacaaataatgctctgtacaagtttcaaacactttctggttgaagacaaagcagtgtggtggtaacaacttaacatgtaaatcaaaagctcttgtgtttagcattttctcgtttatgaaataatgatggaaaataatactctaaattgcaatgcacagacctatatattgcaaccaacaccttaagaggagggcctacccaattaatagaaggtcaatactaattgtaagttaaatgatgagagacatctgatcatcacggggcccctcatttcactacgaatcatagaactggtgtatatatctttgcaagatttgaaagaaaaaaaaacattgccaaggcacgaataattgttatactgaaattgcaatgttcattttgtggtgtatacaccatctttgccacactgaaaaatgaaatatatcgctcttatttacagaataaatgaaagaacgaaataataagatggaattatttttgacattatcgtacatcacagaactgcacagagaaaaaaaaactatcgtttgagaatatcacaattaatttcatcttcatataaagaaacgaagatcacttcaacagtatgcagaatctatgaaccggttgaagcttgttgagctcgcatcaccatttcttcagtagtttgccctataatgtcatttgcacgcttcaatggaacacatacaattctcccgattgaatcctgagcagacaaattttctgtcagaattaaaaaaaaacctcgaaatggattggtaacttttgataaaaacaagttagagctagatcttgaaatataaggattgttcaatgaaatttgaggtactttggtcactttctgcgctgcaattacatgtgcgtctgctaggacgagaatcaaatatttttacttggagttacttgaatgaatctcgttcgtaatcttacccgagatacaattccaagcttttctagcttcttcacagcatcaacaacgtcaaaattgcactccacaccaaattcttccttgatgagctgttcgcagcgtaaatcgagatcctgtaacgggcaataaacttcagaaagtccatatatatgtgaataagtcttaagggcataaaagtgaatatgattacatcctccatactctccatttatatgatgaacttgatgccacagaaactaatgtcagaaaacagagagagatgtgtaactagtgtacagaaaaattatggttgtgtgggcacaataaaaactgcaaaagcagataatgaatgcagaatacgtgtggaaacatttttttttcatttttgaaaagcatttattcaaatgggaagcaagtagggaaggaaaattagttatgggcagctgaaatatattgcataaacgtcatttcgggccttcagggagaggtatgattactcacttgtacagttgcctttccttgctccatcaaaatatagtaagaaacaatgacctctttaacctgcaaacccattttatatgtcagtggcatatacaaagacaagttatatatatcaaagagaaatcccccatggttccatacttcttgctggatcacatcatcacacaaatgcagaagtgttcctttcccactgtcaagctgtttatcatacatcgattttgtaatcaaattctggtaagacaccatattggcctgaaatctgtttgacaagagataaaaattctcggtaagcataacatcgtgtaatagaccatgtcggtatacaactgatatataccgaactgaatctaatgtttaagaaataattgtactatgataagtttaaccacttacgtaaagtagatcttagcacagtatccaattaaaccagacaagattgctatgacaacccatatatcagcctttggcatctcaagagaacctattagagtaacctgaaaagaaaatggctatttagatgctcaaagattaacttaccatcatggttggacatttagagcattaggcacataccaaacctaacacagcagaaataagaaatttcacccaatccattggagtcaaactagggttcttcttctctggctaaatcatagaaatactaatatcaggtacacacaagaagaacagaaggaaccagagaggaaaatgatataaaaaacatcacatatgaagcacgcttctatattaccagaactaattccatatcagccattggaatgttcttgaaatgctttacaaatattcctcgatccggcttggcttctgtgcttgatttccttttaatttacaatcgaaacaagaaagtattcagtgtgccaagccagaagatttaaaaatgttacattacttaggatggttagatgaatacatgtataacagagcgatacctatataccacaatcatcctttcaaatgtaggttcttgaattgtcatttgacttagtagattctttatgctgccaatgccacaaggaaaatatgcacatcagatataagttcacttttagtgccaaaagtttacatgtaaacactaatcaacaacctcagctccatcttttctaggcgaatgcgctcaacagaaaattcttgttcttctacttcttcattaacttcatcagtcttctttgggtcctttttggccctcaattgctttttcttagagaagagtctgtcaatcctgttgtaaaaccaacaccatcgttttaaagtaaatgattatcttccaatcttgaagtatgaaaaagaaatgatgttattgaaccacattatcatactttgtaactcttagcaatgatctccacacccgtgatattattacatccactttctccatgaagaagtaatcagttgtccggtcgattccaatgccccgccgaaatataatgtactgcaagcatggttgatgtgataattagttatgcaatatattatgtagaactgaaaaaaatgcatttatcatcaaatgtatgccatcatcatgaggtatcaatagaaagaaagaaagccatttagaacaaagaagactgttttttttttgttgcattcattcttttttcgtccaaactgttgcttatgctcttgaaagtaaaagaatgataccttatcaacggatgctggtagattatcatgtggatgtgctttgaagtaccttgtcaacaacttcttgtctacctaggatggttaaaaaaaacagttaagcaagtgaaatagatcatctgtttgcatgcatgtttatggcccttgattgaaaatattacagaagtaggttcagaccttggattcatcaactttgattggtaggttcagaagatactgaccagactgggctacatcatattcttcatcagataacaacttgaagttgctcttttccattatctagttagtatcatgagtattttttttagaacaaagggagtatgagttattgtcaaatctcacagaccacatatattttagctataacgaagtgtatatatagtggcttaacctgaaacatataagttaagaaattgagttcaagcgtttcaatctcatctggtgtcaggctttgctgctccaaactcttcacgccattaacaggatcaaatagggcatataattgctgaaccacggcacaaaattcagacaattgaaacttgatcaactgaagggagaactatgaaataataaaggagggggaaaaaagaggaagtggcctagataccattaggtcctcaaattgcagaagataccaagcacggatagtgtactccaccctcctacatagcttcaagaactcgccacgatccttatcttgctctgaagattaaacccaaaaaatgtgtggattatgacaatgtagataaatcataaaatttcaagtgcacagttccaaataacagaaattctgattcacacatggagaagagtaaaactagttgagagtttcagaaatgtcaggttgtttactccaaaagaaatttcagaaactcagaaatgtcaggttgtttattcccaaagaaatttcagaaatggattgccaatatactgaaatggagtaaaatatgcaatattcaccaacaactgagctagaaggacatattttttatccagataaagaacatcatcgcatttgagatcactgggaaacataaaaagtgatcaaaatccacatgcaaaggtttgaaacagattgcaaagtactccttcatgtcagacagataatgtaaatgtaatataggaccagtaactgtaatcacgggaactcccaagtatataacatgaatctttcgaatcgcagcatggtttcctcgtcagcaattaatcgactgtgcaacacatactccaaaagagcaagacagttcccagttcctatttgaaagaacccattcaaatcaacccatctaggacttgttagtttgtcataattcaaatcaacatgagtcgttcgtcgtagcaatcatgaatcgtgagatgaacaatttgatcaatcgttcgtaacccataaatttcaccaggagaaattaacttaaaaaaaaaaaagaacagacatgttcttgtccctcccatttccaagaaccgcggattcttgtggcaatgcgcggccaaccgatcgaccgatcgatcaaaacccaaagaaatcaaaaaggaagaggcgggcatgggcgggcgtgtaccgacgaggtaggcgagcttcatgatgagcttaggcttgaggatggggatgacggactccctctccagccgtatcacctccttcaccaccccgtccttcttctccctcctcatcctctccgcctccgcctccgccgccgcttgctccatcgatcgatcgccgcccggagcaacgtatataccctacacctatccgaccctgatctcgcagccgcagccgtggaatcggggcaagggatggcgtcgcgccgcgggaagaagacgatgccgccgcgagagagattagagaggtaattaattaagaattaattactttattagtgattgattaattaggagttgggaagaaaagaaggaaagataccaaaagtagtaaacacgtgagggtgtgtgcacggggcaaaagcttccggaatcgagggcctgttcacttcgatgccaaaaaaaaccttaccaaattttggcattaccaaaattttggcaattttggcaactagccgaaattttggcaggatttcttatatagttaccaaaatttggcatgaaactaaatgtagtcatttttttggtaactttaccaaaatttggtaaggttgaaatggcataaaagtgaacaggccctgatttggtccacggaaaaggctcatcatgggctggaccgggccgggccgaagtgaaagcccagtatggcccatggtatttcggcccatattcagccggaaaaaagttcactgactctgtcaaatatacgtgtaatctgattcgtatgtttcaacagtattagatatcttgatcctcaaactattaaaacggatgcaaaacgactgcctcggtagttcattaaatcttgcttcgatggagttcattgtagattgatatgcataatgctgtttttttttatatgaagtgaaactgaaagcattgcagaatttgcagttcgttctgagcaaaatctaactgtattcatgactactaattataaaatcttaggggaaaagagaaggatgatcttggcaatcgtttctcatttttcttatacctcaaaatacatggcactttgggcaaatgtagccatcaatctagaaaaaatatggtggattgataatactaaataggcagtttggcctcctttcaagtttgagtttgcatcttttggtatcacaaggttgtgcttttcatcgtaggatgatcaaacaggctttaatttgccgacgatgcggcacaatgagaagtcaatttgttgtcaataatataggggatggatatcttcacccctaaaaaagtgtagtttcttctctaagatacagaaacttgccatggatttcctagaagcatataacagcacgtttgaaaagaaggcaaaatttaaaactctttgatgcttttcccccactgcagtggatcgatcatctcgtatgtttctccatctagtagacactgttcaagtagaagaacaagccggccaatgcaagtatcccgacggcgataccgataggcaacgcttgcctgcaaattgatcaacaaagttttttgttaacttaattaaatcattcaccatgaatcaagggcttgtttggaatgcaggatatttgacgaatgtaggtgaaatgggactagtttctgtggagtttgtgcgttcaaatttgtctacctaaggaaaattgaaagcagctcaaatttaatttaacaacttgtaatctttcttctgtatctatgaaaatttctgattacccgacggcttcgtcctttttcagctgctccttcctagccttgcgggcatcggtggcgttggcgttcttggccaccttaggctcgtacggcttgaaccttctctttggtgctccacaaactgcatcagcaatgcagggacagaagaaattcagtaatgcagaccaaacctcataatgtgattgtcccgaaatcatgccagtatgccactcaatgatccaattaaattgtttactaaaattccctatatttttcttgtttgattccccttaattaaaacagggtaaatatgctgccagctgcaaactctgggtgggtctctctcttccgattatggaacacagactgatacagaatgtcagctggtaatttcagtttaagctgtacaaagcctcacctcacacatcgaaaaccaacatatattctagttaaaactgtttattttgggtgagaaatcatgtcttaaaatctgttctcttttgaatgaaaaaccttgtaaaatcgctgatttttgcacatgttgaattcaccaaaaaaattgcgagctgttcttaccggggcagaagtacttgtcgggaagcttgtcgaagggggtcctgtcgctgtagatgtacctgcaaacgagcacaaagtcgtcaccaaattttgcacagcatcaagcagaacaagacgagatcgagtcgttcgacgcggccgcggcgaggcagtggcagaggcagagcggctggctggctggctcacccgcagtcgcggcagatgtaggcctgcttggacgcgacgccgaagcgcatcgtgatcctcgccgacgccgtcgacgccctggcgccgcgccgcggcggcgccggcgccggcagcgacagcggcgtgcagaacgatgacgaccggagcggcgccgcggcggcggcgggcgcgcgcagcgcctgcagctgcagggcggccatcaccaccgctcaccgcagcacaagaaacaggcgcgtggcgagctcgagatccgaggagagaagaagagaaggtaggaaagcaatgtggggggactggaggaagaagaagcggtggaagagaggggaggataagagggagcgggagatgattggcgcgcgcgcctgcaacgcaagcgctcgctctccttttcttttctccctcgctttttcgcgcgcgtggcgtggcgtggcgtggcgtggagccgggagctccgagggggcgagtgtggattggagaaggtgcgtgcgtggcggccatggcgtcccttcgcgcgctatccctttccactggacgggagcgccacttgccgccaattgcaagggctcttctcctgtaccgtttgccagggacgaaaacggtaggaaatggttggaaatggtatcattattttattatttttttaaaacgatcggaaacggtcggaaaattttcatatttatgaattcatctatttagtgtcaatttcaatgccacgctgatagaaattaaaaaaactaaattttaaaaagggtaaccatcagtaaaaatattattattgtactacctctgtttttttaatagatgacgccgttgactttttctcacatgtttgaccattcgtcttattcaattttttttacaaatgtataagatataaatcacacttaaaatattgtgagtgataaaataactcataaaaaataaattataattacgtaaattttttaaataagacaaacggtcaaacatgtgagaaaaaatcaacggcgtcatctattaaaaaacggagggagtattagttttgcgaaaacagtatcggtacggtcgggaaatttccatgccgctttcacccctaccgtttgctaatcccttcgttttaaaacataacaaatacttgttggattaaacatatcttagtacttcgtattataaatctggataaattttgtagcaccgagatgtgtttgtgctcaattcattcacattattgctatatttcaggacggatgaagtaggagggaagaaagaattgtcatttgtctatgggggtttaatttgacgcctaaattaaccgtattaaattttggtgttacaatgttttgtgaggttaagatggatagagtacgtgtagtggatgccatttaggataatctttgcaccattaccttgctaaattttagtaaatgcaaagatttgctggggtatgtttttgacaacaaaggggacaagctagaacaacttgtactctacacatatttacgcttcactgatatggtattttgccacttcacaaaatatatttcgatggtttgtcatcttggccaactatgataatgcatttttaaagcccaacacctgttcaatcggacgtacacgtcggaccgaacttgtggctcaacaagcaaaaaccaagaccagtgcaaactttgtgagccagtgagctggttgaaccgattggtttttaacatgaactgggcattaatccgcaatggttagatccgttgggcatatgaaaatgtggatttttttattttacttttttattaaattatttaaaaataattttctatttcaacatttaaaaagtgcttcatccgtttcatattataagattttctagcgttgcctcattaacatctactccctccgtcctaaaatataacacccttagatttgtcctaaaatataacaacttcaccacctcttcccaaccaattacaactttccaccattcacttttctcacctaccttcgctactaatccaatcacaatcctcagcattcacttatatctactttcttaataaccgtgtccaactctaaaacttcaacggaggaagtatataaatgtagacaatgctagaaagtattgattcataaagaacactgctcgtattaggttgaccaacaatttaacgatggagtcaatgagcaacgtttgacattacacaattacaggctatgcatgcatggccctaattaacaattaatgatcaataatctcaaaatgtaaatctgaacacgtacagaattaattaattaagtgattaaacacggagagcgacgacacacttaccctctaattaaattaaacatcatcgatcgatcaggcacatacacaatgatcaattttaattatctacttgcattttgtgattttactcctccaaccttctatctctcccatttcactggtcgctgccggtggcgggggcggcggcggcgccgtcgaccttgaggggctcccagtgcgggacggcgtcgctgaagaagcggccgacgacgcgctgctcgaggacggcgatggcgtcggggtgcttgatgcaccgcggcgtcttgtactggttcaccgacgagccgtgcgacacgcacatgtccatgagcgcgtcgaacgcccccggcgccacgacacggatctccagcggcccgatcgacctgtcccggctcctgcaccgccggtacaccgagtccagcccggcctccacggcggcgcagcacgccgccatgacgtgtgccaccttgtccttgtcctcgccgatgtcggctgcgtcgtcggcgtcgtcatggcatggcggcggcggtggcgagggagagggggtgagctcccagaagaggacgtagtggccggggatggaggaggtgtcggcgtaggcggtgtactccgcgaggacgcaggagagggggtcgaggaggggcttcgcagcggtgacggcgcggaggaggtcgtcctcggaggtcttgtcggtgtcgacgctgaggacgacgttgcgccggtgcacgaaccggaattgcggcgccgcgttgtgaaacccggccacctgcaggatgtcccccaccctgtaccggtacaaccctgcacacaattaattattaacccaattatttattattggattattaaaacgaattatttgggggaatgatatagtacggtattccgtttaaagggatgatattctagaagtatcgtctgatacctggcaggtatcgcttataccccatttgaacaggatgatacctcagaggcatcacctgatatctggtaggtatcagctgatacccaggtgatacctccgatgtatcatcatgtccgaacggggtatgttatatagcatttttcattatttgctccatcctttaaaaagtatgtttcctcagaaaaaaagagagtttctaatgcattgtttatactgcttgttctaaactattggttaagtttgtttatcaaaatatttaattcatccctagtaagtacaatccatgatggcgatccgctaaatattaaaattcaaaatgggcctcacattacaaactaagtacctatatgccttttttttttggaacacgtgattttttttggtaggtgattgttgtggcattttttaagtgattttttttatgtgaggagtgtgatagttgttagtaaaatgcttggaaaacaaaatatactaagtattccgacaatgtaagtaggggagtaagaagttgttgggccaaagaaaatgccagcacggccttttcagcccactgaggatacctgtcctttttggtgcagaggctctgtgtttttagcctgggccctctaaaagaacacctttctatctaaatttcttttaagtgacatactatcttttgggataatgaaactacataaacatttcaatccgtgaaatttactgagataaagaggcacataaattatactaactccgttcttttttgtttaacattggttactgcaaatttgcattaaccaacgtcaaacattgagagatgtaggtagtactttgacaagaagtcagtttcagtgttgcttaattaagttctggcaaaaaaaaaaattctcccactgaagtaataactatattttattcttattactcaaaataaaataaatatgcttcaagataattagcaactatttaatctacctagccttttttttgcggaggactttataaattttaatactgaattaaattgctgaaatattttggtacacatcactggccatgcatatgctacaataattggcactttgactttgtgccaggtcacacacttgtgtagggcttttccacgtgcaattgctatctatttgattcagtattgcattaaacaacttttatttaggagcatagtttatgtatggcggatccatcagatgatgtgcacagtccattttttttatggaaatgcaaatttataataaatttattcagctggtagtgcagggttgagagaggaaggtcaaagaaatcggatattgttttaatatgtcacatctcgatcaacttttttttgtgtcatctatcattgattcttccatgcataatatatcattgttttcagatgatgcacatatatcattttgatttgggtggaattaatgaatccttgagtaaatttaatcaagctaggagataatgcagtggaagtcaagcactctacgcactgcattaatcaaatgaggtatatgtcatatatcaaccatgcagcttctctagtgatctgtacaactgaactttctcaatgaaaagctagacgtatcattttttatcttttctttagctaataccatttttcgtgtagtagtagatagcatcatacatatataatgtttatgttgtcaaatatttttttaattttcctgcaactatttttgttttacccctcttaataattaagtatgcaatgaactatatattgtgactacatcctttcttgtgataactactggttcgtaattagatagtatgttaattatcaagatatttttcaaatattctagtgatatatataatttccatcacccaatatataaattatatacatattacacagagggagcaagtagttgataccaacgtctccatgtcgggttaaagtaagtataattaagtgcagacatgaaaggctataggcaagctaggagataatgcagtgggagtcaagcactctacacactataccccgttggcctagtagggaatcccaagctataacttaattatttggtcaaactctgaaaaaaatctactcaaataatcaagttaccaatattttaatcttgccacatctcatcacaagaaacataagcaactaaacaagtgtgctctttacttattccttcaatataaaagaaatggaaagtacagtaagctaataaaaatctattttatgttaacacccatgcattgccttggattaattagattaatttgaaaaatggtacctaagaaaataattctctgactccccaaccaatcgacttgcagttagcttatagcttatactacttgctagtaactcttatttctcgatgaaattaaattaaaccttcttttagatattaagtagctagcctcaagggaaaagatgtgtgatgttacttctgttgtaaactaaaaatcgagcttgtgtactgtggcttagggaagcagaattcattagtgtgtgactgtatccaccattagaggaacaacagggagaccacaaaaaccaaaacaaaaatctaaacaagttaaaagatagaacaggtgactcataaccttttcgtctaaaggacacctgcacttatctttcgaatagaccacaatgcatgccaggaatggtatcacatcgcaaaaaagtttcattttattgttttggtacgtgccaccgcaaaaaacacggagctgaaaaataccatcattttagcatcgacttgtagaacaggtcctacatgtcattctcatgtacgatgtcattttgcaattcgcgtatcttagtaaaggtggaacttacatgatgattttttttctcaaggtgcatgattattatcttcattatggaacattagaaaaacgttttcactaattcatttcttcttttctgggaaagggacttcacccctcctatttcgaggagatataaataagatttgcccaatttggatcgctaatcctctcctataggggcacttcatcttagctatgattttctgaataatggttcctacatgctgtgtgtattgttgctacagtttccgtgccgtctttgcgacagttaattagttgatcaataattaagtaactgtgctacatgttaatatttttatgttttattcactttaaacttaaaattacccacccgaaaatggtaaaagaaaattcgaggaacagtacttggaaaaataatattacctctgtttttacgcatgacgctgttagacttttccatagcgtttgacttcgtttattaaaaaaataatataaataaatatttaaaaatatatcttaatattatggttcctttgttgaaacaagtcacaacaaaataaataacattttatatacttttttaaataagttaaatggttaaatgttggcgtcataccatggaggtagtattaacgtgagacgggctcaaccaatctcagccgttgattttgcgatcggacggcgttgataaacccatgcaggaggtgggaaagaaatcgaacgggctgcacacgcgctcacctgtgaaggtggtgacgacgagctcgtagtaggcgccgacctcgacgccgacgaggtccaccacctcgccgtcgcggaccttctcgccgtcgccgtccttctccaccttgatgaactcgtagtagcacatgttgggcagcagcgtgtacaccacctcctccggcgggtccagcggccggaggttgatgccgaagtaggactccgacgacgcgtacatcgtcgacaccagcggcagcccgccgccgtagaactccagcagcgggatgtactgcgccatggaccccgtcacgatcacgtcgatgtacttggtccgcggccacagccgccgcacgatgccccgccacgacgcgccgccacactcggcggcgatggcgtcggcgaggtcggggtcggcgcgggcggcgaggacggcgtcgacggcgccgcggcaggcggcgtcggtgacgacggccgggtcggcgcggccggcgcggatgtcggcgcagagggcgcgccagtggccctcgaggaacttgacggcgcggaggaaggcggaggcgaagacggcgccgacgcggagcacctcgccgcggcgggcgaggccgcagagcagctgcgcgtacatgctctggcggctgtccgggcagaggatcgccgcgtcggggctcgtgtaccgcgtgtacgggctgtccggccgccgccggaagtggcggctcttgtagtagctcgtcagcaccggcctcgccaccatccccgacgccgtcgtgatctccggcttcacgaacagcaggtacatccccctcccctcgtccagcccctccacgtacctgcacctccatgtcagcatccatggcgatcgatggcgaagccagcgagagagactcacttgttcatgacggggacgaggaggttgtagaggaaggtcttgcggtcgagctcctcctccgtcgccggcatcagcttcggctgcccgcctgacgtgccggagctgcggcgcacatcgccatgatcgaccgagtgattgtgtcaaattgtgaggttagccatggcgagatcgagatcgatcgagcttgagcttacctcgtgaggagctcggtgatgggcttggaggagatgagcgacgacggggcgccgttggcgatgcgctcgatgtacggcttcacgtcctcgtactccaccaccggcacgcgctccttgaacgccgcggcgagctcgtcctcgccgccggcggcggcgacgacctcgtcgccgagaaaccggcggaggtagtcggtgccggtgttcatggcgaggacctcggcgaggacgcgccgctggacggcggcggcgcgcgtggtcagcacctcgatgagctccaggcacgccggcccgtcgtgcgggtcgcacgccgggatcatcggtggcagcgccgccgccgtcgccgtcgccggcgccggcgaagaggcgtcgtggtcgtggtcgtggtcgggcgcattttcagacgacgtggacgtcattgttagatgatccatgcatgcatgcactctggcctagttctcagcttattcagctttggtgtgtgtgtgtgtgtgttcttgtatgtgtgcaagctactgtttttgcagaggtgagctccttcttggtctctatgtgttatatacatctcatcataagcatgtggaaacttttttagtcggacaaagagagaaactttttagacaggggtgaggatcctctatcataatatcactaccattatagtcattggtatggtatgtgagtccaactctactattgtctcacacgtcagtgtctgtaatggtagattatggtagaggacgtgaaccctttagatagagaaatggagaaaaaaatttagggagagaaagaaagatttttttttgaggaaagagataaatgctttttatggagagaaagcttaagagagaatttgtttagaggaagacaaaaggagaaacttctttttagatatagagagaattttttttagggagagagaggggggagatgtggtgtggacttataggagtgtgaaatttttttgtgtgtggtgcaacaaaattatgggaaagagagcacaaggtagtgtgtgcatgttatatttgagagaagggcctacacacatgtgaccatgtcttggaccttgtgattagatgcagctattatgggtcaaagttcatattggttgcctgcatgcctctccttaattttagtgtctctttatgtttctgtcattctgtgatgactgtttctttttgatctcttggcaaatagagccaaagttcagttcttaccagatgactcacctgactttcttctgaattttgacagtccaaaggttattagcttagtcattgtaaactacagcagaaatgttcagactctgaactccagtatttagcatatatacatgcaaagggtagaagaaaatgaacttttttgagtttgacgaaaagctaggtcaacttgtcacttgggaaatggtttgcatttaaaagtgcatatgcatctgaagttctgaacttgctcttcttctacttcttcagccggcaatctgacaggctgcaggttctaccatataaaaaagaaaaggggagaaattaagaagatttcttttgatgccctttcaggtgtaaataaaatactggatatatatgagtccatttgattccttgaccaatctgaggcaggccgaaactgttgtaaaatatgggcaatattatttttctgctggatagccatgtcacctagaatgtactgttgatgctatttcagatttgtttatgtggtgccaaatattgtagacttcttttattcagtatttttttttctgttcctgctttttttaaattagtgatctgatgctcaatcaagtgcatacaagattggctttgacacaacagtctgaacttttgacagaaatattagcagacaaaaattaatctcatgccagtacaattttccagtgaccagctgttctccggaggttactttaatatctcgaatacgtctcttgttgctgatgcttttatgggtgcttatcaagggagcatttttagtggaatgttaagctgacttgttgggacaccttaatttcagtcaagagtataatgacacacacatgggaaaatctcttgatcccaagctgtctctcttttgctgctgcagctgcttctgcttctgaatccaatcatgcctgctgccaagaagtgcctacaaattcgacttgttttttataaaaaataagaacacaaaactgtcagtaggcgtaattgaattattcaggctcccctgcactgttgcatcacttgacaaccttgattggttttttaatcagccaatcttttaaatcagatgtgagatgatttagccagtcagtagaaagaagtaaaataagcttgggagagatcacaaggtcaggtctgcaccagctagctgtccagcttttggtctcttgctgccattagtataagatatgtcatagttgattgatttaattttgtcatgttgctctcatcaaattgacacacaatatgtgtcttattgcgtctctgttatttgttactacctcctcccaaaagtaatttatttttaacctattttgcgtataccaatataaaacaaaaatactaaaatatttttaacttgagtaaacttcaatgcacttgtccattacaaactacaaagcattgattgctctaaagatgaggttttcgtgagacaaataaaattaaggaaaaataaagttattttgggacggagagagtactgaactagcatttctctactagcttcaattatagcccctttcgataatggaaattaatccagctctccaattatggctaggtattctgttctcatagaccatagactgcaaagactgaacttctgcaacttgtacaaagtaagtgccagcttacttcagcaaactttctgctacttgtgtattctgcaacttgttgtttgaaagaacctagttattctgatcataatgcatcagtccttgtattaacaaataatttctatataaactaattaggaccatgttacagcgctgtgagctagctgcatctcagttgcagaacatgacagtgtgactgactatatatgccttgcattggaaagagagaaaactgatggagtcaatcaacacctaatagggtcagtaaataattgggcttgtctgcaaagaacaaatgctataaaaagaaactgttgttttattgtttgctagcaaaattcacacagtgttgggagaggataagcctgttgtttagtgaatatatcaattgaatggggatctgctagattcggttcttaaatttaagtaacagggaaaaatatgcaagatgcaggtgacaacagcttaattgtgcagggggcagaagacccttgaaaagggcaggaaaagaggaggaaaacaaggaagatcatgtcacttctggcacaagctggtttatatactaaaagccaaaagccattgcatactactcttctttcacactcacgctctgtaattctgcattatccaaaatgaaatgcagggatctgagatagacactaaaaggaaaataatataattaagtttaacaacgaggaacatgaatctcattgagaagagctgagttggtgagcaatgacacaaaaaaaatgacttagtcaacggtgtgaaaaaacaagtttggaggagtgccttgtctccactttgattcttttatcaaataaaggtggtgtttggatccttggacttaactttagtcttaatttagagtattaaatatagactacttacaaaaataattacataaatgaaagttaatttgtgagacaaattttttaagcctaattaatccataattagataatgtttactgtagcatcacataggcttaatcatggataaattaggctcaatagattcatctcgtgaattatccaagattataggtgggttttattaattgtctatgtttaatatttataattagtgtccaaatattcgatgtgatagggacttaaaagttttagtcccatctaaacagggtcaaaggtcagtgatgtttttttcacccatgtagataggatacaaataggcatcttggggaaataaagtttcaggaaagaagacagtgatttgattctgttcactttagattttcaatcaacccataactgccaaggtacaaattaacagatgcaactaaataatttgatcattatgttctacactaaataacagacaagcatattgaaattcaatcctaaagatccatcttcgtcataacaatatgcagttcctaacccaaaacaacataataatgttggaatgaacacaatttgccccactgtggagggaaatatgcattattcgagtgatgatcgattcatgtctcttagcaactacagtagttaattagaaaagttgaaatttggtaaactaattccttcgattttggtttaccaatggccttttaaaccaatatttcgtaaaacgatggcactcatcacttaacaaatgatcatctttttttgttgtggatctgctctacaatatataaattttgtatctttagcatttgaagttacctcaccaaacacaaaattacatagtaagcactacatcatcatttgccccgtcaacgacgactcgagtggatcaaatattaggcaaattaaataaaaaaaaatggtcgtttcggtgacccatagagctgctttgtgtcatgtcatctctccaatttatatacatatgttcaattagaataggaactctcaggaaaccacttggtactttcttgactagtgataacaatgttaacatcctccaaagatgcatagatagaccaaaggaccaccactagcactttttctagtttgaagagataatattatgtcaaagtacaagctcaaaatcttgtcctgaggaccacaaggcattagtgagatctcactattctcatgcttcccattaggatgcaattgtatgggtattaaccatactcaaagcttgatgaactaatgaaatgctagcaaagtacaactgactttttagttggaaaacttatcttgcacattatatgtatgttgtattacttttcaataactagctagtagctagggtcgctatagactgctaactgtaagatgttttatttcattaatccaacaggccaaataatatcattcctaataacatcatgatttcgaattttcaatatggtttacttgcttatgtagttatgtgcaacaaaaatccctattggaggattaattttcaaactaacgtactatgaagaaaacccattttccttgttattaacacgctccaaaattccaaaactaattagttttcaaaaattctgtgaaagccaacgaagcacagggacatatggctggttattacctagtctggtcctggtacacttcacacaacaacacagtcacactctagtcagtagttcagtattttttttcccctgaaacaagtgttgtctctgaatctaatcattttgacaggatgggcgcggcgaccgaagtgcagcagatccaagaaatgagtggtcctaagacaaaagaggagggggatagaaaaatatgaacaaggcacaacttgtgctttgtgaaaccttgcaagatcaccatgggagacaggccacatgaactcaagtgctgctctcaactgatggaataagccatcacatggcgcaatgccgataaactaaccatccctttgcatttctccaagcaagaaatggtcactattctagctcctgaaaccctcccttcaaggggctccacatgagctatgcacatggattattctttggtcagccatcactctttgcacagctagcatgatatatatgttattgcagctagctcacataactgtcttgcgctcaccgaccaaatcttcagttattgtgcttgatcagatgcagcatctgggataaatttagctgtgatctagccatctagaaaagaaaccatttcagatgcatgctttgattccaactgcctcatttttgaagctcctgatgattcccttctgaattgtctttctcctgcaactgcagattggcacatatgttcaggtgggtgagcaaaggccaggaggaatcctttgacccgaaagctttgtgtccagtgtgttgtgcctgtttggagctgaaaagtgtgcacaaataattatgcaggttatctgaaagtaactaattcaacacaagtatatataacaataaccagtttaattcctactgaaacagactggaatttttactggactatgccttgcggtaacacggtatcagaaaaaaaaagtatgttatcaaatatagacaatttccctctagatctgtctcgcatatgaagtagtttctgcaatacaagagcgtagatactcgggtaattgtttctttgtttattgagtcatattttgtgttttattttcaatattggaagatcatgtctttgtacactctagtaagtaatccactaataaatacatatatatgcaaatggtgacttggtgcaattgaatcctaaccactcagctcaggtggttgttagttgatactgttcttacatgcttgtctgtctgaaaaccatccaacaaaggcctataatctacttaattaaaaaaataaaggataaaacaaaaatggttaccccttttaaatacaggaataggaaaaccacaagaattaaatacataaacgcatattgaattcctataggaattaaaaatacagaaagttccaaaactaccgtttggttgacacatagaagaaacacatgaattaagatcagtcaaaggaagaagaaaacatgaggcacaaactataattattttcctccaaaatttttataggattatccgttccatatgaatttccatgattcaattctttgtttcaaaggttttcttaggaattttcctatagaatcgaaatccttcaaattcatatgtttttcctgcaatttatgttagaagctcacatcaggatttgccattcattcctctatcatttttaggatgacaaataattgccatattttaacctataaatcatagactaaacgaagggtagtagggaagtggcccttcatagggagatggagtcataagcattgatacacatattttcttgtacttgaaagaaaaattataagtttacggatttatttcaatctccattaatctgattggttagttaatttcaagatgttgtttcatcattaattttcaatgaatttcaatatattttgaatgaaattcaacaaatttcaaacaaaaccactcaagatgcacatgttgagccagctcgagatgttcaaaattcgtaaaatttgttagagattcgtcatgattgtgaaccctgagtgcaactgtgcctcctccttggaataaaaagtgcatgggaatacatactctaggaatgtggaacaaagccatggatgacgtatctgcaatcttgggctaaactttgggataggcagcgatggagccagtggtgtcgcgaagcctagacgactaatagtactttcagatagttgaccaattttttgggatgtcaacagctgtcaacagtggagacatcaatggcggagcctaggtggccacccgacctgcccggcagctagcttattagttatggcatatctcaaattttacaaaattataatggcatggttacaattttccctatcagttatggctattttagtgtcgtttttgctgtggataactggatatggcaccatatttttgctgtgatctcaggtcaattttctgactcgacaaactaaatgctctacacaaaattctataccatatttttgctgtgatctcaggtcaattttctgacccgataagattggatcgagacatcctggttggaaagggagattcttcacctcggcagggtgacaaactttggtctcttctgttctcagtgccatgccaactcatcaccttacagccatccaagctccaaaatgggtaattaaaagaatctatcgttttcgaagatctttcctttggaagggtgaggaccct

SEQ ID NO: 5548 - DNA, 57603 bp, Oryza sativa
ccataaatatgaaacaatcacggaaatccaaataaacaacccgaaacctaaactgacacagagtcggccagtctgaccgcgccatacacgctggtctgaccggccaccactgcccggtctgaccggacccaaatcacagcagtacctgtagatcacctgtaaaaatccaatcatctccaaaaccacttcgcaaataaattccaaatatcaaaaccaataatctccaatgccaattgttcatcacagaataataataaaaaacacctttgattttacagtatattcgacacctattctaaccaactccaccttgacgaatatacgccacccagaagtagtagaatcaccatgccaatccacctgtcctccaaacttgggttgtcttctttgcagcttcaccacgagccgcccgacgagcctgtgctagacccaccaccttcgagagactcagctatcccaataatttcttcctctggactccacctacaacaatgctccaccttctctcctatcatcacagtcgtattgccaatcaaaattggattccttcctagctgccacatcatagactccccgaaaaccatgttcatctctatctactgtcttaaatttgacttcatcttatccatggctagatagcccatgccatcaccaaatagataaatcaaactcgccagacttgaagagaaccctttcttccttatcgtcttatgaaccgagctaataaatccaacatccacgctttcccgcatttgtagactgaaccgatgatacttcgagaaaattcaccattgctttgaatcacccaaagaattaccgccatagcgcttgctcttcctcttcagtgacgcagatttcatatatccccatcgtgtaaaccccgcagatcttggatatatcctatactgccaaacagcccgttgatgccctcaacgattttcacccgcagttgcctgtgatttttcttcagttctggcttaactccatatatctcaactcctcgtcgagtcccggatatatcctgtttatgtcagataacttcatatgtgacctgaccagcctattgctaccagtctactcaccctttaaacttgcaaactatccatttgtagaaccgtcttgtccttcttccggattcgttaacaagttcctgcaacgaaccacctgtctgttgaactcggtctaaccgtccgaactccacagcctaaccagtccgtcggtctgaccagtggcggacccaccatgattctcgggtattcctgggaatacccaacgttttttataaaaaaacaagtatacttctagtatatacacatgtacacatatttgtacacctaaattctcaattttttgatccaaacacagcccaacttgtctcttacgatgccttcaaccaacccgacccactccgtcatgacccatcagacatcagttgacccacttagccaccactcttccagacagccccctctcgctctccctccttgacccatccctccctggctcggctccctcgcgccactccccatttgcaaaccctaggtggcggtgcggcaagacggcaatcggcagcgggagctggaccgtgctaccgcggagggggaggccattgccacggcgggcggcgcccgacactccgccaagctaaggcggtcaggtcggttgggtggccagcggccgcgaggggcaaggacaggcaacggctcagtgcttagacgggaatacccaactttgaaatcctggctccgccactgggtctgaccaccctgccggcccgatccaaccgatatacacgcacctctgttacacgcttcaaccaagccttctgtctcgacgaccagcaatatgatttaagcctgcgtgccaaaagttgccgacgttgagtgcccttgctgtcgtgcgctgtctcgtttccttgatccttctacgtccaaagtccgagttgaatatgcaaccgacttctcccttgtcacctcgtatatatcaggggcggagacatgcctagggcagctagagctcgagccagtggcggatccagaaaattgattcattggtgtcataacgtgtctatcggtgtcatagtacactaattatgcttagaatatgatgttgtaatatatgaataagtagttttgctataggttttattgaaattcgtcagtgtcgcctgacaccgatgactatactgttgatccgcccctggcttgagccctaggcctgcctctaaaaacttgcttaaattttgttgattcaccatgtaattttttcagaaaactaatactcaattagtcgagccatatcttaactctagtcttatataatttctggctccgccattgtatatatcgtgtactaacatgtatatatcgtgtactacgatgaagaatctgttacggactcctctccaaacagcacccaaactcaagtctgactagctcgtaaacaacttttgcacggtcattaatctctgtgatgtctcctcgttgcaaagtctctcccatctacggcttgctgccttgctgtatgcaagtccgtatcagctcgtgcttgcatgcgtactgcacccaagccacgtaatcaatgcttttgaccaagcacatgcccaatacaccaattaatttgcatgcagcccgtagtttttgtttgtttactttgcatatttacttgcttgattcgtcgcatgcatctcatgtgcgcgtgtagcacgtacacatacatgcttgttcgtgcctctgcacacaccgcagtcagagtcctcgtgttcaccgtccacgaccctatcgtcccggccctccacgtccactgcgccgcaccacgctcgctggcttcgccacgtgggtcgggcacgttgtccatggcgttacccctccgatctctccgaacgccttcggccacgttcggccccgtcttccgatcatgttccgccatcgccggtctgatcgcgagtgaggtcgtcgccgccgcaacgtcctcgttgtcaccgtcaatctcatcgccacggctgacgacctcgtgtttcctgctccacttgtcttcttgatgcaatgctgaaaccttctgctctgatactacttgttaaagtgcgcagcccggcccaccaaccgtaggccaccaggtcacattgagcctgctccaccacaggcccaaccggagccataactttaggtcctaggtctacacaacccaaaagactagtttgatgggtgaggaccgccctcaccttttaaatcgtgctcctccatcatcaattactgatgtgggactaaacccaacaatcttccccgtcacatcaacccatgtgacccctaagacttgttacttgggcctcgggtctaacaatttcccccgtcacatcaacccatgtgaccccgaagacttgttacctagcctctccactatgtgactcatggaaattgttttgggttccaaaccttgggttctgataccacttgtggtggaacaggcccaatgtgacctgggtggcccacggtgggtgagccgagctgcgcactcgaacatttactactatgcaattcaattttattattttttgcactgtctatcttcatgaaaagagttgcttgttgagtcactatatatatcctaggtagaaaatttgtgtcacgatcttaatggagtctcacatggatacacctcttttcctctcaagccaagatacagatttgcccgtaggtattcaaaatctccctcacctgaagtttgaaccaagggaactgctcttttgaactcttttgttagctctgttctgtagataacaagctattcaatcatgtttcaaagatccccttaacatatatcatccccttctcactgaacttgagctccttcctcatctgctccacttggacatcatcaccccgcacaagaatttcggatacattcccgtcatccgataaaatcattttgaccttgatctcttcttttcttgatgcctttgtccagtagtatacacccctgaaccatcaagaagggacaggttactacatttgacctggaaatttcattctaaatttctgctatagagttgcagagacatacgccaatgggcttaaggtcataagccagaaccagttgttgccaccctccgggactgcaattgatagaacaagaccgacgctgccaaggctaatgcaggtgcagaaggtaagaagtgctgcttgccccctgctcggcaccatagtgccctcaaaactgcgcaaaaaacataaatcgtgcctcattttgcattgcattttgatgtgaaacaaaatgcataagcttatgctagatatgcactatataaacaacatgggcagctttacactgtacttctctacggtaccagggcaaaactaataaatacaactgctatactagtttgggtttccattctattacaacttccaagtaacttgtgagtatcagaattaatgtaattctagcgtaaagcattgttaagtagaaaatattacttgttcatatctttgcttcaatcaagttctgtgtttgaatcaccaaattactatgattgttgttatggtggagatcactgtgaacctaaaggtacaacccacaacatttggattgcaagaagaataaagaagcacattaacacagctggtgtatgtgtaaaactgttgtacaaagtcccaatggtattgtcacaccgtgctaaaagtatagtccaaaggttatcctgtacttctgcatatcatagtcataactcagtagattactgcattaggatagaaatccgatctggctacttacgtgataacctcgccacggtcagagatggtgaagttgttacgggtgaagaacgagaggatctccccagccacctggttcggcgccatcgtctgcccttcctccttgacgaatgtcttctgcacaacctgcactagccaatttgacatagatgacaaccacacactattggtggacatcatgcgaacagctcaaaccgtcagaatgaaaggtaaccacaatggttcacgattggtggatggaactagcaaacactaatttactagtaccaaaaaaaggaattcgcacactaatccacagcacatctcgcttatgctgctgtagtgtttttacttctcgtacaacttttttatacttgtatatataacttttactcttcatgttttgaatgagactagcatgtctaatgccggttaaaaaaaaaggcaaaccacacaaccatgctactgttttcagcaacgaactaaacaacatcacctaaagaccgcacaattcagagaaccagcagccaaacataactaagtcaccatgaaatttctctattcgcatcattgactagacagatttataaaaaaggacgcaacgattttgatacagcaaagcagtcatgaatccctattggatttaatggtggttcttgcactgacaagaacactctgcaaagaagaacttgaaggaagtgaaaaagcaaagcacactcagccactcgttgagctatctacagaagcagcagtcacctccaaagaaaggaggaaggaagacagccatggtccaatgcgaagagctctcgaggctcgagcgcgcgcatggcgacgggcatcgccaacactcgtcagagcgagatggaggaagcagcagaggtggagagccgtaccttggacttgacggagcgcttgatgagcgaccagaggccagggacggagagcacgaagagccccagcgacgtgtagtagctcgcctgcgagtaccccgtcgccccggccaccgccgcgtccaggagcacggcggcggcggccgcgccgccgctgctgtcgacgagcgacgcgcggggcgggacgacggcgcggcgggccctcgcccgtctcggcacggcaccgcgccaccggcccccaccaccggccgccgccgccgcgccgccggcgagcgacggcggcggcgcgcggagaggcgggaggaggaggcgggtcgcggcggcggtggcttccatttgggtcgcgggagataaggccggggaaagtgtattcggcgatgtgttgatttcggttggagtgggcccacatgtaagtgggctgtgggccaggagttcgatgttgggaggaggaggataggacacgtggtagaacaagtgcgcttggttttttttttcttttcggacaaaaagaaatttatggcagttcaaaacaattccgaatttttgtagttagagaaaaccattgcctatgaaatactcctccgttctataatttaagggattttctcaatcaaatttgtctaataaaatcataagacagtattatattcttcacctaccaacttttatactagtttgtttctctaccatctcacatctacaaacttttatagtaccttattctttcacccattgccttgtgtcacatcagatatccttttactacttccttaatttttaccaaaaaagagtataattccttttattcacggatgaagagagtataagcttgcttttatactgcatatgataaaaaaaacctcgtttaaaatcagtacaatgtaaaatgtgttgatccaaaaacagacctgggagatctgcttaactccagtgcaggaccaaaggttggtgagatacggacgtgccagtcagtttgaccctgcaacaaacaagatatgatgagccggtcggctgacaagccaatggagtaattacagccgatgccgataccagccgatgttcgatagggttttgagcaatcggctatatgtatgtagataatgatataaagtcgatccgatgatgatgataaataacaataatataatccaatagaaaccaatcggctaataatgatatgatagataaacatcgatccgaaggttaaagcatacatcggctggaggcccgatgtcataaaatccacaagattagattaaacagtgaaacctttattgtcatcggctagatccgacttatatgtatatgcaatccttataagccaatgcaacgtctaaataacttatcggctagtaccccgataaaacattagcatgaacctatcggcttaacaagacttatattatcaacaacaatctagtagcacaaaattgtatatgattatctaatactcgatgagccgatagatctatctaatgtgatggatataacaaatctatttaggacaacattgtgattgtagagatatatcggctaagacagaagatcggacctaatcgagacagtcccaactaaaccgatgcgtctttaaatacaatgcaattagagatagaattgagatatcacgtaggcaaatatatcaactaaaccagagcgatccaagagatcgaagcgatgcagccttgaacaacaccaacatagccgatagattcatcagggccggcggaacgtaggacttaccccttcgccggagatcaaactgaaccgatgcagccccgcgtcaggtgccaaattccatcggatgataagtaaaaaccttaggaaagagggtggcgatgcgtcgagagtagttgtattgatcgagagataaattacaatgaccctgggtgtacatatttatacacatgggaagatactagtccttgtaggacaagaaagaaacttttctaaacataaaaggaaaatataaagttcttacactaaacacactttcctaaaaataaaggaaactacttcctccgtttcacaatgtaagtcattttagcatttcccacattcaaattgatgttaatgaatctagacatatatatctatatagatttattaaaatcaatatgaatgtggaaaatgctagaatgacttactttgtgaaacggagggagtaacaaactgtcagggttatggataccacatacctaatagtagttgactaaatctcggcaggatccaccacataccatatcttatacggaaacaaccttcggatagggatggagttccggataaggaaagacaacaagagttctacatggaaacgacaaggactactcagattgtgtccatattggttttcctagttctacttggacaaggggacacctatgggtataaatacaaggccccctaggaggagaggggatacggacaacatggaacaacagaagccacaacatacaagccaacatacgccaagacaagacgccggatatcgacttcagagataggcatggctagtcccctgcggtgcctacggataccgtcaggagagatatagcgttgtctctgatctcgccggatgcggattcgaggaggaaagctaccctgttgtcgactacgagtcagaccttcagaccgccatgtcgacaacagttagataggctaccccaaatattgtactggtgtgattatgatgaataagagcaacgaccggcttcggccaacatgatgtagggttattacctgacaattcaggagcccgaacctatataaaaatcctcgtctctgtctcctttactacaatctcgcatatatcctagtaccaacgatccccgtactatgtaaataccagaatcgcgacatcaaacgtcgacacaaactattcctaataacctaattaatagataacttgccatgccgcatcctccgtgaacttggactcttctggataaatttcctttaattgatccgactccatcaagaatacaactgctggcgatttgacaactcctatcggccgattccaaggctttgaagccgatactgactctaggccgatgataacttcgggcttatcaaattttggcgttaacaaagctatacttgtgttctaaccttttctcatatgatccatatgaaatgttttattagtctctctattttcttaatacatgatataattttagaaccactcatcttatttaaaaaattatgtaaatataagacgaatgattaaacatatgtcaaaatcaacagcgtcatctattaagaaaataaaatatattttatattttttacccggcctttatgtccaaccagatatatgcagccatttaaattgggtacttagcctcttaaacaatctaatctaacataatctgaaattcgctcatatggatatttgaacttagaaccttgggatgaagatatagaggataatgaagatagtatatctttatgtcataaaatctatgtggaatttagttatatatcaacaagccattgttgatcaattgattaatattatcaatttggttctgtattgttttgtaaaatagttgaaattaggtgattctgaatattcaaccataaaactcatagttatatcacaacaagttataacatctgatatttttcatacctcaattgtacagcccaaggttctccgaagttcactctataatttatttcaaaacataataagaacgcaggctctattgctctaatgtagacatgaattatcattagctttgatatgctttttaataggtatggatttaggttaaaacaactcctttaccttttgtcgagccaatcctatatatgtacttgaattcttgttcgagagtttttatcgagggaattcatgtgaagataatagcatttactttttatatcgagccaatccttagtacgtacttgagtcagatattagcatttagttttgtaagtggtcaacttgtacccttaagagcacctaagaaccaggatattactccctccatgttttaatgtatgatatcgttaactttttttttatgatatgttcgactatttatttttctcaaaagaaaattatgtaattatcatttattttactgtgatttgatttatcatcaaatattcttttaaatatgacgcaaatattttttctatttgtataaaaattttaataaataaaataaatagtcaaacgttagttaaaaagtcaatgaggttatatatttattaaaatacctggagagtaataatttttcacgctcgtataccggccggtctctctcctattcttgctcgattctttctataaatcagttaatatggatgagatgataaagccgtgcctatatactcacaccttagaattaatctattaattaatacgttattaagcctaattgacgccggcggccacaaggggaacaacgacgacgtcaagccggaagtgttcggcttcggcggcggcgacactctcgccggaggaggcggtcgcgatggcgtggctgccgttcgatggccggccgcacatcgggctcgtcgtctacgacgacgcgcgcaacacggcggtcctggtgcgccgaggagggttcacggccggctcgctgccgctaccgttgccagcggcgcaggccgcggcggcggaggaggagggagtcgtcgtcggcggcggtggtggcggcggcggcgcgcgcgtccgctactgccactgcggcgtggagagccgggagaaggaggtgcggaggccggggccgacgcaggggcggcacttcttcggctgcggcaggtggacggcggcgagaggggcggcgtgcgattactatgtgtgggacgaggccgcgccgtcgacttttggtctcaactctcaaccaagtccaccacgtgaatagcagatggcgatgatgatccatctcgattgataatggcaaacaataataatgtcgattagttcatcattccacacaccattgttttttttattaatagttgctgtgttcaccagtaatccaagactacgttatccagatacggggatacggatatgcgatacggggatacgaggatactgcattttcttaaaaacaccgatacggggatacgtcaatatatatttaaaataataaatatatagaggtaaataattatgaggctgtaaatagagatagccaatacatgacatcaattgatcaatacaccaaatttttttagtacaggctcaccttagagctcccatgtctggtcgctagtactactaatgaatctgcaaagtgcagccgcatagccacgctagcagtagcagtacgtacgagtgctagagatgcactgccacttccaaaactcattggatttaggagaggagagaacacttagcactaagatgagatggggaaacacgcaagaaatgcagatcgagacttcaatgggaaagaaccaagtagcttggtggcgtactgatggtgttggtcttggcggccagtggagatgctgcacccggtggaggagatgaggcgaccggcggtggccctgcgcagctgcgctcaggggcggcgacgcgcgaggcgctcgagctcgattgcgggctggttgggaccctgcggcttggttggcgatgcggcggcggaacccgacagctagcggaggactcacgcctcgggcatggatgcggcgatggggaggacgtggcccgtgggaactgcatcagggattggagcaatagcaggcggcacggcgacggattggatcggcgcttcgtcttccatggatgggtttgggcgtatcaggagcgacgggaggggacgtatcaacgaagtatccgatttaatttattttttcgaaaatcgaagtaaataacgatacgtacgggatacgtatcggagcgtatccgatacggatacgtggcttttcagccgtatctgggtaacatagatccaaacatctgctaaaagcatttgtctagcgtagatggtgccaagtttgtcgtagcaatgccataccaggacggatccaagacagggagactcatctcctttttttcttcggccctcttcaatgatgatccagcagggagttcctaagctggatccacccttaatatcataattcacacatggaagttcctttgttttggctaccttccctaggtattctttccacagaaaatgcgttcttttggtttggctaattcctcaatttatataagcatacttttcaaactgctaaacggtgttttccatatgaaaacttacatagaaattgctttaaaaattcaaataaatgtatttttgatgtttttaataattaatactcaattgattatatactaaaagtttatatgttgttgcgtgcggctaatcatccgtttcaaaatgaactttagaataggtcctttaagtcgcccccaactttgggggctatttttaatacaaagatgaagtacactactaaaaagggttttttttcatgtggctaaatcatattttcataggcggagcccccaagtgtttgtgaaaaaaggaatttttgcaggcaggtagcacaacaacttgcaaaaagtattttcgcgggcgggtgttatgtcgtccgcgagcaaaaacaaaaatcgcaaaaaaaaaagctttttgaaaccctagttcaaatccaccctagtcgttgtcagatccgcgagggaggtggtaaccactgttggatccatgaggcagagggttgttgccatcgttgtcgatgcaatctgccgccgttgtcgtcgtcattgagacctcatctcacccgaggttgacggtggcggatccgtgagggagagggccactgtcgtcatcgtcgatgcagtccaccgtcgcatcgtcgagaccctgctgcacctaaggccagtggcgcagatccgctactcccgaggtaactgccatcagatccacgagggagaggtccgctaccaccagacctgtgaggggagccggtctctcccgatgcggcggagacgccctatggaggctaaaaaaatcatgagatacacttgctcaaaaaaatttacatatatatgatacttgaccaaaattattaagcatgtgacatgtcatcatttatatgcaatctgtacacaatagttgagcattgttttatctccaataatggatcaaataaatttatacgaatcttttttatccaggtaacacatactctttatatatttcttgctaacaaacaaacactaggatacaaattggtattaccatgaactattgtcctgtgattggtgcaaatcagtaagcaactactactaagcactgagatgcaagaatgtacctttcttgcaggctggcactctgaggagaacaaatcaaggatgctccgctgcttgacggagattagccccagccacattgctggcaacgccggacggcctgctcactaagccgttccgctgccgcgcgctgctccgctcgaggctggccgcgggcatcaccgtcggccactggccgcgcctctctgcccgtccagcgcgccgctggctgcgcctcttcgcctgccccgcgcgccgctccccacgcttctccagcgcgccgctagatccgccgctgccagcgcccgccaaaccgctgccccacgctccggtgaggaccccggcagacccctcaaaactgcgctcaacgagtaggagcaccacggcgctccagtgatgctcgcgacgatgacggaggagccgcacagcggcggcggaggttgagattggagtcgccaggagaggactgcggtatgggctcaagtgggaaggttgacggcctgttaggttagtttctttagaggatataaacgtgatatataaaataatatgaaacatctaataaacatatcatttgtagctcagtggtttgcacaccgcccctgaaacagaaggttgtgggtttgactcccatggccaacatttttttaagaaattttgctgagtaacgggttggcccatttcggggacgatgctgttgggctagcaccaggttggcccatctgtgggtgcagataggcggttcattacacacaatagatggcctgtttaggcttctataggtagcccaattagaacggaaaaacagattattaaaagaaaaaatgaaaataaaatctgatgtggcagtaaggcttgcctacatggacaaaagtatttaaaatagtacaataaataatttgtaacacacaaatacgtcttatgacatactaaatattgtcacttgatgacaatagactagctatatgacatttattgtgacacacaactttttattgtcattaagttgaaatgcctgaaataaaatgtcataaattatatgatatagtgacattatgacatgtgtcatattaaatacgtcaaaaagccacgcatatcttgtagtgacgttgttgccttggacccactgctgtcggagctgcagtccatcggcctcctcatgcacctccacgaacttgtagagtgagagaggatgaggagcagaggactcacccagcggcgattctcccatcgacctcaggtgaggagaggagtgggggtgagaagagaggagaggaggcattggaggagggggagaggaaagaagaaagggatgggacagctcttgtgccaagcggatatcttaagatggccacatgcaagaatcaatttttccatgcgggacttaactgaacatcatctaattttttttacatgccgacgttcttttagcccgcctacaataaatagggttgcgtctagaaaaaccgtttttaaagtagtggtagcaaacttcatattcttttttttttcgaggtcatactttttaattcgatgaccttgtatgcataaaatctttctattgtttgttcagtatagccaatatgtataaccgacgcaaaagtatatacattaacctccgtatcatagtgtagcaaaatctattatcggctagtatactgcatgatattgttgtgtgaaaacgaatcattagtgatattgttgacagttgcaaatagcaagagaacatatgcagtcatgagtcataagggaatatatataaattccttttaaaaactaaaggtacagaaaatgaattcaaaatgtttggggacctcaaaaagtgcgtcataccgtgtcgttcttgagtcacgcgcgcatagtttccgaaagatatttgaccagaaattaacgctgctgatgcgaggtcaaaattctcgtctacctgattcttttcagatttccaggcaattgccggggaaaatctgaaagcatccttacttaaatcagcgtacttgatggtgaatttacaccaaacaattttgattttttgagcgaaaggtaatttgtgtagctgcttgatcagcttacactctcttgaagtttctatatgaataccgcggcggcgcgcggaggcgatggcgttgccggcgtccagctccaggagttcgcctacttcgtggtcatcgacttggaggcgacgtgcgagagggggaggaggatatacccgcaggagatcatcgagttcgcctccgtcgtcgtcgacggcgccaccggcgagcagctggcggaggcgttccgggcgtacgtccggccgttgcaccaccgggagctcaccgattactgccgggagctcaccggcatcgcgcaggccgacgtcgacgccggcgtggacctccgcgaggcgctgcgcgcgcacgacgcgtggctggacgcgaggggcgtcaagaacgccgccggcggcggcggcggcggaggagggttcgccgtggtgacgtggggcgactgggactgccgcaccatgctggagggggagtgccggttcaaggggatcatcggcgacggcaagccggagtacttcgaccggtggatcaacctcaaggtccccttccggcaggtgttcgaccgcggcggcgcccgccggatcggactggaggaggcgctcgccgtggccgggctggcgttcgaggggcggccgcacagcggcctcgacgacgcgcgcaacacggcgcgcctcctcgcgctcctgatgcgccggcgaggaggggtcaggctcgccatcaccggctcgctgccgccgccgccgcggccgccgtcgcagctggtcgccattggcgccagcgcggccgcgacgccggcggccgccgcgccgggagtcggcggcggtggcgcgcgcgtgcactactgccagtgcggcgtggcgagcagggtgggggtggcgcggaggccggggccgacgcaggggcggcgcttcttcgggtgcggcaggtggacgccggcgagaggggcggtgtgctcctactttgtgtgggaggacgttgatatgtctcgagcaaatccacggccatagctcatttcgtatttaataataataataataataataataataataataataataataataataataatgtttttgtgctaataacttggacgagctatcagcctatcacgctgtggctttgtaactgtgtcgcagatttacgaaagttttacacttaccgaaggcgactacagacctgtgggtttggcattggtctacttgagttgagctatgagtgccctcatgaaaaaaaaataaattacgtcactttgaattgggacactatcgaatcactagctctacaatggaggtcacgatgtagtattttggtagcttttaaaaaataaattatactatagtaagttaaaattaaatttaaaattttgactgcggaaggtaggaggaagagcaactgaagggttgtctacataaggggacataaggaagatggcaaaatttgttacatggcatttaaaatatatagttttgttgccagacaccccaaaaacatgaatttgcccaataacactttaaaaatgtggcattttaccctaggacacgtatgcattaaaatataatatacatctcattgatgagagagaaaacatgcaaaatgttagttttaccccctatcttctcccccattctcacagtcatcttccggcaataggacgacgagatccctgcgtagcacctgtgggcaataggacggaggacgagatgcccggtgggcgacgatgcacctgacacggctcaaggtgtggtaaatggtgagcaaggtggtgcggcaaagaggacgggtggaattatgacgtgcggagggtgaacaagcggacgctcagagagcacctgtcgtcaggtgatggcgagacgctcgcatcgtgtgaaggccaccggcgatggtcgagtgcatggtgtgcccatgcctggagaagatgggctacaacctcaacaaatcgtgccttgtcttctgctccaccagcgctgcccttcgccgtctctgctgcagatggcacggatgaccttgttccccgtagcggtatgtggcacagctcgaagctaccggccctgctgcctatggtggctagcagatcgggagcaacacggtaaaaaaaaaaaggtggcagccccctagggggcgacggcagcggaagcggtgagcggcagtcctaggtcgcccgctctgataccatgttggatagcatagagacgagaggaatactgcataacgtggatctattgtattgagtcaggggaccggtatatataagagtacttagggaggagataaggaaggattacacatatggaaggagtccacacaaatcaatcatatcctaatatgactctaactaccatatactctaacactcacctctagcaacggctgtccgggacccacgcccgctcctccctcctccaccgacgacacaatcccaatctccaaacctctccccctgcccccccaatctccatggtgaagaagagagggcaacagtgccattttgttaaattctctctctggctcgaatgaaaataatagtttaatggtgttagtgtccagcagcaaattattcttgagcaaattgacgttcctatggtgtctaccaacaaagatcactatagtgcgtgtttgctgctatgaatgtactaaaatcttctatctactaattattattttatcttggtttctattgacgatatgtcctattgtcctgtagaaattgacatgcttcactttgcaatttttaccatcatactttctattagtcctgccccatgttatgtgcttttggttttgttgtctatccgatcatggccgagactcgagaggtgaattgttcaagatcgattcattaggattaattaggagtgtttttaaactgttggtggtttgttgtattgcacataggttgctcatgaatctttgtgtaactagcgggcattttgttaattggagaattagtgataattttgttgatggcgggtgaatccgtcgccaacgaccatggggacgatggcggtgggccttgggcaaggcggcggcgacggcggcggtggcggcaacggtctcccagccttgggcgtctggatccgtcaccggcgaccgcggggacaacggcgatgggcctcgggcaggccggcagcggtggtggcggctggattagggttccaagacggcttttgattttcacgtgtgggtgcttcacttgcacgaaaaaatcggattttcacagatacttcgttccagacaggcgaaagatccgcacgcgaaaaccgcttttgaccgcatggaaaaatcattattgtactagtgtgcgtacgaagcaaactgggattgaaaatgtgatgccatgaatgcaatttaaattgaaacgatttaggatgatactttttttaataagtattcaaagacgaaaccaatttgattcagtatgagtggtacttggtctttcatttgtaataatcaactatatatactaattcccaaaaattttagtctaaactttgtggagttgacacctccaagaccattcttatgggtaaaaaagataagatgtgttacgaagataaaggttttcatgtggctcatattctgtaataggctaaatacgagaaatatgcttgatagaaaatattatccttaagaagatgcgaccttttatgagtgatttgctttagtacagaaaaagaaactcccatacaactttttcttttcttgtccttgcagcagaaattgttgggagagaattggtacaaaaatgaatgataacctagaactctttcacatgttggtcttggcaagaattagattcataagaaaggaaaaatgtttattgcaggcatatctgaaaataaagaaataggaagatctttgagaatattactcatggaatggaagtctttctttgtccaagatgaatgactctcttagctccctgaattcttcttggttacaatggttataattttatttcttttattcttttcttgtttgtacataactttttttaatatatataacaaataggcaaggtctggtagttattttttttaataaaaaggaaagtgaaaaggaaaggtaagagaatggacaatagtgtgacgtcagcatttgagagaaaatgccacatacaaatttttgatgcggaggaaagaaaagtaggatataggaggatgtcgtcatatataataactagagaataccccgcgtgttctccgggattccgagtcttaatgcaagttgctgtggaattccactataaatagtctccctttgtcccatatttcttgtcttccagatttagggcttcacactgacaccataatttacaatggtaaatcgataattttgtggttgcatttagtttagtaccaaatattgataatgtttatggaaattggtgacatcacatttattccatcatatcaaaacttaaacaattttatcaacttaccaaaaattttgatttgactaaattttaaaaaggtttattttggtagtaataatcttaaacatgtcctcgctaaagattgggggagacgtggagtacataggagtatgttccagtctttaggtgtgattgctttaagattggtgacgccacgtgtcaagattgtagaacgggcgtggggttcaagtgcctctccccaacaggagtacctcgtcggcgacctgcggcggcggcgatgtcggcggcggcggcggaggccaccgagcggggcgagccctcgggcggaggcggagagatcgcgtacgtcagctacggcggggagcaccacctcccgctggtgatgtcgctggtggacgaggagctcagcgagccctactccatcttcacctaccgctacttcgtctacctctggccccagctcaccttcctcgtacgccctctcctcccctcacctcgcgcgcgtgtttcacaagagttcgtgaggatttgatgcgttcttggttgatttgatttgggggacaacccctcaaaaggcgttcgatcccaaggatggcaagtgcgtggggacggtggtgtgcaagatgggggagcacaggggggccttcagggggtacatcgccatgctcgtcgtgctcaagccctaccgcggcaggggaatcggtgagccctccttcgattctccaagaagagtttctctgtttgtttgattggttgattgactggtttgtttcaaaagggagcatattcttccctttgatagtatctgcacaagtctgtcctgaaaggaagcgtagaccactcatgaatctaaataagaacttaagaatcctgctgattgggaggaaagcaaagggtttttcagtttttgttccaattcgatctgaaatggctggcacctggtggagtggtgggcgatttagtacggatttacaatcttccatcgatttcgatatgatatccatatgtactaaataggtgtttttcccttgttatgcttgcacaaacttaattgagtatcacttttacatgtgtcaagaaattactagctataggtcttataagtctaatttgtttcatgatcctttcacactaccatttacttgttttttctctgtaatagttgctttgtgttgatatggtattatttttgtcttaacatcagcaagtgaaatatgtctgtgtagcagagtggaacgaaaactagcttactaagtgttactggttttctaaaaacgatgccatgttaagtatttagtaggatttctttgttctttgcctgcttgatttgcagaaaggaaaggcatttttttatttcttttatgggtacaatagccttctattgttcccttctcttaaactatataatcttctctcatcagtttcaattgagatttgtgctattattttgataaaatgttagttaactttgtttaggtggttttctagttttgtgtaggagtaggtattgtgttatgaaccaatattcccatgtttagttttccctgtgacagatgtctcgtgttgggtgcttcagcgattcagtctgtggcacatgagagcattttggtcgattagttctttatggttggagccatttagcacttcatctgatgttgtagtatgcagcctaaccttatcgttacatcaacttcttgcatgagatgatttcttcttagtgtcatacacttggaagcgtgctgactataattgatgtagcaataaataggtgtggtgcgacttgctaatgcatatatcctgtgtggggagtacatttttcataatacttttatcatgaaatgcacactgatatttacatatatcttggtacaatggtacagatagtctgtttatctgaaaaacattgcctttgttgtttctgtaatgacattcgcagcaaggatcttgacagctttaattgttgaatcctgcctgacatgaatgacctttctcgatgtatgaatagagtatatggtagctttgtcatctgttaagagtattgcgaaagctccagcttcagttcgaatagctttcctgaagtatacaagtgctttgcttttgcaaatggtccccatttgtcttttttaattttatctgtaataagcaattaaatggacactatgttggcctttatcagctaaccctctgtttcttcatggtacagccaccgaattggttacgagatctattcgggtaatgatggaatctggctgtgaggaggtaatcaccactgtgttgttatcttctcacccgatgaaaaacttattattatcctattgtcgttttggtacccatcacttgactttcttggtgtaaaattgcttcattgattattcaattatgccctagactaatctgcaatttccataataacaataatatctttcgtgaaattagtacaaaaattgaattatttgatatctgactcactctccaaccaggtgacacttgaagcagaagttacgaacaagggcgccctcgccttatatggtcgtttgggtttcatccgagcaaagaggctgtacagatactatctgaatggcgtcgacgcatttcgcctgaagctgctatttcctcgccctgatcctggtatgcatccaatgatgatgctaggcaatgagagagatgaccagcacatggattctccttacttgtgataccattctggtcgattgataggatgagttaggatccaaggcattttgctcttttatgtcagtttgatgatgcttttgtagctttgctgtaactcttgtaacattgatgtgttcaaagatagtatcttatttgacatggcattatgtttctttcaatccatgttagacggttgaaaaagaatgccttattacatactccctccgtttctaaatattttacatcattgactttttagcatatgtttgaccattcgtcttatttaaaaacttttgtgaaatatgtaaaactatatgtatacataaaagtatatttaacaatgaatcaaatgataggaaaagaattaataattacttaaattttttgaataagacgaacggtcaaacatatttaaaaaaatcaacggcgtcaaatatttagaaacggagggagtatatttcattacttggcactaggaagaagagtagttggggtatgaatttgtataccgtttcgaatatttcgatccatttcctaaatttatggattcattgatcttactggctaacccctgcatatgcggatatgccacacatcagcatctacccaactacaaactgcaagattcttcatattcattatgagcctaaaagtccttgcaaaacagttaagcctagaagttactatattataattcattttgatttttttcccacggcaaacttatttagttttgatcaaatttatagaaaaatatagcaatattttaaacataaaaacaaaaggccatcaaaatatattcagtgttatatttactaaaattaatttggtgctataaatatttctatagttttctataaacttgatcaaaggtactatcaagaagtttgacttaaataagtcaaagcaacttataatataaacaaggagtatttacatataatcttggctcacacatgcagctacataggatgccaccaatctagccaagctacatgtaggagacgaatcactctaataccttatgcacaaaaattacatgataaaattatatggggaggttatggccaccatcgatgatacgggatcgctagtgcatccggtggcatatgtgaagctcaggaggatgaagaagcagcagcacttggtctgagaataacattgttagcagaaacatcagttggccatggagtaatcactggtatgctggtggtgctgcgacagcatatactgacggagcagcagccacattgtttccatcacaggatgctgtgttccctgggtaggagtagatcgccgaggaagctccataacagtagtaggttccaggtgcatgagtgatgtaagtggctgcctgctcgaattggctcccctcagatgaatgtgccgcagctccaatcacactgcttggcatagacccataattcctaacgagttgtaagtttgtcatagctgccccagttgctgaagcacttggagtagccccagaattacaaactagttctgagtttgtcgcagctgcctcaggtgctgcggttgcaccacttggaatggacccataatggctaataggttgcaagtttgtcgtggccgcctcatgctctgtaccgtaggtaattctgaaattgaagacagtagcaaggaacaagtaagacttccaagtagctgcaagtaatgttctttcagattttagacaaaatcgcaaattatggttctctattgcgcctgcaggctgcaagtatcagttcattaagtttttcaaactatgtccagtaactgaacaacatagttttgagacatcaatgttgtcagcattggcctacacgctaaacataatttaattcggttcggagaaacagccaacacattataaaattgacaaacaggaagtactagaaccataaacgcgtacctctcagatgtagttcctaagtagtgtgatcttggaggatcaactgggtgcatgccaatttggtgggcggcataatatggggcagtatagtagccagtagccgaaacatgatcagaaagagattgttggccatagagattgttggccatagagatattgttggctgagggcaatgaactatatgctgtgtgcgctgcttgatatggatactcagctgttgacatatggtaaggaggtgtagtgaactgcatgtttggaggaggcatctgagcatatgaatgtgcataagattcaggtggcatcggatgagcagtcaaaggaggaatataagaagtttggtgctgctgatgcacataagcagctggctgtgatggatgagaagcaggaggtaggtaaacagcaggaggaacaggatgcctgtcactgtcattatggaagagtgcagattctggcattacaataattggacgaaacaatgctctcagtttctcaacctacagcagagtaacaagaatgatgaaaatagaataaagtagaagtatgctatagttcaaaagtcccataaaatttgatgcagaagggaaaaaatggaagataaaggtatattgttctttcctattccatctcaccgccagactattaacaaaaagatttaagaatagcacaaaagagagagaaaacaaaagaaaattataaagaggtacatgttcttatcatgccccacttgtgtttctcttctaatataccagcaattaattttctcagcacaaaaaacataaatccgttactacacaggcaaaatacaatcagaaaatttattcattctctaaagtaaaagaatatgagtttgactggaatataaaaaaaaaaagtgatgtgatctgtattatgtaagcaatacatggaaaataataagcttcaggcctcaaaatccaaacatgatgaaaattcacatgtgagtatgtcacacaagatttcagaaggaatatgttttaaggtctttataaaaattaagattgggtccaatttgtttcatcttcacactgatcataatatcaacaaatggtgattcaaccttacctgcacaagggtaagttctgggctgaacttcccattggaataattctcttttatagcagttcttaggctactctctgggataggcatgaaatcaccatcaactgtaaatttaacctgcacaaataaaatgaacataagtggtcactgatatttctatatcgagaataaaatacagctaactaatgaaattttattattaggattcgttaaaatattttaattcgatagtaaacatcacaaaacgtgaggtaggaggaacacaaatgtcaggaaaatactaatagcagacaaattagttcatgtcaggggggctcctaacatgtctgcctctctggctcctaaaagagataaagttgtggaaacatgtgccattcattgcatctgtaattagttctggtgaagagaatgttaggcctctctcagggcccatatgttcaccacataaggtaaatgctaaaaaggaaaaaaatatcttgatttaatccttaatgttagatcttgcagtcctaaattacaataggccagcatgattttgctgcactatatcagtttctgcagccaagcaagcgcatggtctaaggtaacctagcaggccaacattggactcagtcacaactcacaagcaccagtaaaggttcttcatgccatatagactgttagttaactcatcacggaagtaacaaagacattctgcaaaactactcatcacccaatttggcttcatgtgttcaaaatgtgcccctgtataacagatgtgacagagataacagtaataccagtaattgctcatgttggatattttatacaacaggtcatttgaattcacaattttctcctttatatcgatgaaatgcattattcaccacaaaaatacctgctagaattcttggaacttcaaaaccgagcatatatttgaattcaggataacatgtagtatgctactcctaggatatgctaattcatatttcctttgcttagttcgatttgacagaagaattccacaaatgctagagcaaccagaagaagaatggtgtgggaaaaacaacagtttagaacaaaacaatgagtttcggattatctaaatcacagatcaaatttgcaatttccatcaaccatcactgtgagtattgcaatgacataaagatcctaatcaaccatgtcaacatatatcattacttggtgaactatagtcacaacaaaaacccgcttcctctgcagaataaacacacatagcacaacgacagagaattacctgggcaggaaagcggccccggaaggcatccgggacgagtgtgaggccaccattggaatcggcatggtagggcccatagaggtgcttggcatcgaagtcatagagaaagagcgctgtgccacgcctgatccgggacaccacgtctagactccccagtggcaagcccatcacccggtgcctgtagcactcagctttcgtcacgccattgcacatgaagatgtacccagcaggcgatgacatggaggacccactggagcaaccattctcatcattctctgccgcagaatgtggtttgtcacacaccagagaaggtgcagtaggggacatggagcactgcaacgcatagatatgaattagcttcatgtggcaccagaagagcagttagaaaaggaatataagaagtttgatgatgcacataagcggctggctgcgttggatgagaagtggaaggaggtaggtactcagcaggacgagcaggttgcctatcatcaaaattatttgggagtccaggttctggttgcacaataattgggcgaaacaatgttctcagattttcaacctacaacaaagtaacaacaatgatgaaatagaacgaagtaaatatattatgtagttcatgagcccaataaaattttgcacaggaggaaatggaagataaaagtattgtcctttcctattccagctagctgccggactattaacagaagtcaagattcaagtataacataatagagagagctatatgttcttattataccccatttgtgtttttcttgtgttataccagtcatttcttttctcaggacaaaaaacataatttcaatactaaggccctctttgtttaggcttataagctagcttatgagttgaaaagtctaagcctaagaaaacaagcagcgttttgcagctttttcatttggcttttttaaagccataagccactcttacactgttaagccaaaagctaggttggagaagcttttttggcttatgtgaggtagaggtatgactccaacattaaacttgggactcttaatctattggcttataaatcatataagccaaaaggctaatttaaaagcctaagcctaaacaaagaggccctaaacagccaaaatacaagcagaaaagacatattcaatctatgtaacaaaagaatatctgagttcaagataaataaaaaacgcagaagtgtcatataaagaagacactgaaaagaataagcttcatgccttaaagcccaaacatgatgaattgtcagtacattgcaaccctcccaacctcgatttgactccttattcacaagtggcacaggaggaattttagaaggaaatgacaatatgttttatgatacttatagaagttaatattagatagaatatgtttcatctttactctgatcacagtatcaacaaatgctgattaaaatttacctgtgcaagggtaagttctgagctgaacttcccattggaatagttctcttttatagcacttcttaggctactttctgggataggcatgaaatcaccatcaattgtaaatttgacctgcacatatacaagaacataagttgacactgaaccttcaactatattgagaataaaatacagccaatctacgaagttggttattggacttcattatgatttttaactcaaaagtcaaaagtaaaccgcatataactgccagggaaaataaaaggatggtagacaggttaattcatatcagtagagcacttctaatatgtctctctgattcctaaaggagctaaagttgtaagcaaacctgtaccattggttgctctctttttttcttttgaagagaaccatttgttgcttgtggaattagctctggcagagagaatgtcaataaacataacccagccgatatattctcaccacacaaggtaaatttcaactatataaagaatctaaatcaaggtgagtttgccatcccaccaacacctcttatggcttgtaataagattattttgctgctatgcatgcaatcattgcaattgtacaacttatgatatttgattacagatacgttgcgacagatgggtatttggttagtaggaaaaacaatttttcatcattaaccttagattctgctgtcctagaccataatagctttttacaattttgctgcattacaccagcaaggtgctgcagccaagtgatcgcatggtctacgacaatccagtggaccaatgttatactaaaccacgtgatacagcaaggttcttcaagccacaggctgttggttaactcatcagtcatcacggaagtaacaaaacattatgcataattactagtgcaatgaacatgactgattgtcaacccttctgactaaatgtgttcgaaatgtgctcctgtataccagatgcgacagcactaacgtatgttacatttcgtcctgccggttataaaatatgaataatggctcacttgtggatgttatttacgacaaaaatttcaaatgcaatgcataacgtagcacaaaaatacattctcgaactcaaggaactccaaaaccgataagatgtatgaactcaatgaaagatgctaatccttggaaacgtgtgtacgtatttcctttgctatgtttggcatgttgtactcctacaaaaataatgaatttacattcccttaaatagtacattataatcaccgcatagaatgtgtagtaacatgatggctcaaattaccaaattttccatcagtcaccattccgcgagaaatacggttctataaaaatgattaccactccaattccacagcattctcaattcatcaccgttctccaataataacaaaaacgatatcctaaccacgtgacgtcagcatgtgtcccacacaaccgcattcctcctgctgcttgcagatgaaacgcacgggggagcgcgacggcgcggggggagggcgagttgggttacctgggcggggaagcggccaccgaaggcggcgggggcgaggtcgaggccgccgtcggaggcggcgcggtagggcccgtggaggtgcctggagtcgaagtcgtagaggaagagcgcggcgccccgcctgatccgggagacggcgggcagcctcccccgcggctggcccatcaccccgcgcgcgtagcactccggcttcgtcgccccgctgcacatgaagatgtaccccgccggcgacggcgacggcgacggcggcccgccggggaggccgccctcctcctcctccgacggcgaggcgtcccgcggcctcttgcgcggcggcggagacgtggccgccgtaggggaagacgaagggtggtccgccatggatggaagcgaaggggagagagaggggtttttagggtttttcgttggatggctgcggtgggagtggatgagtgaccgaagcgtgacggctgccgcgggtgtactcaggtgatgtctgcttttttttttcttttttcttttcgggtttattaaaaaaaatactccttccattttagattatactccctccgtcccataatataagggattttaattttttgcttgtattgtttgaacactcgtattattcaaaaaaaatttggaattattttttttacttactttattatccaatgtattttaagcacaacttttcgttttttatatttgcacaaacttttttgaataagacgagtggtcaaacagtgcaagcaaaaactcaaaatcccttatattatagggacggagggagtaatttataagtcgtcttgattttgacccaaattaaattgctccaagttttaccaaatttatagataaatatacaacaccaaattaattttattaaatatataattgaatatattttcgtaatatatttatattgggttgaaaatattattactattttctacaatcttggttaaacttggagcagtttaactttaactaaaattaaaaagacttgtaatctgaaatgaagggagtaagtaaaatttatattatataccgacttaaaaggcaatatttgaaaaagatatttagattggaaatatcttaaatttaactctaaatttaaattttgagaacaactagttattttttggcaaacgaggaggcgttcgttacattgatagcagtcactatgcaatttactatgaatagtactcatctattttatattataagatgttttgacttttcttttaagtttgatcaaatttatcaaaagatttagcaacatctacaacaccaaattaatttcattatatatatcatttgataggaaagaaaatcaaaattacccctgctactgtagaagtacgaattaacctcctcaattcaaaaaccagacatttttcatcatcaactttttatattgaacgaattaccctcctaaccaactttagagtggttttgatcctacgtagcgcacacgtggtagtcagtcagcaataaaaaatactccctcattgtgaatgtggaaaatgctagaatgacttacattgtgaaacggagaaagtatataaaaaggttaaaaaggtagggcccacatgtgttgacggcagaaccaagtacaagtatttgttcatcataatatattttacagtatttatttttgagtctgacaagtgtataaaagttttactagcaaatgattttttatttgctaaaaagcaatttggataagatcatgaataagatcgatggcactgggctggttgtttctcagctggaagagaagagaagaggggtacacttgttaaaggtagtgtttttagaatggaattttactaattttgggtggcaatattacaaagtggcattttttctggagtgggattatcaaattttgcccacgttttaaaatggcaaagaaactggtgtcctgcttggaacttggattgtgcctacctaaataatctgacaggtgggtccagtttgtcatccacagtcacagacgcagctcaatacatgccggtttcctcactgtccagaataagaaaggggttcagaaccaaatgacatggagaccaaaagtttcagtcacttatcttcactgaaaccgagctcaacttaaggtgaagccaaattcatttacaagctacaaacagggctcagtggttggatgctaccagtgcatctctgcattcggtcaccaatcaccatggccacattatttcttattgctcatcaccatgagaagaactcaagctaaaaataaaacattggtgccaaggccatgtcacccctcacatcaactgtttgccggactgcggggcgaaattgatgaggaatgtgcgtatctccatggggcccagatcaacgacgagcttggaaggatctacggggcctccccggacgatcttttcatcagcaggagggccttccaccttccacttcagcctctttttctccatggctgaacgttcttggttcgctgataggcttgtctcaacaatcttgacaatctggagaggtgaggatggaatgatcgaataagttgataatggtcatgtatatcaaacatagatgtatatcagaaaatgtgatgatgatcaccttcttgtctggaaatactctcttcaggtcgacgctagctagagctgaaagatccttgtgctctccagcctataattacacagggcaagactcagaaaataaataaaaaggaagatcaaggtataccaaggaaaagtaaggatgatagcacaagacctcgtataggtgagccaaccgaagaagaacagttccgtcttcaagttcctgtccaacgcaggggcatttgacacatataacttttaaagcgacatcgtgcaacacttgcccgatacagatttagaaagcattttcatcaattttgtacatgagcacatttttagctaactggctcattactgtttgtaatcaatgatatcaagcaggattggggcaggacaaagaactagcttgcaccattgcaaatggttaaaaataatataaatattatactgcataaaggtgaaccaaatcagcgatagttgggtagtcgataaccaaagatgggaataattctggttcccacctctagaatcaagtaatccatcagggctttcaatgtagttgttagtgcaaagacaagcatttcatttttacttttaagagaaacaacagtggtccatagcacgcagatacctgaagagtaagcaatgcaacattatcaggcaagctgtaggccggatccattgcagagaattttgtaacgtgtgaattcacccaattacctccatcctgagtaaacagcaaggacatgctcagaactagcataaccttttggtcaactattttataaataagttccagtttatacctgctctgcaaaagcaataagaagaggggagtatatttcctggccaaatgtccgccgccacctagctccttcaccttgtggatcaattttgagataatactttccttgaatctgtgaaataccataataagatgttttccacagtatttttgcacacaatcaatgtatttgaaaacattatagaacaaaaacatctctagtgacagttggcacaacatatatatcttctctttatactccaagaggactttgttatagataagaaaatatttcaagagggcagaaacgatatattactttatagcactaacttattttatttaagtatgctctaaattttcttcaaaaacaagggatcccatattcttttgctgataggatctcagtagctgacatcttattttgacttatatccagaacagggattcaagaataagctctgtttacttacaactagtccttcacattgattatcaaaacaggttgtttcatttaatgcctctgcaacaccacgaccatcatcatgaagtagtctcctacaaagagtgacaaggatttaaaccattcagaggtacacaaaaagggaatagttaaaaaaagggcatgtcacataaaaacatttttgaaccggtgcaagttccactacagcaaaaattatagctactaaaaaaatcctcaaacacaattattagctatatagaaggacatgacatacattcatggaaaagttcaagacaatgactcatatcttctgcgagataccaaatgataaatatgcaccatcttagacatgtattttattttactggaatttgtaccacattatcaactgatatgcccccaaagaaaaatatgaaagaagcaacaaagtattgtactatgttgtttgagttgaagatatacctgtgtagcattagctctatctgtccatcctttatgctggcacctccaacagacctgtctacaagtatagataactctctgcttccatcttccacataaatgccaagattaacctgaaagtagatataaaatcatcaacaaatgcataaatcagccccaaaataaactatctgtgaagctacacagaaaactatgactggatcctttcaattttaacatcacacaataaataagaattgaaaacattgtaagttcatcaaacattaaggattgagtgaactttaagacagtctcactcgtacatgtcaaattttcattttccgatcattcataatccttagtgcatcgaagtattgtaaagagaaaaaaatttctattgtaaagatcactgaacttcttacgctagcactaaatgttattgttatcatatctcaatggaataaataaccaaacaaaacccaaattcctttaaaaagaagccagccatacgtgaataaagtcataaactaagaggataactcaaacctaactcctgactagtttcggatattgatttgatgataaaagacatggaagaaaccaatttctcagtgcttctacacttgtgaatatatataaagaggctggagaagacaaaggctcacaggataatagtttccagcgataggctggtgcacttcgatcttccactctgaccggtaatcccgtatctgcaaaacaccttatatattagcataaattgtgataatcatttacaattatgcgatgcattttctgttgcagtcctcttctgtgcattgtttagtccttgtccccttccaaaactagagataggagggcattcacataattaattcagggattttttttccagtactatgtttattttcattgtagatgtatagtgcggagtgtagatgtgctttaccagaaagaagagtgagaacacatcatacccttttgatgaagtcacgtccactggaatcagtgtaaaatgttttgtttgttgccatgtttgtaacgacttcagtggatagttcttttccatttccatcatccactggtattggtccaacctatccgtaagaacaattatttaagcacatgtccgaaatctcatccaaagagaaataaacaggatataaagaaatcatcatgcaaattgcaaaatgtgaagactttaaagaaaccatctttagcaatgaaggtacatcatattggcatagcacttactataaattcagtctccacatagtcctttcctttgtaaactctgttgatctgtgcaaagaattgaaaaacaaggcatcaggaaatgagcaacagcagcagcataatttcccattcattcacaaagattgagagagcagaataaactttaggtgtggaacagaaaggagttaagaaaaggtaatgattgatgatttagacaagcaattatcatagaaataacctgatatatccatggattaatctgctgatgcacttcgtccaatatggacccacggagaactgtcagaggaaccttgaagtgggcaacataacttcaagtaagacttacgtgcaattttaaaatctctcaacagatgctgcagtgtaaatgttattctcggaaaaaaaacaatggaaattcttaaggcaaattactgaattagatatcttcttcatacctgtccatcagtcttgataggaactgtgccattagggcgaaatatgtatgctccagaagcctagggtacaggaaagagcaaataaatgccaataatagtaaatgttgctgaataaattaattatataatttgtactgcacctgaggatcacttccatttccatcctgtcctatgtaatacttgtacttctgctcaaaatttgcttcaaccttggaatgtgttaatggtgttagagtacaagtgagtttagatcatatgcaataattaaagcaagaagcaatgaacacatggttttctagggcaaataacatactggttcttactccctccgttttataattagtatttttattgttatgagatgataaaatatgaatagtactttatgtgtgacttatgtattttaaatttttcaaaacaatttcaaataagacgaacggtcaaagttgtgcacggaaaatcatggctgcacttaaaatgggatggagggagtacttcttagctagctactagcaacaacaaatcttacgagtacactactttatacctttacaatggaagcaaaggcaagtcctgtaagagaagaaaaggttccagattggaggtagtgattaacctttggcacattacctgggtcttactattggagtacagagataatgctccagctgcattgtattgaagtttcaactgtccttgcccaatttgcatgttactattttcacttccttgagatgagtgcagagtggacatcaaagagactgatgctgcaatatatgcagtgaattaagaaaaatcgtcaaacttcatggcaactcttaactaagttttggtgaagaaagaaattaattcacctgatttcttcccgcttgatataaagtacgtattgaaaccaagaggtggtacagaaactggaaaagcaagccaaaacttgggttttgcagctggtaacatgcctaggtaagccttgacatgtttctcccgcatgtacaaagatgcattagctataggcagaagttgtgattcaacttctcttccctcagaatcatgaacaacaattgagtcactgatgacctgttgataaattggcatattaattaaccatctaaagcaaaagcagtttcatggtagtagcacaatgcatcagtgcatcacacatcttatgcacaagcagaaaattccgattgatatatgccgagcaaattaaaacaacaaaatatgttgcttttcagggaataacatttgcataccggtatgcgaaggacatcctcccgtttccacccaagagagttgtacacaagcacaacctgtaacataaaaggtgggaaaaaaataaagctatatgtttttttcttaaaaatatcaatcaactacaaacaggtagttcatcttgaaaagagttgtgtgttgtgttaagaacagaactcaccaaacttttcccttgagaaaggtccatctcggaaggggggcaatatgtaatatttaggagcggacactgaaaaggagatataatgataaaggaaatactgcatcatgtataattacaatgcatgttgagaaagcagaccccacgcattacaggggaagggagttggctctaaccagtgccagggtagacactcacacacacaaagatataaaccaacctgttcaaaattcgttgtttgggacggacaatgtgattttgagcctgactggctcaagcaagagagagaggatgaaaccagcttctcggcctataaaaaaatcgaactcattgaagcgatcaaaccccaaaagagaacatcatctatgaattaacagtactcttgggaactcacttgtgtatagccaattgataatctctttgcatagtcatttgcgacatgttgcttctccgttcctgtaacagcatcatggtgctgagcaagagctagagcatcagctaaactatctgttgtgagatcagagttgcttctccctttaaagaattccaactgcctagctgcctgaaaagtgaaaacaaataaaatattaagcatatgaacaccacaaagtaccaagtaaccatgaaaatatataatactgaaactgcacatctgaatgctagagtaatgaaagatgaaaatttaccaagtaatatccactcataacacgaacgtatcgttttaaggcaggtctgcttgtgaagtaacctgtccaatatgcatttgggttgtctgcatacctgatggaagaaatacagtcatttgcatgtgaaagcaacaaaaatgaagttaattatatcaattatgaaatataaggttagaacatacgggaaaaaatcattagtcttgagaggccatggcacattttcagcatgttttgcatcagtataaatcgaaggtgtggaatacagagcattgacacggccatcctgaggtaatggaacaacatgttgaaatcatcatcattacaacttcatggtgaaactaaattagttaaacaatagtcagcatttgtaatatccatgctgatcttaaccttattaacgtagtgaattaatttgtccatctgtctgaaccaactttctgcatattgatatttgaagtctgtgcccattgtaaacataacgtgatttgtccttgtaatatttgcctagagaaaagaaagaaaggagcatgaattaggatgaacaactcattgctgagtagaacaataacttcaagttaaaacgttgtcatttagctaatatctttgaatattaagagcagaatgatcgacatatcatggaatacggaacaccaaaactgcattctcaatttgtgacaaacacttaacactacaacatccagaaaggcagtctaaattgaataagatgtttgcactttgcagtagcatcaatcaacatgactaatggatttccatgcaatgcatatggctccatagagggtctacatcagcatgaaaaaagtgtgaacatacagtttaatgtacctgtgctatagctgcagcaacaaagtcatccacccgttgctccacattataatcaaaaagaaggggatcatcctgcatagaggcaaggaatgtataagttcatgtctggtgttgaatgatatgcattagtagagtactcattagtttacctggacgattggggaagtatcatcaacttcgaagtaaaactgaccaggaggtggttcataattttttgggaagatgccagcaaagatctgtaagaaaatgtgtgtttcatatgaaatatggaatccccagagtttaagaacatcaaattgaggcataacattaaccgtgaaaaaaagaggtcacttacgtcagctgatgagccgaaggtcttggagcccctccacacaacctcgagctcttttgttcccttccgtgtgtcacggtcttggtaatcaatccggaaaaaataaaaagcatcgaatcctacctgaaacataataaaatgctagctgagcaattacttttctggtaaatctaatttcacttaaacaattggattgtgtagattcagtagctacattgtgttgtcaacaaaagctctctgtggcatcactctttaggggatagcaaggtatacataatgacatttttgtatctcagcacataactacctatgatgggtgataactagttactatcgccgggctgataactagttactatgataacagcattttacatttaagtcgaattaaacactggaaggacggcatcaatgagttcagtggattacttctgtgcctaggaggtaagcctgaactgcggagtgcccaaacggatcaatctgccaaccaatccttggaatctgaccaaactcctccttgatgaacctgtgcccgagcgtagtctggtctatcatgtcaatgtagtgcacggtcgcttcatcatgcatgcacattcccccgtttctgcaacagcaaaagaagcatgtcattctctatacaacacagacatgactaccaatgcagcatacatagcgatattcgatttaaaccctacattaattccaatcgtccagtgctgatgagccccttcactatatccttaatcatgtcgctctgctgtctccaccatctctggaagaatgcctaaaaaccaaagaaaccattggtcaatttcagtcaatgtgtctacaagtggttgcacattgcttcctatccaaccaaaaaaggactcccgacattgcagaattgaccattttggatgtagatagaatagcttctataacttcaactcctacaattgtcagccagaaattgcttgtagaaacaccaatatggttacagatagtactacattgcttcctacccgccgcagttccaattccactcctccaagcggctcaaaattcaattgctgacaaggacaaacttccaaaggcgggatttaccccccaaaaaaatactccctccgtttcaaaatgtttgacaccgttgactttttaagacgtgtttgaccgttcgtcttattcaaaaacttttgtgaaatatgtaaaattatatgcctacataaaaatatatttaacaatgaatcaaatgataggaaaagaattaataattacttaaattttttgaataagacgaacggttaaacttatgctaaaaagtcaactgcgtcaaacatttcgaaacggagggagtatatgttacctgctcaacatagacgaacttgcggttctcatccttgagcagcgctggcacgagcgaatccagcacattctgcacgcacgccccctgcaaccaaaaacacccagaaaaaaaaatccaattcaaaacaagcaacgtgacgagaaacgagataatccgtttccaaaattcagcgcatcaatcatgcctaaactagctcccccaaacccgtagaaatttctccccccacaaaaaacggggaaaaaatcgcggaaattccgaggactgcgccgcgcagctcgcgctctcgatcgaaagcgcaagtagtagtagcaacctggatggagttgttggatccgacgtagtactggtcgacggtcttgagccacccgacgtcgtcgtgggtgtgcggcaccacgtgcacgttgagcttcccccccaccacccccgccgacgtgttgtaggggatgtacacgcactccccgacggcagcggcggcggcgaggaggagcaggagcagcgccgcgaggcgggcggcggaggcgcccatgggcctcttcccgaagcttctagaaggggcgtggaaggtggagaagggaggtggtggatggaggtcgttgcggccggccgcggtgaggccggggggtggagtgagctaagaagaagaagcggagcggggtggtggggcccacctgtcggtgacacaagggctcgcggccgcggcgtgccgggcgggtagttgcgcgctgtgccacgtcagctacctagcttttatcgcggttattgagtgaattttcagtatggccattcgagtttcctcgatttgtggattggggtcttgttgcgtatgagactttttttagggtccgttcgatctagatgttccgatgagctaaacagtaaaccctacgtccctaccacgtactaattcatttgatcggtacatgattaattgactatttactaatatgggtttagaaattgatttatttatttttaaaaaagaaacttcaatataaatttttttaaaaaaaatacattgtatagcaattcgagaagtaatggagttgctcccccaaaatagctaaaaagccaaaattattttttttcacgtatagtgcaatttggatgaacacaatccacgcgcatcactaaatgcatatatatgcatgtttgctctttaagcatacttgaaatattatcaaaggcgtcaaacatccctcccctcttcacgcgaactcatgcgccattcttcgaattaaattagtcgaatcaaaaacaagccctacaacgtatgtccagcaatgcttttttatgtagcataaacatgctaacttgatatgtacatcatgagctaattttgccgaccatgcatgtgctacggctctagttttagtttgagagagtcgacgatatatcttatataattcagggcctgttcactttgatgtcatttttaacattgctaaattttgataaagttgctaaaaaaatggctatatttagtttgccgctaaattttggtaactatatcaaaaactatgccaaaattttagcaagttaccaaaattttgatattaccaaaatttggtaaggttttttttttacattaaagtgaacagaccctcaaattatggcgcttacacggttctaaatatgctcctaatgtcgttgagctgtagccttataatctaggctatcggtaagcttcagatctctccttttgacaggtgggaccccgatctctcctttgttatcatatttgtttatgttgttatcggtaacttgttgtaatggttatactatggtataatacaaagtagccatgataataaacaacacctcaatttgcataaaagacaacactctatgatcttaataggttgaagagaaatcaattggaagaagaagataaacctctctcatgtcactactactgaattggttttcctagacgttgcccccttttggttccatgcccccgaattgactggcgctaggttgtgaaccacatgggaaaaatgtgcggtcctcttaaatgaaccgcacgggaaaataagtcgatttttttcgtacgaacgtactaagagagccgcacgtcaaaatagtatttccctcctacccactttaaaatttcctctttttccgcgcacctcggtcctcactctatcttcttatccagtcaattctcttattcaactcccaaaatttctcctctcctttctcacgattctcctctctcctctcctcacttatgcctctcggcggcagcagtgccccacggcgacggcggcgcaacggtggaggcgcgggatccggcgggcggcggcagtccccgcatggatccggcgggcggcggccgtccccgcatggatccggcggccggccgccctcccccgccacggatccggcgcgagaaccgcctgccctcccctcccctccccggcagcaacgggagcgcgcgggcggcggatctagcgggcaggcgggcgacgacgggcggcagcggctcctcccatccctctcccctcccctcccctccctggcggcaacgggagcacgcaggcggcggaaccaacgggcgagtgagcgacgacgggcggcccgcggccgtccctgcacggatccggcgcccggtcgccctccccccgccacggatccggcacgggaggctggcgggaggcgccaatgacgaggcgggagcggcgacgctgccgccgccgccgacgaggcgggagcgacggcgacgacccgatctagggttttcttttttttttgaatttttttcggttttctgtttttccgtgcggtggcataagcaaccgcagatttcgcgattttcccaggcgatttgttccagacaggccaaatctctgcacgcaaaaaaccgatttaccgcataggaaaacgcttagtgtagtaatgtgtaagcataacagacaagcccgtgatataattgaacttatatggcaatgttgttttcaatatcagtccatcagacaagtcaccaaaagtccttattttatttaattttcgtcatcaagcacaagcataaaaaaaatatagtatatactccaggtatcgcggatgaaacaattcatttttgccattgaaaggtcaggctatctatcacctgttactattatgggactgttcactttgataccattttcaaccttacaaaattttggtaaagttataaacaagtagctacatttagtttcctgctaaattttagtaactatataaaaaatcctgccaaaattttggtaatgtttttttcattaaagtgaacagccctacatatacacataatttcatcttaacagccgcattagtgctagtatcatttcctatcaggagcgtagcatgatttagtacgattggaaggtctcattcgcaaaaaggcgagatgcgaataaaaataaatagcccgtgccacggtggggcgcctcttccggataaggaggccagaacggggccccacctgtcggtccctatccagatcgatccgctgcaccctaccaaatatgaaacgccgaacaaccagcggacggcgactacactacgaaaattgttatgcatacggcctgcctcttcgacttatatacgactaaatttgatcaacatcaataattataaacgattataatgtatataaacatattgtctcgttcttttatccaacaagagttggatgaaaattaatattttcgtggcacacttttcaaactactaaacggtgcgttttgtgtgaaaactttctatataaaatttgctttaaaatcatattattctatttttcaagtttataaataattaaaactaatcaatcatatgttaataccacctagttttgcgtaaaaaaacttaatcttcatctttatctttatctttaggagaaaaagaacaccaccatagttgactaaatttgatcagcattaatagtgagtatgaatcgacatatatatatatatatatatatatatatatatatatatatatgaatagattcatatttagaattaagtgttttttttctaagacgtagcaagtatgaatatgaatatgaatctagatatatacaaatgtgaatatggatatatacaaatgttttagaatatacttgctacgtcttagaaaaaatatgaatctggattcatatttagacggcgtactcgcgttggcaaagctgatgatgagttgctgttccttctcggcgcgaataatcctctccctgtcttatccgatccatcttctttgtcgctgtcgcacctcgtggacttccttctcttgttttttcggggaccctctcggactaatcatacagttatgtattattcggtgctcttgaatcttgattagtgatggctaccattattcttttttctcctgcagtaagtttcattcgggaagtgatttgtattttttttttcattttgggattcgacagaaaatcctcaacagatacagtatctgtacaattatagtgtatagtgtagtttctatataactacatgtaagtagtatatatgtgacttgagtgtagtgtaaatagaaaaacacgtactactccgtccaaatatttggacatgtacagattcattgctagtattggtctctttttttttttttttgacagcggtctagtattggtctctttttttttttttttgacagcggtatagttcagtggagactggatatgtgcacttgaaacttagaggctgcgggttaattcgatccctgccctaacgtgtgtaatatattttaccctactcacgtagcacaaatctcaaagcgcatataattcgaaagttgcatagcaatcatattttatttttagagcttttcaaaagggtcatgctgcaaacgagttctccacttaagttaattgtagagcacagaaaacgataatgttatactcccttcctctcaaaatacaactacttattatgctattttttttctaaaaaaaagacatcaaggttaaagtgagaaatggttgtgatttgttgagttaaattaattaattaattaggaaaatgttgtagtagttatattttgagaaaaaaattctagaaatagctatattttgagagagtattatacctcgacgtaactcttcattttcaaagtttggtcaattattgcaccatatttagggcttattaatttgcagtgccatgttttggttggtagcaaagaggtgggtacgatgaacgtttggattgttactaattttggcgtggagttcttttttgtttgcttggcatttctaaattttgacaaaatagagaaccaattcaacagtaagttcgttgcaacaaggcaacttttttttttttcacggagtactctttctattgcatctttttatttgtttgttgcttacctgcttgtttcaatgctttatttcgataaagaaaaatacgatcggagaatgcaataattgctgtggtcacattaatgaaagtcgcagcataactagagaatcaggaaagtacgctttctattgcatactactccctccctgttgttacatattaattgacgttttagacaagattaaggtcaaatttttataactttgaccatcaataactttaaaaatatttagtttaaagcattgaacaacatatatagatttgtctttcaaagcattataataaaagcaatatatattatatatatatattataatagaaaaataaggtcaaaagatatattttatagaccgtgttattgtctaaaacgtcaattaaaatgaaaccggagggagtactattttatttgtttgttgcttggcttgtttcaatgctttatttcaataaagaaaaaaacgattgtagaatgcaattattgttgtggtcacattaatgaaaggcacagcataaataaaaagaatcagggaaaaaaatcaggggcattccgagaattgaattcgggacctctcgcaccctaagcgagaatcataccactagaccaaatgcccttttacgattacttttcaaaattacggtacttgaccaaggttatttggctcgacagacgataattacccatgacatgcattcgccgtcgagcacgccggcgaccaatccgccggcagaagacggcgccttctccggtgatctccagcagaccaacatttttctcaagatgacagcaattattgacccgagcagatgatcttttacaagtggagagcactggttgcagagacaactcacattgccatagttttattctcatttccattccattacatataagtattatttgttcagacttcagacattatgtccaaagccatatgaaataacggacgatgcaaagattcaggtacaatccaggatgcttcaagtctaataacacaaacacaaatcgttgccaagcaacccagaggtacagaagttgcagagatcaagcttgatttttcatggcaggaagcaaatcacaggatcctaaaacgactgaaacaccctaatacaaagctggcagaaacttacacggatcaaatactgacagaaagggaaaagaagagaaaaaaggcgaaaagcgcgacaagcatcgactcctaaggttgaaggtggcatcctagttgtcgacgacgagcttccgccgcttgaagttgaccatcacctcgtccttgatgccgacgaccatggctttccagttggtctccgggaagggggagaccagctcgaactcaaagttcctcagcaggtgagtccatatggccttgatctgtaggtaggcgaagggctcaccgaggcaaccgtgcctgccgccaccaaaggagatgtacgagaaggcgcccgctgccttgtcctcctccctgcctggtgcgtagcggtcggggtcgtatgagtcggggttcttgaagatgtgagggagcctgttggcgaaggctggagatgtcgcgacgatgtggcccttcgggatgtcgaactctttgccatccttcgttgtcactgagaagtcgttgtgtgactggcggagcagcatgattagcggtgggtgaagacggagcgcctccttgatgcacctgtagaggacatccatctctgccaagatgtcatgatcgatcttgtccccgtgccgcttcatgacctccttctgctcctcttcggctgctgcgaagtactgcttgaagcgaagcatgtaggccccagtccaggttgaggtgatagagctagtgtgctgtccagcaaatagtgctgcaataagtaggccggttatttcaccttctgtggttgagcgtccactcttgtacttcgaatcaatgaagcactgcagcatgtcttcctcagcccgtccagaggccttgcgggacttgatgatggtggcgaagatttccttcaaccgttgccgtgcccggtcacggcggcggtgtgcaggaattgggaggtaggggaagatgacactgactggctgcatcccattgtccagatcatggaagagagaagaaacatcatcaaagagcttttctcgcacctccctcccgagcaagcaccgactagcagtcagaatgatgagatgctccagctcatacttcagatccaccgttccactttctccccacttagagaagtactcctgtaggcaaggttgcatttgcagttgagattaatcatccaagatgtatgcaatgatgtaatgattgatgaaaacaagacagaacacagtaagacagtaaaaaagccttagtaacaggatttatcttgacatgctatctaaacgctaacatgttactacaatcatgacactgagtgttcaacatcaagccaaatgtccagtgacttgcataaagatggtctgtataatctattcataaaaactatcgatataatattattatatgaaaagaaagcatgcaaaaagtttatataaaattatgcctagctttttctttatgaacaaaccatgttattgtgaacaaggatgaataagatggagtgccataaaattggaattgcaaaggaaatgagatgatgcacaatacacatgtgctgtggtatgcacctatttgtaaagcgaatataacagaggaacacgtcaattcagtttcttgttgaaacaacagttgctgccaattatgtcctgttttgctgcaccaaaaagtttggagtcttatggtgcatttcttgagtacatcttaagaaaaggtacagttgacccacaggtcttggttaagtcagatagatacaagaatgttggttgtgacagcctgacaggatgcaaacattttatcattgacctccagaacttaacgtcacataacaaggtttagtttgtttcctcagtcaactaaaaaacaggtctttgtaactcaagctatatatcagcgctgtgtttagttccaaagtttttcttcaaacttctaatttttccatcacatcaaaactttcgtacacacacaaacttccaacttttccgtcacatcgttccaatttcaaccaaacttccaattttgatgtgaactaaacacagcccaagcatgtccaacgtttatacactattgatcaaactcatacaagaaacaaattaacaagaaaaagctaagcataatttgatatcataagatctcaaatacaaccagcagcagttcaaatctctacaagacttcagaaacaaaacatgtcacagttgtcagtgtaaaatatggcctgttctgattaaaagattatggtgctggtgtggacattcattcataattaaaagatgtcattcaaaagtggagaaaaagaagcacatagaaacagtatagaaaaggaaagataacacgtagaaacaccatcaagccaaaattcagagtagaaccggaaaagactaacttttaaacgatgaaaattagtaataaacaggaaagatgtgcaagctttattctaaagaactaattcactaaaaaaagggtggcaaaaggcataaagcaaagcacaaacggataacagcatactcctagcacgaactccatgccactggaaaacactgttgacagtgatgcacatatactgatatatttgggtttgagaaaaaaagacaaaaggtgatgtatggtagccacgttctaacttccagaaaagccacgcacaacatattagacgtgttgatacacaccatgacaccaacatgttgagtaatcaaacaggattaacaacagctctgaattgacgtatacatataagaaaaagcaatcatgctgaatattagatcaccaagctttcctatcaaaattgacatagcacatctatatcgagattgtatccttttgtctaagggctaactacaagttcaatgcataatgatccgcatgactgatcttcgaaacaaattctaccacacattagcctattacaatcaagtttgatgatatatccaagaacaagcatctcatgctaagttactatgcgacaaccatcctaacaatatatgaacaattgcgtgaaacggaagcgattctcacctcagcctcgacaaccatctggtcgacatagctgcggagcttgttggcgcggagcgcctcggtgaagaacctgaactgctcctgcctgacggagtagtcgacgtcgaagacgacgccggggccgaaggtgggcacgttgaacttgtagacctcctgctggctcatctcggcctcgttccccttgaagaagtgcgccgacacctcggggccgatgaggaaggtgatcttgcggctgaggatggggacggtgaagacgctgccgaggcgggcgtactcctcccggatcatcgggatcggcccccgcatgaagcggagcagcccgcccaccagcggcgccgccgggatggtcggcgggaggcgcttcttgccgccgccggcggagctcagcagcagcttgatgaaggcgagggtggccaccagcagcgccgcgccggcgatgagccggtggtttgggtcggcgagatccatcatcttcgtcgtcgtctgctcgaccaattgccatcgattagatcagggataatacagattaatcaagatgacacatacgaaaaagaaaaaaaaacaagattccaaagcctcgttcgcatcgaagacactctaggaaagaaaaagaacacaaatgcagcatcaaaaacagtggaaaaaaatacaattgttcttccacactcatctttccacatgacaaacaaaagtcactttttgaaagaaaaaaaagaaaagaaaatctctagatcggagagaacagcgccggaaattctctggtttttggccatgtgccgcgcccgggacatatgatagagaacaaaaaaaagaaaagaaaaaggaaatcaagaaacgcagtaggatgatgagatccgatcttggatggagcataccttctccctgctgctgcgggtgtgggggggggggtggaggggagtgtggagtggaagtatagactggagaggggtttatataaaggaaagcagcaaagattcctccgaggagaggtggtggtgggaatgaggaggggtttactgcgggcggagatgggaaaccggggcggcagagatttgcagaggagaggagaagggaggatgcgcggccggggaagaaggaggggattttgggggggccccacctggctgtgacgctagctggcgaccacgtgtgtttgcacgagcacacgacgtccacatgtgcaatggtgggtgtgggtgtgtcatgggcgggggatcgtgagtggagccgggagccgtagagaagggtcgctctctcgccggccgccgatggcgaggggggttttgccggcgggccacgccagctgcgggtgagcgaggcaggcacgggacttgaggatcattaataacactcagacaaaataacactgacaccgtgtttagttgcaaatttttttttcaaactttcaacttttccatcacatcaaaactttcctataaacatgaacttccaacttttctatcacatcaaaacttttctacaaacataaactttcaacttttccatcacatcgttccaagttcaaccaaacttccaattttagcgtgtactaaacacaccctcatgcaggtgcgcgagttagacaattagactcaccctctaaataatctagtcaatttaatagctaatatatataataatttttaataaatataatagttacctctcaaccacgtatactataatattaatatctgatctcacctatcatacacattgtatcttatagtctatggtcccattgatcttctctcttatttttttatcttcttgatacatgtttatagcttggcttatagtgtgctattgtacatgctctaaacagtactccctccgtcacaaaataatacttcatctattacaaaataaattaatcttagtacgagacatagcctaatactaaatctagacaggaacatgagtcaaatcctattataggttaatttattttacgagggagtacatttttatgctctttaaaatatcatataataatatttttgtttaacaaaattaaaaataatttaccgtgcgttaatgattttgttgttttgcgtctaacgggacgacagtgtcactatcgacaaacgtggttatagcacaagtcatgttcatcaattaatcatactacagtactactagtaccggtactagtacgtgtacgtgtttcagttattggtgcacggttgctgcaatagtacgttaacgtgaagatgtacgtctagttgtatagcctaatttcgtggttttagctataggacatcgtttgaagtgatttttggcagaatacactatgtaaatgtaataattttttaggagacaccacatccattattttaatgttttcgtactgacgacctagatggtgcccactttttaggtggcatgatcgaattgtgtttgtatgttttgtttaggataactggctctgtgcatggagagaatgtactccttgataagctcatccatattagaggtggagctactatgagcgaagtcgtacttgacgctagcggtagtggaggcgatgagggaggcaaaccttcctccctacgtaaacgaggcgcaggtcgcggctgtcctcgtggtcggcaagaggtgggcgagcacggtgcccttcatatcattcaacgccgagtatatgccgagtgcatcaatacggttcttgagtcggtgactctcacaaagaagtggatcctccgaggcaacatgtaggaggacacccctgtggcgttggcagtgtcaccgggtggtctatcagcacctctcgggacagcggcatgagggcatgataaggcctgtcaaggcgacccttcaagggtcggcagtgcttgcaaccaaagtcgttgacgtaggatatgtttacattgagaccgttgcagtggtggcggggaaatcatggccggagaggagaggaggatttaggatgtagaggggtaatttggtttcgccataaaaaaactgaagcccatatcgtgtcgtcatcacaaaaatattaaagtaatgggtgtggtgttatatttacatagtgtatttccatacaatgatacaagtcatttcatatagtattctacagctaaaactataaagtcgtgatgtcttatagaaaaatttgcccctataatataaaagaacgggggagtgaacttatgggttagacaagagacttttgtgattattcatttatttcctttattttttacaatttcggtgttggctattgtcttttttaactttgtccgttaatagtttttaaataaacaaaatgactagtgctgtctaaaacactaccaaagttgcaaaacaatattacaacaagtttaataacaaacccaggtacgggctataatccatatccgccaaattgagagaatatggatattagatttgaacaatacaatagtttacctataatgttgccttcactttactcttttctctctctcacttctccatttattttgtctcttgttctttctctgtatcctttcccaatttaatttgtctatttttaagcacattcttgatcttatataattaagaaccaactctttttcctttctctggtttctctcctcgacatgtccagaagtataatataatgaagtactccaggagtaactataagcttatactaatgtgctagctcttgcaattgcgtggaactgttgaaagaaatattgatatttcttatgttttatacaaaactgccattagatttttccttacatgagacaaaaccactactgcgaaaacaatgttcctagatgaatcttaccaattaatattgccactagctcaccaattaatattgtccgtgttcttcatttggatcctccttttgcattcataaaaacttaaccaccattaacgtgtggcaaaatacatgtttatgtgtatttattaaaaatatttcgagcattctgttaaaaaaggaataaactcaaacagtgcaaatattaaaaacataataaaagtatttgaaaaacaatacaacagataaaacaataaaaaatatatacaactatctatacaaataaggagtcttaaaaaatattatttttagagccctgttgcgagcacttgaaaggaactagtctcatcggttgccaaaaagttattataagcagtaacgacttattagcgactataaaataatttatttgtaaaacttttatagctaatgctgaaaaagaaactacattaaaaatatcttaaaatcaactttaaaattaaaaaaataaattttgaaattcaaattttagctttggctttgactttttataccaaccgatggggctctaaaataatgatactatgcaactcaaattctttgtaactagctgaaatcccgcgcgttgctgtgggagtttaacatgataataataagtaaaaataagatagctagacaatataagattacgcaagttaacgtggtttataataatttaaatttaaatagtatatagaatggtaattcaaatataaaagtaaggtgatatgactttgtgaaagaagaaaaatattgagatagtttggactgtagattaatcatctagaaactaaaaataattgaggtgatatggcttaatgcgagaggaaaaggagaaagataatttggaccatagattaatcatttaagcactaagaacaattgacgtgatatggcttaatgagataagagagaaataacactaactaagtgatgatgaactatataggtacatagcatattataaaaaataatagaaatacatattgaatattatgtgaattatgtgggatgatgatttaacatgcttgtatttcaaatgctctaaaatttaataaattataaattatagataatataacacgttttcatgatgtttaaatttaattattgttagtggatgatgatgtggcatctttgcatatcaagctttaggagttaggccgggtttagttcccaactttttcttcaaactttcaacttttctatcacatcaaattttttctacatacataaacttctaacttttttcttcaaactttcaattttgacgtggaactaaacacacccttagtgggtttatagtaagaaaggatgcgaccaaattctttacactgttatcagggcagtgaaagcaatgagatgtggaccactcttttcgaggcccatatgtcaatgtgatacagcggagttccatgtctatttgtaattgttgtggtataattttcacaacttgtttgcttttctgtttcagcacttatccagattctttccttagaaattgtgttttttttcccggatggagtacatgctttcaaagatcacatcctcatctcatcaaaaccaaattaaatcaatcaggccggaccacctccaactcaaagtggcagttgttcgatttgtcactttctgccatcatgcttttgcagttcacttccatagttccatgtgcacatcctttttaaatatgaaataaactaacctaattccgagccacgcccaactcaagtgacagtcacatgacttgattttgattcttattctcaactccaacataatccaaaactagccaaataagtaaacataatttgatatatagactatgcaaccagtggctactcaaaacaagttttacagaagagcagagcaggtaaaatataacgaagctgagaagctgtaagccacaataccgcaggggccaacggtataggcattgaaccggatcatatatttgttctgaactttggttcgaggtagctactgaatttgtagagcagatcagaagctgtacacagcaaaaaggagccaaagagacagaatagctttggtgacaagaacatgtgaggggattaaaatttgcaacttggcgatgtgagctatcttgatcagcattggagtagcatctcgcggcattttttgaggtgaagctgtatcaagaagtgtcactgcaaagatccaaagaagtacatcttatatatggcctcttggagttcttatggggtgtgctctaaacttcagctcctaactgtaactgtaacttccttgtttgtcgtgagcacgctttccaaaaacttttatatagatgcttctttaaaaaaatcaaaataatcaaattttaagtttgtactctctccatctaattttgatagtgatatttccaaatctgaatttttttaataggcatatttcaatccagcaacctatcatcttaatgactttctcggatttaatgcatgactctccattcttctacacatgattggctacatagacattgagaaatgtaaatattaatgaattgcttgattacgaggaatgactagtagcatatttaaatggatgataagtagaattatttatttttggtttgtgtgccaagatgaaatatgactatcaaaagtagatggaggtagtaataattaatacttaataaatcatgcattaatgacttgcctcgtacgttttacgtatgacgaaaagtccaaaaccaaaatgaaggttcgaacgcacccgggaaccgttgatgagccatggaaatcccaaaatactatgctgctgttatatatgagagagttagggagaagtgggaattggaattttcagtgccatcttatgaaagaatgttcatttagaagcatgagtatgctttatatagtcactgtgtatccatcaaagttgttaggttcaattcaattacctaaaacaaatctacaatttgtagggcctaacagtaattgccatgctaatcaaagaaagactgaataaatttgggattgggttataacgcttcagattaagaaaaaggctttacatcacaaacaccttgctaataaataggattatttatattggtgtgatcaaattataaggattcaacaatggaatggggttatgtttgacaacaagagagcaaattttgttagttggcaaaggctccttaaggaagacttttatttgcttctccttttgtctaaatgtaagagagataccttccttgttacttctatttcagtttaataaaattataatcgcagggacctcctccttgttctctcatactaagaaaaatataacgggtcaagataaggaagagtccatgtcatgtataactcagtagttattatttccaaatttcgaattaaatgaaattaatggaggtacttaaaaattgatactccaatatacacaagtacaagttggtactagttaatgctgaagtgcaaacttatcacttcatgaaaaaatatgtacataattgagactctaaaccaagtatacctttgtatttaagaattgagactctatgacatgtatagctatgtatttatttatttgttcatttcaaaaaagttaaattaagaaaatagaaataaaaataataaagtattaaagttgactctacatataacttcaatctattaactttgaatgttggtaaaaaaactaaattgattttgctttggagttaacttttgataaagtttgtatggcaagtacttcctccgtcctaaaatttagcgaactctagcgtttaaattttcatttaattctccttcgtctcaatgaatcataaccatttcttaattttctcacatatttttcatcacaatcatcctatttaattttacctgctttgtgcaaaatttcaaaagtttttatatttggaaatggagggagtatataagcatgattaatagcttgtttgaacgcacacgatggggtatgattcttccacgtagtactccctccggctcaaattataggacgccccctttttaatgaaaatcaaactcagtagtttttgactaataatcatactaactatatctgtgctacgtattatgcatgttatatcactagattcatattttgaagtactttcatgtgatgctaatttcatatttgttgggattatagaatggaataaaatactagtcaaagtatgttattaaagaccgtataaaaatatataggtcttataatttgggacagagggagtatgtacttttgtggtatttaagacttgtccttgtcagctttgaattttgctcattaatttcttgcatttatattcttggggactttcaatgcgaacggatctatgcacaactgtttgctcgagagaatcatattttttcggtactccctccgggttggttttatttgttgtttgaggtcagttagctgtggatgagaaaatctgtcgttggagcatttttctcacgtatgggatgagattgcccttgtgcattgatgttgttattgttcctagatcaactcctcgttactccttgaatacttcgttcctatctcaatggcagcatgcatgcatgtatgcaagtacacaatagatttcgaacaggataacatatgcgggttttg

SEQ ID NO: 5549 - DNA, 3869 bp, Oryza sativa
tttttatgtaatcaactaatttttataggtgttgatagttattatcggcagtgaagaaggtaacggtggacgtggtgagtggtgaccgtgcctggcctacccgggagctggctccgctgctgcacgtggtgaggaccgtgccatccgcccaccccacgctaggccgtttagcggcaaaacgtccgggcgtgcttgggccgttgttataccgggacacggcccagaaaatacggccggttcagattcaggggacattctgtagcgttgggccgagacgatccaggtatccagccctcagccttgcattgcacgcgcagcatatgaggggcaaatttggatctcaacacatttcatttcaaaatagaaatctgaatgacagataaacagcccaaacctgaacttaatcacagaactacagcccagatctggataacagctatcagggtaggcttgtacatgaactgggaacggagtgtgtatgtatgtgtttctgagggaagccaagtataattttgctcattggcaagaccccaaaagtcaagagcatgatcatcagcactgcaagcgaatgagatattggtatggaatacatgaatgatggattaatatggcaatgaccttatcttgttccaatatcaatttgcagttccgtcgaactggcatctaggagcttaggagcaaacctagctgaattttacatatacattcagaagcaaatttggcagttctgtaaccaactgaacccgtttttttagattttatgtacacgagaaatctattataaaagcagatatacttagtgcgcagggttcgccgccgagctgcgcaatcgtcttcgtcagttaccagctgatcatttgatgatgcaaccacgctggctctggacggtctgatacggttctgaaattgctcaagcgctgctcttcttgccgttgccaaacaagaaagacaagtttggctttgccagggtacgcttcagagccttcactgccagtggactgtccttagcctgttgtgttcatcaagcaacaaaacagtaagaatcacagggaattcttgcacttgcaacagtgctagtaaattaccaatctctgcaattgcttaccatgaggcaggttccctgctgaacattgcagatggggtactcgtgagggcagcagctgtagtgatcatcgcagcaggtggcgccctcgagtgggcagcagccccaggcgtagcagtatttgccatactcgtagatgcagcagcaggtggtgctatcggggcaagtgtagtagttgtcgcagacggtgggaggcggggttggggacggcggagtagggccggggttcggggggttctcgcccttcttcagagggtaggatggctcaacggcaatgccgcacttgccactgctcgccttgatgttgcgctccatacggacgtagccggactcaccccagctcttgccccacgagttcctcacgatccagtagtccttgccattctctgtgccgtacccaacagcagcgacgccgtggtctagtgctgttccacatttacccgtgaagataccctaagaatgatatcaggaaatggcaatcagtgcaagcccaagtcatggaaataacaacataattgaaaagaacaaggaatttaggattaacttatttaacaaaagcagagtacaatgcatgtttcaaattttgagtattgctttatgggaaaaacaatcataatctttttccctatctaattgggtttcgaagtggatgacactggatgatggctcataccactccactacggacctgggaacacatcaaaagctactcgttccattaaaagtgtttcacaaagcaggggcaggaaagcaacaaatgaacatggtttatggtctatgaataaatggtgtgcactgaggtactaatttagtggaaagctgaaatgggattagattatctggatgataacaaattaacaaagtatgccaggactggacaaaatgataataagatttgcttagtagttgcgacttgcaactgacaacacaatcatttcttttagtgcaataaccgtgattaaagcaaagtaaagcaggcaagggcaaaagcaatcagtgagcctgcctatttgtttctctatcaaagatagcaaaacttactaccgactacacattgttagaacttagcaaaggatcaccaaacgaatttgaacaataacgttaaatcgacttaccgatgagtagagctggaatgctctgccaccggcttcaattgcaacactgacgggctggtttgctaccgccttctgcagactcgtctcactgtttggtgttacatcttcgtagctgtcaattgtgacaacctttgcgtttttctgtgagtatagcagcacaagtgagcaatagcatatcaaaattatgctactacctgaaaaaccaagggagcaaagaagacgaaagataccctgtttacgtcacaccgttcgtccttgcctttgtaagggtagtcatcctcggtgtcgattccaccattgttgatgatgaaatcaaatgcatagtccatcagacctccattgcatccctcgttatatgaagtgtcacagtcaactagctcctgctcagacaaagatatcaggtcgccagtaacaatctggttgatgccttctacagctgctattgctgagaaagcccagcaacttcctgcaatataggagaattggaggttatatttccatattattgtgtcaaaggatgacatgaaacattgtttgactctcaaatatacaagtaaataatgaggcaatacaaaacaaatgcagccaattatgaattagatagaccatgtggagcaacaacatttttttttaaacgacctacatcagacagtgcgaagtttcttttttcttttttaagcaacaacatgatgaagaactttagcaatgcaaaggaggaccttctaccaataggattgtgaaacgtctgcaagagacgtgaatgaaaggtgtttccaagggctcttttggagccatatgccaaatgacagctgaccactagtgtggctccaccagctacaattcaaacagtgaccactaatgcacagtatgattttctgtttggctctaatacgtccatgcacccacaaccaaaatatccacctttccaactaaaacaatttatgaatgaccatttattatagcttgccttcctgcctcccctacaagccacagtagagtacactcagaaacagcaggatcagttgcaggctctggcttattcataattccagatcagaaataaaggtgtccgattattgagtgatactccatacagagtacacaactggaatcaagttagtcaaccaaatatttttttgaggaccatgtgtatagccaactacacaaaccataaaaacaattgaatttcaaagaatttcattttgtgaatcacactgtacttcaaattctggattcagatcgaaaattccccccccccctttccggtctgcttaattttggggcatattgaaacatgtcctgatttatcgtttgacctggatgtgcccctaatttatgttcacgtggagtactaactactgaactgttgcaagcagaccaataatttcttgaggatcatcccgaataaactaaccgcgaaaatgattcatatgtaaaaaggaaacatattttacccctgaaactgaaatgaagagaggagacatgaaaaggatcaacggatgcttaccgcaacctccctggtccttgatctcagccacggcccccttggtcctccagtcaacggactccggcagcgcctcgttgtcggcggcgaggtacctgtcgctgaccttcctctccctccgcggcttgttcctgaggccgaggtaggt

SEQ ID NO: 5550 - DNA, 18878 bp, Oryza sativa
ctttccctacacgtagtaagtctgttctgtttttgtacttcctccatcctataatgtaacaatctagtatgggataagaccttatcctaatacaatgtatctagacatgtcctaggttgggtctcagattactaaattttatgacagagatagtaactatttaaactcatgtttctcaattactctatctaattatatagacttgctcgttaaaacctgggtacgtggtaccgaggttgagctaccgtttatactactacgatggtgcatcccgaatagcaagagtacacgtgacagtccatccgggcggtgctgaggcggagcccgggcgcccacagacccaaagctaggacggacgaacggtaaagcgaagaagcaaagcaaaggccccgtccctccctggctgcagtgtagtgtagtgcagtgcagaccaagataagggcaagggcggcccctccccccctcgtgccgccaccaaaaggagaagacgcgagaagacaagcaatcgaatcgaatccaagcgcgaaaacccacggccgcccccctcccccgatcagggtcccccgttcggtcggctaaggtttgctactaaaaacatgtgtaattttttgcccctctgcttacggagaaacacgcgatgacgccgcgcttttataaccgcgcgtccaccacgattccccctttactacgttctctccattccatctccccccaatcgctcgggcgcaatgcgcagcagcagcagcaaggccacacccacaacctcccctgcttttcgcgtcctctgctctcctcctaggttagcagcggctttgccaacgagatagataggcaaaagagaaagtacttgcatagcccaacaaggcaacagctgctgctaccctctctttcttttctctgcttctccttgctctctcttctcttcctttctttctttctatctcctgcagtgccaagagtccaagacccaacaagggggaggacggaggaggcgaggcagaggcatctcaccgaagggggaagggcgacgccatgtgggacctcaatgactcgccggcggccgaggccgcgccgccgccgctgtcgccgtccgccgacgactccggcgcctcctcgtcctcggccgccgccgtcgtcgagatacccgacgacgccgacgacgactcggccgctgtggttgtcgtcacgcgccagttcttccctccggccgtcccgggcggcggcggcgaccccgcccccgggaacgcgcgcgccgggtggctccgcctggccggagccgccccgccggtcgctgcaacggggccggcggcgtcggcggcggtgtccaagaagagccggcgcgggccgcggtcgcgcagctcgcagtaccgcggcgtcacgttctaccgccgcaccgggcgatgggaatcgcacatatggtaagcatcctcgtctcctcctgctcgttctttccattttcgagagctcaacggaggaagaaggagagagagagaggcaaaggggagcaaaagaagagcagcatggacgggtttggtattggattcgtcttgttttgggcatttcttgcttctgctccttttacctttcatagcaacatcttatcaagttattcttgccatactctctcctctctctctctctctctctctctctcttctcttctctcatcactcaccatcttcttgtcttctctctctcctctcatccttttgtgcaatgcagggattgtggcaagcaggtctatttgggtaagtttcattcatgtccatcttgtccataccccccatacttgggaactgctacaagcggcctccacgattggctcgccaattggagccgttttttctctatgggcgcggtttcgattcctcacaatggctgcctttgtgacgactgaatttgcaggcggatttgacactgctcatgcggcggctcggtaagttggactcaattcctcgtcttccaatcgctgacttctattccctgctcgcccaatcgaatccggcgctgtcaaaattctaatcttttttgttatgttcatttcccaatcgcagggcgtacgatcgggcggcgatcaagttccgcggcgtggaggccgacatcaatttcagcttggaggattacgaggatgacctgaagcaggtgagagcgcgatcgattattattacctgaactttcctttcttttcatgagtcgccacggtttcgttagatcatactactattactgtagctgcaagattaacgggatcattgcagatgagcaacctgaccaaggaggagttcgtccacgtgctccggcggcagagcacggggttcccccggggaagctccaagtacaggggcgtgacgctccacaagtgcgggagatgggaggctcggatgggccaattcctcggcaagaagtatgtcctaatcgatcaccgtttcttcctctttcgttcgatcgttcgttcttgggcaatctcccgtaaatcatcttgtgggtttttggtgcactgcaggtacgtctacttggggctgttcgacaccgaggaggaagctgccaggtaaaattattgggccgcactgtgcgcgcgcgcggccattgttgttgaatgtcgagtgtggctgctgcgccgtttgcgagtttacgcttctgggttagatgggcgagcggtgatggtgattgatgtttcttgtctcttggccacagggcgtacgaccgcgctgccatcaagtgcaatggcaaggatgcggtgacgaacttcgatccaagcatttacgccggggagttcgagccgccgggtgggtgtgtcatgtgtgcgcttactgctcatggctaggctgttcgtttgtgagttgtgactgctcatccggacaaaatctgtcactgttttgcagcagcggccacgggtgatgccgccgagcacaacctggacctctcgcttgggagctcggcgggctccaagaggggcaacgttgacggtggcggggacgacgagatcaccggcggcggtggcggtggcgcgggctccgaccagcgcgtccctatggcgttcgaccttgactggcaaacggcggcggcgaggagcaccaaagctaaggtaaaaaaagaatggggactttgctttccgcatcagccgattgtcttctcatcacgtaataaaaaggcttaaaaattcctcgttttcttgtctagttcgaccagaactcgaaccatccccagatgcctccggtcctgcaggtcacccacctgccattcagtcccaggcatcatcaccaagtgggtagctcactatacaactccactccacttcgctccatttgctgctgaatttctcgcgtttggtttcaccggtatccgtgagctgatgaattcttgatgtctgtgctgctagttcttgagcaatggtgatccggggacagcgggaggcctgtcactgacgatcggcgcaggcatggccgggcactggcctccccagcagcagcaggggtggggcaacgccggcggcatgagctggccgcacccgccgcacccgccgccgccgccgaccaacgccgcggccgccgcaaccgctacagcagctgcagcatcatcacgattccctccctacattgcgacgcaagcctcaacctggctgcagaagaacgggttccattccctgacccggcccacctaagatgatcaaagatttaaaattcaagatcgctgcattcatcgtctcctcgtcgatcgatcatggcaaagatcgatggagagagagaggtgtgtgtcactgacgcagggaaaaactcaatgcagatttaccagcaagaacaagagctggatgctattcttttgctctaccttttttcttctctctttcttcttctctgtttcttgattgggcgagcgagatggagatggatctgatcatgaatgggacacaagtgggcatgtaaatgaggagctccctagaaggcgagagagattggccaagcgtcgcctcaagcagtgtaggagtatctatcttttgccgtttcgctcgctttctttccttcttttctttcaccatggccaacaacgatgactctgggtgtcaacatcacagctcattttgttcggtctcatgttgcatcattcactgcatgatgaccatgattcgggaaaatttgctccatgcacctccgcttggccgacaacacttgccctctagtaagcatccttaaacacccacggtttctactactattcatcgctttataaatcctacggagtgctagctttacgctactactactgtcatgtaatctatcatcatcaaaagagacgatcagattaacatatatgtcaactatttaagctttggctctttgctttccaagaaacgtaactgccgagatgtggagcatatagaagtattcgtccttctagatgttggtactaaagtaatgttctttcttttctccctctaagaagagatgttttatggtgcttggtcttctaaattaaaaaagacatacgactgcgtttggtatcctataccaacaggaatcagatatgtgggccctatctgcaatgcaagaaaagaaaaatcgaactgttccttgcagaatcttcctaataatctcttaatttcatagtgttgggttacttgcacacatatctaacatctcgaagacaagtagacaaccaacagtcatctggacttgttggaattgaattcaaagcgtgattaaatagcaatcttccaaaaagaaaaaaaaatgaatcaatgtatatagacccaccacgtacggttgtgcttgatcatttgataaggtacggatctttaggttgctgttgcttgttgcgaaaacaaaaatgttatcatgagatttcccgaatagaaaagagaaaaagaggaataagcagatgcatgtatctcttttccgctcgcttttttatatccttggagatgctttaaaatgtgttgcctatgcacctccctgaaaaagaagagaagagaatagtgccggggcatagatgcaagtgggcgtaacattttgctagagaaaggggattccttgtttctaatttgggcattgcaataattgaatgtgtgtggggcgagatgagagagagtgaagtgaagtgcagtgcagtgcagggtagcatcagcagcaaccgggcatcaagcaaggcaagcatgtgtatgtatgcgactggttcacaaaagcgagctgggccagccactggctgggccatgaccatgagagccaacctctcgcggtaaaaaacaagttaatgtggtctcatccgatgccgtgtcgctctcctcggctctccgaatcagttcgccccctggagctaagctttaccttagctgcctctcaccggcaaccaaccaggcgagcgcattggccgttttcagtctccctgtggccattagagcaggtacaatagcagactataagccagctgcaaacatattttaaggagataaattaggagagagaagagcagcgggctacagatttgtagccagctgtagcacggactccaagacacagtgtgtctatgataggtgggactaggtattaatagtgtagtatgtaactattatatgaatgagctattaaattagctatagatgaattggagctagtagttggctatactattgaacttgctcttattgctagcaccagatctcatcagtcatcagacgcttggtcactttcacctcacttcgtccacctgttcctcgttcaggacttggtcctggtttttatcgttcgcagtggatgggcagggaaagagcttgtcagaaatcgttttggtgttcgttctagatttcgcttgtgtgtattgatgaacaggggtgcctcctgatggatcccttgagtttccgtgccgtgtgcatgtttgtggcaatctatgaaaaaaaatgcaatgcgatcgagcggtggttcagccggttgctagcatcagatatatgacaaggacaaggcaggattaattggctgcgtgttcagcatcattcttagtaagtagggacgtagtacgtctaaccgaagcaacaatcaggactagtcgtcgtgacttgttcgcaagtgtcttgtagcttttcttgtgtaagctttgctaggggccagctcgcgagggtgccatgcacatgcgttctatgcatttctactagccactataactgttgtgcaatagcagggggaaagaaaattttcctcttgtccccttgcgactcgcggacctgggtctgcatgcagctagaaaacgatcgatggcatatgcatcatgcaggctctcaattaatatgtgtggctacaagaaataatctgcgcaaatggtattgaactcttgatatacccgcgaagaaactcctgtactatatcacatttaggcccacatgatccatgagcttatcctcactaagctcatgacaaaaaacggcatgcataccatacaggcaactaaatctctcttcatcaatggccgttgcaagtggtttccttgcacggtcgatcgagtaaatggataagtgccacaatggatacgtctcggccggcaaggcgtggccgcgtggggtctcggcgcgggcggccgtactcggtttcacgggacgaaactagctgaaaccacccgatggcgcgcgcgcgcgagcgcgtacgtacgagcgtgagaccccacgacgcgcgcgcggggcgtcgctagcgagtagcgagacatgagcagctgcgagtgcgcgcactgtgcgcgcgcggctgcaggccctcctctccccggcaaaaatgcccccctcgggccgcatgatcgatgcttccactcgacggcccgggcgctctcggcatcccctgctgcgtggaactgtgcaacgtagggccccagcgtgccggccaccggaaatatcaagcgagcgcggagctgatcgatcgactcgtacgtcagctgctgaagcacacgcacgagaccagcatgcaacgacgggtcgacgtgcgtgctacatggacgaaggaaaaaggtaagcacaaaggtgcggagaccgggaagcacgcacgcacgcacgcacgcacagggcagcgttacacgcatcggctcatcgctacattgcagctagctatctaggccaatacatgcagccacggccggtagcttaggtaccactactagctagattcactttttgccggtagaatagtcgggagtagtagtggtggatttccctggagggaaggagagaggaggaaggaagggaaggaaggacggccggtcggtcggtggctcgcgtcgtcggtcctgttcacggcctgccccgaccttccccaaagggaaagtgggcaccgacgcgcagctattcaccagcaaaagccgctcccgatcgatcgattggtcgcattgtatatcgtattcttttttttctgccgcgcccccgcccgtccggtccagatctggcgccagtgcgcgatggcgacgtgagactggctccgcacggacgccaccaccaccacctctctcgcgcgtcgcgttgtctcactggctacgacctagcatgcgctccgatgctcttcccatccgtctatcgcccatcgcccgccacgcgccaccgtctcgtgtcgtgttgtgtgttgcctcgatcgaattggtgttgcttgcttggcccggcaggcagtcgacgagcaggggttaaaacggaactgctgatgaagcagaatttccacgaaaatcagctgaagtttggacgttttgatacgagtttaggacggcttgctgtactggagtagttagtagtgctacctagctataggtaaatggaaatcttgcagaaattgacttccacttcacggatagtggaggaagtacacacgctgtacccgcatgcctaattcgtttccatccaatgacctgttatgacgccgtatctatatgatgtatagtactcttgagccataatcaataatgccaagtataattgtccgagcaagcccccttgaaattgtggttccaggccggccgggcggcactaatctcctgtagaaccgtcgtgcaagcttagactttggcaccaccgacgatcgaagaacttgtctttagcacgggcacaagtgcgcgtgagatgaccctgaggcgtacatgggcgacttgtgtgagctgtgaagccgacggcataatcaacacaccgattgtaatgacgcaagaatgggacgtgtgtcgttccaagccgccgccgccgccgccgctttacggatgaaatcatttttctggggcgtatacatatgaccggcacagcacgcgtgcatacggcccgtgcatcacttggattacgtactcaccgtctcaccgatcgacggcgggtgatgcggaccgatcggttgtttacttgttcggctcggcgcgcgcggcatcacgcgtacgacaggcggagacgccgccaccgaggagatcgtcgtcgcggcggcacgggcacggagcccacccgcaacgcgcgacgcggcggtcggcgaggctgttttgcccatgcgcgcccgcgcgattggcccatcaaacccgggacagggccgcaattgcagcatggggcgagcgatgaggacacgtgactccacggatgcggcgggatggaccggtggacccaaaagtctacttagcttggtttggctatgggctggtggtccagcagattggcaccgggccagcctgcatggactggacctggatgttcagctcagccttttactcgaagtaaattcttcttctcttctcaacgggttacttttcttcatattttgcttcagagaaaaggcttgtccgtggtactgcactgcgctgcatggaaccccacttgtcacctctgcgatctgtccaacgaccgttacagcagattgtcaaattagcgtttgactgcatctgcgtggagctaatcgttgaagtaatcagccactgagacactgaccgatccatttcacagatctgttggcttgtggactgtgaattaagattgatgccactgactggtatatgacgctaaatttatcgtgcagcaaatatatgtgtcgctttaggaacatagctggcaatctttcctcctggtggtgcgcaagacagcccgacagatggattgatgaaccgatgtcacactagcttgaggtgtacacttccaacgtaagtagcacaaacaagttgtccgtactttcaatccgctgtcccttgattcatgcatcaaaccattaatacatgtgataagtgccaatcatttaggtgggtaaacctcacaaacgttctaagctgacggtggtcgatgccactgatgcacgccctccttatgggccactgctgcaggtcctatccactctcaggttagttatccaatatccatgtaattaatcactaagtaaaccattgtagtagcggtagtactatatgtgccaacaactagtattcttctgtcatcactgatcccttctctacactattgatgaatgtgctcacgaaaatcattttgtactgtggcaagctggcaatgaactctcctggacaaaaaacaggtaattattgtcataacttgctggaatcacaagatactcctgtacttatggggacaacaggagcagtaatttaatggggagtgcaatgctgctattgcactccattctactcttgtccaacggcaccgccgacacttaaaagccccaaacttaggcaaacactctcgagctaaatcgacttttcatcacagcatcacaggattcaccgcgcatacggatagctaaaatccgagaaagggctaaatttgagccccgggtccacaggccagtgagccaatacgcagcatcagtatccgctggtacatgtgtcattgcaaggatctactaagaaaaaaattacggagtgagaccccagcggttgccccacgggaaaagctgaacgatcgctttgttcttatacccgtgtcacctttttctcccttccatccacctttgtgtccttgtcttcatctccctcctccataggatgccgtcacaggctcacagtgaggcagcggcagttcattcttggtgagctgcagcagagccaccacctgttgtcactggaggtcagttcagttcagctcactcacctcacctcactggctactggctactagtgccttttcttgagttcttgaaaatcttgcttccttctattttactcttgcccttttggatcctttgtcaatgcgcggtgtgagcacactccatcttcttctttgtttgctggctgggaaaacgatggggaaatctagagcttgggctaaggacctaatgggtttggagctagttagatggtgatgtttttggcttaattgcttaactacactaacatgcatgccgattgcagaagccgctcttgctaaactgctggtgctcttagggatcctgtcttcttgtttcaccgtggagcccttttggggttttcgccatcagttctagctgatgtaccattttcacttcctgctgcgcagaaggaagcttattttgagttaatatttctagtgggtttagagttagacttctgagctctgactgcttgtttctgcatctttcttttctctcatcttcttctcttgccctccttgtgaattgtatatttgtctagatttagatgcaatcaatttgcataaatactgtctaaatagatattgtgaggttgggcctcactccagttagcaataaaacttcgttcagaggttttaaggtttactactatattcgagttgtccaaaatagtaaatgccatcaaaatagtaggccctaaagattgtcgagacaaagaagaagcatttcgtttttagaggtgtttaagtacttcagttcttttgacttctgagaggacgtacctgagtcacataaatgcctttgtaccggctggttttaattgcatcggttggtgacgcttctggatcaaagtgataggttcaatgtcaatgggcttccactattggagctgacacagaagctaaaagttgacgggcaattctgttaaaatttgttttaagaaactctatagctgtattttgccaaaaactttaccttttgaagtggtaggtacaaagagagtggaacagaacaagcttcactatatcctttactttcttttctgagctgagcatcgctttctgcattgaaaggaaaatgatattatggttagctgatgaagaaacttattaatcatgaatagtagattagatagtggtcaatttctattaacatggcagataattaacagtactttacttctgaacaatcattggttaacaaaatacttgctgagctggcatacgccagccaaagtttttattaagcttagaaagtgttcaaagggatttctttgttttagtccacgagtccaaattcttgtatttttcaaccttgtctcatggaataaaaaactaacgtgtatacgatataattatatgaatttaactgggataaaatacaacttgctttcagattatgttagcttgggatagttttgcaaagatgacttgatacacacaatttcagtttcttaatagaatagcacccaaggaaatgttctgtctgtatccaccttttgtacaatttggtgggaatatatcttactaacatttatatttcttattaatttctagggagtttagaacggcgttgaatattgatagatatttagcatctcactaatggataataaaacatggctttggagaaaaaaatcctcagaaaggacaatttcaacgaagaacaaagccaatatatcagagagggaacaggaggtacatcacttatctctttaacattattaagaagccttatgaattatgatatgttcctatctggattttcaacttttccttccctgcagaaagagaagattgcacggttagagagatccttgcaatgcttaaatgaacagatttcatttgctcaagctgaatgcgtggagaaggatgctattttagctaagcaagcaaaagtggcagaagaagcaatattaggtaaaactccattcacttttcgctaactgatacatgttcttgtttcaaaactagttaagcacatgatttttccatcctagaagagaaatggacagctgcaagtatgcagatacaatggcaattaaagttctgcaattctttttttctgcaattcatgttattggtttacaactattctaggttgggagaaagctgaaggtgaagcaatagctattaagacacaacttgatgatactctagatcagaaagccgcaattgagcaaaggatttgccatcttgatgaggctctaaatgttgccatggtagagagggagttattgataaaggacactgctaaactgatttctcatgagcaagttaaagttgagaggctggaaggagatgtagtagagaaaataaacataattgctagcttggatgccgagaataggaaactttctgaaatgctctcaatgaaagagaaaatgatctcagagttaactgaagcaaagggtgtgatagagtcaaatttcaagaaccttgaggtaaaactagagtcagcggacaaattgaattcttctcttagatatgaggtttgcatgctgcagaagcaacttgatattcgaagtgaggaaaggaaatttaacctgaaatctgctgatgctgcacataaacaacatcttgagaatgtaaaaaagattacaaaacttgaagcagaatgccagagattgcgttcaatggtacgtaaaaggctaccaggccctgctgccattgctaaaatgagaaatgaagttgaaacactgggtaacaatgcagtaataacaaggacgagaaggttcaattctacaacatcattcaactcaggcaatctagtgcagaactcctatgatgcatcacatgaaagttcttcattgcttgcaaggctgcatgcgatggaagacgaaaataagactatgaaggaatctctttctagtaaggatggtgagctccagtattcgcggaccatgcttgctcgcacaacctctaaactttcccaagttgaagctcagcttgaggagttatcaagaggtcgggttgcaacagatttagtaaaatgcagtcctacagtggtcgagaaccctctatcatcaatctccgaggacggttgcaatgaagataatgtcagctgttcaagctcatgggcgtctgccttgatttctgaactggaacacttcaagaaggggaagctgactacaccctcttgtaagagtaccggagtatcagacttgagtttcatggacgactttgaagagatagaaaagttagcattggcatgtgatgcgaaacctacagaatcgtatgattcaaggagggagtctagagaatcatcagggaaagagctagtaacagttgatggtcctattgaaacatctgaccaactccgtcagcacaagattgagaaggcagtcctgaagttgatagaacttattgagggtgttgtccagagatcatcaaaagattatagtagcactgttgtgctctctggtggcagtgagggcgaccgctctaacacattgactggctacgttgcacgtgcattcctgtggaaaacgtctgaacttacttctgtactacaaaatttcgtccttgggtgtaacgagcttttgtatgggagtacagatgttgaaagatttgtgcttgaaatcaatatcacactagactggataatcagccactgcttttcactccaagatgtatcagacatgagggagactatcataaagaacttggagataaatagcagttccggactagaagttgttccagtaattaagcacaccggaatccaaacaacagatggcatgtgtgaacccaggacgcctaacaagatgcagatggcgatagtatctgtatcaagcttaatggatattggatataaagctgatgatgactcagaaattttcaggaataaaataccagtctctaaatgtgaggaatcagaaggaaaagcttcaagcctgcgagcagagcttaatgcattgaaagaaacaggaaaaatgatggcacatggtgtcgatggtgaatccacaatcaatgaacttgggaaaccatccaactctgacataaacaagggcaatcaacacggagtgtcttctcttgaatccaagcttcagctagaacggtaattctttcagttatttatttttcatcatttagccttcatagtattatgcctaatgcagttatttctaaacagtttccctgctaaagaaggtccaaaatgtgtttctaggaatgaagatcagcatgtacagatggtaagatccacattattttacttcttgactttgttagtttgttattctggaacttgcctttgtactttgcaatgtattaggtatttcatttggagaatgtgttacatatttgtgctttgtatctgcaagtaatttgctccaccgatgataatcctgtctgtaatatatagcattgcttttgttcttgtaatacaaattgcaggcaagctcaaataaagagcagtcagtcttgcttaatatgttttttgtttctttaattttgagtcaagttgaataggacgtgatataaatttattaccatttagtagtgctacaattttttttattacccattcactctgtttctgttatctgtctttttttttattttgtctggtttttttgggggtaatacttttatgagcccggcgaaaaagtattacctttattatatatatttttttacaactcaatcaactttccccattgtgtctacagcggctggagatctcaacagcatcagagaagcttatcgagtgtcaggagacaatcctaaacctgggaaagcaactgaaagcacttgcatctccaaaggatgcgatccttttcgacaaagtggttcatacaaaaattcagtctgagcgaaaaccccggtctcagtcgctaaacgagatgctagccatggatgatggaggattcgattacctcagctcccccaaaaccaaggagatcatatgcgcggaactaagatcgcggcatgaaagaagttgctctgtcgacaacggaggcgatgattcagtaacatgcagttcccacccaatgccggtggcaccaccaatgaggccctacgatgtgaatggaacttgcaaggatgaggctgctctcaaggtagtagcacttatgccgagcaagcagaaggggaacaccaacttgctgaaaaggattctggcaggaaggagaaaggaagccatgaccaggccaaatgtcgttgcgactgcttagcctccatggatgatagattgccccttctccggtgtaaattaagtgtggccgtggatgatggattgccctcttcaggtgtaaattaagtgtggccgattggcacttgagctgtgtcgttttgatcacgttggtagtaagaactaagaacagtgcaatgtatatgtaacatgcggtatgtattagcgtgatttgcaatgtttccgcaaccattacactgttgcttgagcttatgaatctatctctgctttggtttaccgtgcaagtgaacagaaaactctaattctagttatgatagatctctggaagacggctggtttatcggcgcgtgtttttatgcctatcctggcgtttctgcagtgggatcccacccagaggaggatcagcagtagcagcattgccctagttttggaggattttgaaaagttctgcaccgatacggggagagaaattcagggtttcagagactgacctagtgacctctcatcttgatcgtgtgctcggtgtcgcggacgcggacgagcgcggggggagactctcctgggtcgtcggcagtcgcgcgcgcgtgattccgcggtggtcgggcgccggccgggatttcgtgcgggcgagaggggcggggcgcaggcggcggaggggatcggtttgggagggaagggtttgggcggcggtggtcggcgcctcagcaggggcgctcgatgaatctggaatttttttcgtttttagattttttttaaatatttacagaaataatctatcggcaaaaaaaattacaaaaatagaccctgccgcacacctctagggcggcaagctgacgtggcaaacgggagaggaacgggcggtgacggaggtagggttttttttgcaggaaaacccttgccgccaggggcccgaatgcaaaaaagccagtcggggccggccattttgcaggcggccccttgccgccctctggccgggcggcaggcctcgctgcctataaaaggcctgccgcctagcccccagccatcattcctcccccctcaaatccagtgaaaaaaaaagaagagaggggaggagaagagaagaaggggcgaagccctgccggattcagacgccgatttcaggtaatattcatagatcctatatgtgactattgagttaaatagtgtgtattttttaaaaatttgtttgaataaatgcattatatttttagggttttagttgtactaatctagaagtgcgtattgtagatatcggtaactacgcagatctgctagtttggaatcaatacattaccgttgcattggcttacacaagactttcgtcaatggctagacgccggatcattgtagatatcttggacgggcttcccatggagggagtgccgtaggtagcacccgccagtcgctctgttgttcacgatattgtcgttcataagccgcttttctctgtaagtattgctcagtactttcggatgcgaaataccatcgaccttcttgtaaacaagtggttaggtcgagaacgggattttctgtatcgacccactcgatgtatgcgcaagccgtagtgcgggtttgctgaatagagtagtgttacgaagaataaagcgattgcccatacggaatgaataagcatatgcagataataaaatacctcacggtcatagttagggcacctaaaaaagcgccttccttgaatatcaggattcctcgaagccattagttggcatcgatcaccgtataggcagagaggacgctggcaccaaggtggtagtaggtatacacaaggatcgctacgccagtttggatcctcaacaccccggcatctagccattgacgaaagcaggtaggatttgtaatgaagcaagtggggaagggagtactgaatgtgacatgtgccggcttctagataccctcttgtgtaagccattgacgaaagtcttgtgtaagccaatgtcatgtgccgtcggctttgcacaagagcaatgacatgtgtcgtcggctttgagaacacactcctgcttcactctcttgcggtagatacccctgcctgccttatcttgacatagtatctcaaacctgtgttgttgggtaccttgcactagagctcgatgttccacaggccatgtcattgttgttatatgtgcacgatacctttcggcgcatgcacgattactttctgccgcaccgatgcagcctcctttattcgcgtgcgatacgagtatttgcccgccatttggcgcatacgaccaatgtaactttcggcgccgatcaggctgtaactttcggcgccaatcaggcgtacccaccataccccaccacgttcacatgtcaggggtatcactcgattttttgcgcctatataagtcgccttaacgagtgagggctcacaatctttcagaactcagttacattcagtactcccttccccacttgcttcattacaaatcctaccggctttcgtcaatggctagatgccggggtgttgagaatccaaactggcgtagcgatccttatgtatacctactaccaccttggtgccagcgtcctctctgccgatgcggtgatcgatgccaactaatggcttcgaggaatcctgatattcgaggaaggcgcttttttaggtgccctaactatgatcgtgaggtattttattcttcgtaacactactctattcggcagacccgcactacggcttgcgcatacatcgagtgggtcgatacagaaaatcccgttctcgacctaaccacttgtttacaagaaggtcgttggtatttcgcatccgaaagtactgagcaatacttacagagaaaagcggcttatgaacgacaatgtcgtgaacaacagagcgactggcgggtgctaactacggcactccctccatgggaagcccgtccaagatgcaggtgtggtgatcgttgtcaggttcttcgttccataaatcctacaacattgggtcgaagattctttgtttgttcaaatattcttgacgatgatttcatggtaagaatattttgattacatgaatccttattttgtcacaacatttactaactttgctcgctttacatctattctttcctcccaggaaccactaaggagatgttaatacagagaatggatagacaccagaagggttctaactccacctagccgtgttgtgcagcttgaactaccagagcaatacagggttactaaagcgcggtttgagagaggagagagatcctcacgtaggggttagctattatcggacaacttggcatattgaaatttctactgtcatgcttccttgtcccattactacatcgtcgttgtgttcaactattgcactacctccctcctagttcgaatctaatatcatctatgtaaccgcaatggaaatagttgtatcatgttcaaattgtactactatttcttcatgttacataattctccttgtttaagtccatataatgtttctacgaccgagactgcgataggcctatattaattatccgagtactaatacgtcgaataaggtacaaaataatacctcacttaacatatgaaattgcgcaacaaccaacttcaatacatttttataacaatattaacaagttttaccaataaatacttctttatttattattaacgtaacatagaaaaatcttttggccgtacttttttacatctgggtccctt

SEQ ID NO: 5551 - DNA, 11760 bp, Oryza sativa
gtccgcatattttgattgagtttaattagcatttcgtcgccatctgatgattccgaatgattttctttgtgtatatatctcgaaatttgaaattcggtagaatcatgaggtgtgtaattacatatgcaagtaagttgatgggcgtgatcgtcgtgtcctaatcttcgaatttaaaccatgcacaaggtagttggtggtggtgcatctattctgttagcgatatggaatttgaacgtgtttcttatatacactttagtgtcgttgtagagcactaaaattcagttgtgtgctactggtattttactgtcctgattttttgtcgtagtttacccactcacatatatcatcactgaaacgtatttcagcgtctcccctctcttccacatctctctaggcctgtaggatggtggcacgcggaaaccaatagctaacgagagaggagctagacggtatcaccgagctcgagtggtgacggagacgggaaagctcaggttggccttggttgtcccgtcctcctaggttgatgttgccatgtagcgacggccttaggcctacggtatgggactaaaccgaagaaaatgcaacgacgcgtgcactctgtcccgtgttgacagcccgcaggcccatctccctgttctactgtagctaccagcagcccattagtaatttcttccatcgccgtagccaggaataagtcccactttgtctcccttaactagtgaccgaatctaatccatgtcagtgatatccggtattgtggtttagggatatagattagattcaaccactaattaagggagtcaatttggacttattcccatagccaaccaaaactgagactatccaaataaaggaacaatcgatggagcctgaagttcagcccagtatagctaagtttgcggaggaaagcttcggcccagaatagacccatcagaaagtttggatcgccatcaatgtcaggcatctaagttaggcccatatacaggacaaagacaactgatggaatgcaggctttcggcctactagcgttgcgaacggattatcttgcgggccgagttggcccacagcctagagaagtagtatacggcattaaccaatatcaacgtcacccgttagatctaaaatgaacggttcagagtgaccaagaaacaactagtcgcaaagcttgttcggaactcacggtcaaaccgtggtgtgtacttgctagacatggcatgggacccgagtggatttgacgaacaagcactgctggattactgttgctactttaatttgtccacctcgatcgttggaacatgtcgatcaatgcatggtcgtcggccagccgatcagtacacttagagactgttgccaaaataaaccttactaaattttggtattgtcaaaatttttagtaaggttgataatgttgccaaattttagcaagatagctatttttgaatgtggtcactttgttgccaacgtatattctaccaaattttggtcagtactgtgcagttgccaaatttctggtctttttaccaaagtttggtaagaaaccaaacatatgcataattttggcaactttatcagaaaatggtatggttagaaatagcatcaaagtgaacaagcccttatcaaattgtcgacgtttgatgtcgcgattccggtatttgcatagtatagggatcgttggtaccagggtatatgcgagattgaggtaaaagagatggagacgaggatttttatataggttcgggccgctgaattgtcaggtaataaccctacatcatgttggccgaagccggtcgttgctcttattcaccataattacaccagtacaatatttggggtagcatatttaactgttgtcaatatggcggccataaaaccatcccgtagtcgacaacagggtagtcttccttcttgagttcgtgcccgacgagatcagagacaatgctatatatctcctaacagtatccgtagacaccgtaaaggactagccatgcttatttctgaagtcgatatccgacgtcttgtcttggcgtatgttggcttgtatgttgatattgtgtcttgatctattgctccgtgtcccctctcctcttagggggtcttctatttatacccataggtgtccccttatccaagtagaactagggaaaccaatatagatacaatccgagtagtcattgtcgtttccatgtagaactctggttgtctttccttatccggaactccttccatatccgaagtcagttcccgtataagacatggtatgtggtgagtcctgccgagatttagtcaactactattagctattaggtatgtgatatccataacctgatacaaatctagttagtactagtaatctagctccagcaaacaaatcgatcagtagatctcatctcgttgttacgcgcgtggattaagatattgcccccagttgacagcggcatggtgaatctgtgatgattaccgcgagcaaggagaggccggtgcatgccaaatctccccgatttcacagcatcgcgtggcgcgatctactcgatcgatcaaacccccccagaaaaagcaagtcccaatgccggtgtacgtagatcgatcaacgccatcactgattcactgtactgtactacttgcgttacgtacattgcgagattattcagacaagacgcagcatgagcctgcagatgtgcagagtactagctactaaactggtccctgacgatttcacagctagcgcgctcgctgtttgcgcgatggatgcagtaataagctggtagcttttcgcctaccgttcgtcgtcgcgcgctggtgcgtgtggtgtggtgtagtagtctcccccacaccgccaagtcgccaacgccggtgaccagcttggcgctttcactgatctctcggcacgcagtctggccatccatggccgcctttttctcttttccgggctttttgcctttcacccagtgtgcctttaccgggattgccaaaatcttttcagtaatcccatcgtgcatatccatacgtacacgcctggctactacaacgtacggcgactatgtatatatatatgcattgcaacaatttgcaattgcgattgcatgcgtgtcagagatcgccggaggccgtacgtacatggatatgtctggttcaacacattctctcttctcgctggccactgtaattccaccgaaaagtagctcatgcattccctgttctgatcgatgggcctctaacgcgtcgcagccttgttgtatcattgctgctgagtagcaaaagaccgaccgatttgacggtccccgacattgcatggtgtgtcacttgcattgcaccatgcatggtgtgtagagacgacagacactcccctgcaggcaatggacatggcatgggaggctctagctgaatgacactacaaattaaagctatctaagcctgagtacgtgatgaccagtgtgaccaaggacacaggaccagtgtagtccatgccacaagctaagcttatcgatcgatctatggatcctgatgatttgctgtaactaaacagtaaaatatgttattttgcaaggaagcatgcacctcgttttcctgactgtacccagcaacttttgcacgagaatgatgtgtgtcactctctgtatcattagctaagctctgggatgatgggctttacttacctgcaggtagtactgctgcttttgctgatatattgccgggggttatcagggtttcaggaaagccatgttgtgtactcctacatgtaatgtgttcatagagattacagggtactgctgctacatatgcagtgtggaggaatattttttcagtgcgtactggaggtctggagccatggctctgttgatgtgcagtatcctgttgcgagttcaacgatagatggaggcgctaactccaaggtcaacctcagcatcaatcattctgggtctcgctttcgtttgcatgctttgccaatcatatatactagcatgttgccgcttcatcgatggcagatatggaggtttttgatggtctcctcatcgatagccccctctctgcctgcggctaacctagctaaatatatagagcaaatatatatggcaaatcgatcttagagattgcggacaggaatatacttttctgtgttttgctttgctttgcttctagctaggtctatatgatcatgcgcaatcatatatgcaggtatatatagatggagttgtgactagctagctagttatagagagaatagcacacaatatgcaatgcattcagactagcagacagcaaagtaagcagggtaattacttgtcagacgaagactgtaattttaacacactacaaagttcataaatatttcatttgagatatgactatatgagtcgatcagatcgagcttcatatatactagaccatatatagtacatataacaaagatattttttttttatattctggagcaaatatgtaactacatttatgatggccaaatacctggtcagatcttgatcgcaacagagggggatcagcaagcttgctgaattaattgatcaggtcaagtcgttaaagcagacaattagcagtaaactaaatatacaaaactgagaacaaaactcgtactgtagctagctactctttagcaagctcacatctttacgaggaaaaactgtattaattagctaaaacatcatttttctctctaaaaaaaggtataggtcaatgtacaagtaactggaattcgattggtattcacaaatcacacattcacgcttgctttaaaaggcattgtaaaggaagattagttttcccatatatttcttgtcagtcgtcgtcatgaatttcgacaggaaaggtgaaacaggggagctttagctccatgcgagggagaatttttacctttattacagctcccgctttttcgtgaatttgatgattacgattttacgaatgctgacgcctttcatcaccaatctacacattccctgtcgcccccatgaaagggcacgcctttaattctcgactgttacctcgatatctcacacaaaacacactcaaaccctcgctgcctagctttatcgccttctccccgtataaaaacacgccaagatcacgcttgctcgcttagccctagctacaacaatctaatctatctctgcttccaattcccatacaaagctagagctaactctgagttaaactgcgacattacacaatgaggcttcaccatctgcatgtggcctacctggatcacaaagcgtcgtcgtcctcgtcgtctccggcgccaccatccatctccccgtcgtcgatccccggatcggccgccttccctgctttctccttcaaatgcctccgcccgctcgcgcccaagatctcgctgccggagccgaggaagatgatcgcgccgccggacttcgtcgtccctcgcgccagaaacgcttccaagctgctcaactacactgttagacacatcaaaccctacttgttcttgatcgatcgatcgatcaggttcatgatcgtgtatatatttggtttgcaggtgcaggtgccggcggcggggacgacgaggtggaacccgtcggcggagcagataaaggtgctggagatgctgtaccgcggcgggatgcggacgccgaactccgtccagatcgagcggatcacggaggagctcggcaagtacggccggatcgagggcaagaacgtcttctactggttccagaatcacaaggcccgcgagcgccagaagcagaagcgcgccgccctcctcaccctcagcacgctcgacccttccttgctgcccgctaccgctaacgaaaccaaagtaattaatcagcaaattaaccgaattttaataatccatgaatctgtagacatttctgcccggctaatagacattttttgcgtgtatataggaggcaccggagaagaaggagaaggacgtggaagatggattggcgagctgcaagcggcggtgcaaggcgtggggtgacggcgccggcgatggagacgcggtggtggcgacggaggcggccggcggctgcaccgacgaagtgaccctggagctcttcccgttgcatccccagggaaaagcttaattagctgcatgtgcatatatgtatactccgtcgatcgtctgtcacgcatggtatcatcatggattggccgggttgatgttgattgtggaaattaaattccctcgtctttgcgtgtgcattgtgttgtagttggtcgatcgtgtgtttggattgctttgaacatataatgcattgtgttgtggccgggtgcttgatcggaagaatataatcagtagttccaaactggaattagcagttgctcatatacatgcatgaatggtgtagagatcacgcaactatatatgcaaggtttggatatgctaattagggcttacacacgcgcatgcatttcaccaccggttattgatatacgtacttatcatatattcacatgtgtatgacatcatccaggcatgtaagggtgattgctatttttaaaaggtcaaagacacaaacaattaagtacatgttcatatatcaacaagtcacgtcaatctcataacattatttcatactccctccatttttttaaatatggcgtcgttgatttttggacatacatgtttgaccatttatctttatgtgtagatacgaaaaacacaagttatgcgtgtaccttcaatggaaaaaataaaataaataatagttgtgttttttaataatatgaatgatcaaacatatatctcaaaataaacaatatcatacattaaaaactaattgaaatactagttagcgtacttggagattattgatgcccccgcctccccttttttacttaatgggaaataaaaggtgcatgtattatccatcgggtttagtagtcctttttttatggaatatccatgctagcacaaatcttaatgcaaatcagacgatggaaaaatcaagtttttttctaacggaaaacttgtcgacgttttattaagcaaaattgttatccaaaaattaaggaaaacggcatgtgtctttgttaatttattacgctatatgatggacatatatatatatatatatatatatatatatatatatcaagcatactatttcttatgcaaaaccaattaatattggtattgagataaactaactagtatctaggaacaaatatatagtaaaaaaacaatatttttttcaacatatcactgatccctcgataacaaaaacatataattctggtcacgcggcggttaaacagtttttattatttaaaaacacatattcgttctttttgttttagtatgaggatcgccttttcagataattttttgatatatgaaaaatcatcaagtagatctgtctgtaaaaatatttacataaatttgattttatagagtcttatggatatatttcaacttaatatattagtgatttttttgagaataatatattagtgattttaagtgaattaaaatagcatatatcatagttaatgtttttctatgaatacatcactcgaaaacaggtaatggttaaagatgtgcagagtttacagttttgcatgcagtggagtagcaagtaaaaatgactaatacaataaagtcatcaggtgaataatttaacaatatcgtggacatagattgagatcatgacatcggagacttttagggggacccgtgaatctgtaaagttcggcacattaggttttcattatgattcttaattaagctctgttaacacgtggaaggaagcgcgtgtaatccggccgcgtgtaagcgtgtttgtgatattgaacagctgaacactcgacagctaagcaggtctggccactttgtttggttttacataagtatgtcggcttaatcaaggtatagttgaatccataatacagtgttttgcaggtaattaatccatttcataagggaaaaaccagtacgtagtacgcaatacaaagtactttctgatagaatcgtaaagtgagaagttcagggcctgacatattttgcacactgcaaaatcatttctatgcttgtagcctacgcatgtttcaggctttatgagccaattataccatggcctgagcagcccttcgactccagctttatacactcctcgtcccctcctttaaacatctagagtgacatcatactcataattgcgtaaaacatgcttcctatgacaataatttagagtgtgtcagagcttgtatggcactgttgctgcgtactactcctaaagacatactgaatgaagttctgtaggagtatatatatcaacaaagacgtactgaatgaagttctgtaggagtatatcactgtaactaatccttatgtacagataatgtggtttaaacaattggcaacaattttcttgactgcaggagatggacacattgaccaacctaaatttctatgtatatatacaaaagtgatttcatcccttaagagaatatccattggtttattacatatcatctaatagtcaattgattgttcttaaaaaataatattaaaaaaataataatacagattaatatgaaatatatcactccacgaatatgccagttcaaaattaacttctacatgttgtaataaaataataaatataattgtaaatgtgcgttaattattttcagtataatttgtccttttgttgcaagttgtagaaattggatttagccttgcatatctgtggagtgttttattttatattaatttatattgttaattttttaattatttagttgatatgaaaaaaaagatatcctcttaagagatgaaaatccatactcgtgtatatattagtaatattttataatgcacgcagtcgccgcattcatccgggtggtcaaagggtgagtctgacagaagtatacataccctgtgtttgtgtttgtaccactgagattgagggctgcaaaacctgcaaactcgcaagttgtactttgtcacatgcacgtacggtacggccgcgctatcagctacacgcggaacgcgttgcttatagataaacagttgcccttgcttaggcaaacagtttcctctgctctgatgttgtgctctttgaacaacaaaatacccagaaaaaaaggggcggaaaagcgaccgatctcaggggccggacggcgcgcggtgtggatcgtccacgcgcgctcgtgggcagaatttctctcaacgaacgggagatcagatgtacggtggcgcctacgagcgaacgaacgaaaggtgtgagaaagacacgcgcgtgaggccaaggcattgcacgccgcctgatgagaaaatcaaaagacgatcccgcgcagctgcctagcagcagtagcagtagcagagcaggggaggcaaaggcttcagcgagtcgcagcgtatgcaccgcatggcgtcattggcccccgcccgcctgtgcggtgtgcgcccgggccggggcggcggccgtgtccagtcaccggagcgcgcgggggccgcgccgtgatcagccagccgcggtgtgggggtgggggagagagtatggtgcatgcgaatgcggtgcactaccgcttttgtcgctcttttccgagactcccacagtgggcagcgtggccggctttcctttctcttcgtcaaagcagaggagaggcaggcaggggctggccggccggctcggggcgcatggacgtgcgcttggaaaacgacgacgatggcgacgacgatgatgcaggtggtggcgcccatgcatgcgatgcatatgggccgtgtcgcacaggagcggcaggtcccgtcctgtcgtgtaccgccgctctggctctcgcttgcgcaggggcccctcgctgctgaagtaacctttttactgtgcagagaatgtagcctgtagcctgtaggtaggtcggcttgggtccttgatgtgtgatgaaatggggttcgtccatgcttctgtactacaaagttcttttgtgtgggagcaactctcgttatatcggagcagtatcgttgatattttctccgagtattatttgtgttccattccatctgagtaatgcagaggcatatcacggttcaccgttcacgagtatctcaaacgcatcgacgattgctaattagcacagctatgttgccaacggatacttctttcctcttgaatcaggggtaggaaaaaaataatactccttttcccacttattctaaagacaagacgaattcacgaactcaaaatgtaatcattgttatacgatgtggtatattgatatgaatatgctccgtgtcttgctacaggataggaccagcttatatagcctccagctctacatatgaagctaaaaacatacccaatgacacacgagaagttactataatgtgccctaaaatagttaagaacatagatatgtgcttgagtggtccctaagactattggcatagtttgtagaagtggttgaagcaacccccgtgacatcttcttaaggaatatttctcgttcgctggtgtaatcatcaagtttcctttcccccttatcgaatagcatgtttctcttgcaatgtgctcgaacactattctcctggctggccaacctttgcatctgatgacatgaacgcctcctattcacctatcatgaaggctcgagaagtatttgccttggattaaaacataacatgtgggtgttagaaaccgtatttcggtccaataggagatgcgatgtttagccccctgctacaacacataagaaactttcaacttaaattatacgaaactttctcaaaacttctatattgcatttaaaattttaaccaagaatcataaaattggcatttaaaaatatgtgccaagaatgcagctacgctaccataatactacatccgtttcaggttataaaacgttttgactttgttaaagttagcttcaagtttaactaagtttatagaaaaaataacaacattttcaacccaagacaaatttattatgaaaatatattcaattactgagttaatgaaactaatttggtattataaatattactatattagtccataaacttagtcgaaattgaagtagtttgactttgaccaaagttaaaacgtcttataacctgaaacggatgaaatattttctattgtccatgttacgaccgtttctcctcagtttttgcacgcacatttcccgaactgctaaacattatgtttttaaaaattttattttataaaaagttgtttgaaaatatcatatcaattgatttttaaagtttatttaactaatgcttaattaattacgtgtcaattcattgttccgttttccttgtatatgggagaatttcccaacttcaaccaatgaacaggcctaaatactagtaacaattttgcatcgcagtgccattttttgaagggaacttagctatcacctcgcactttaaactaggtcaaatcttggccagtattgaactttgaacttgattcatagttaggcccagtatcaaaccgttgtcggcccgagctctctgttcagaccgtgcgaagcagaaggaatcaaaccggcctccacggcccaaccacgctttctcccctcgcaagtccgcaacagattcatcgaatttttttcgttttcagatttttttttaatatttacagaaataatctatcggtaaaaaaaattgcaaaaatagaccctgccgctccaatggtgagcggcaagttgacgtggcagacggtgggtcgaccgcgccgtctgtcgccgtcggccaaaattgcgattaggccgggaaggggctaattacaattttggccgcccataaaaagcttgcggctgtactttttgcatctggg

SEQ ID NO: 5552 - DNA, 15535 bp, Oryza sativa
gtttggcgtcgttcccctccttataggggttgtttagcatacccctttcttttccctaccatattctccgggtgaaaaccttgcttcggttccgaacgagcggtggcggtgatccacgtcgcatcctccttgggggcaccgctttggagaaacctcttcgtgcaaggatattgtcattgatctatgcattggcttcgaacttcagtcctaggctttgacgaggccttctagctccacattttgttttgcttttctcagtttgggtcatttcttctcttgtttggtgtgttcaacttgtcttgaactacactctcttctggagtggatctttataataattggctgtagttctttttgagcaaaggccgggatattatatttcattatctaaaaaataataatccgtcattacgccattcccaactcaatgactaggatagtgtccatagcattaaataagctatcacctaggatgcaaaataatgtggcaagtgaataactgagaaaagagaaggaaaccagatcttatatgaaacatggtttctacacaacattcaagacaacatgtgagataggtagaattaaatttaagtatatagcaaagtggtgtttgcattggaagagtagcgtctagtactggtttcttgataatgtggagtttataaaaactatgtttaatgtcttgggtggggaatggccttagcacatgtggggtatttgtagcacttatgactattcatagactatttagactcaaaagattcctctcgtgattttcatgcaaactgtgcaattagttttttattttatctatatttaacgctccagacatgtgtctaaagattcaatgtgacgtttttgggaaaaaaaatttggaaactaaacaaggcctaaatcgatgcgactgatgatgtaccattgacaaaagtatatactccctccgttctaaaatataagagattttagacggatgagatattttctagtgccacatcataaactagaaaaatatctcatctttctaaaatcttttaaatttgagacggtgagaatagatggacacgaacgcgcagcgcacagacaggtacaattgacgtactccatccgttttcaaatacaagcattttatatataatataaaatatatttaacgctccaggcatgtgtctaaagattcaatgtgacgtttttgggaaaaaaaatttggaaactaaacaaggcctaaatcgatgcgactgatgatgtaccattgacaaaagtatatactccctccgttctaaaatataagagattttagacggatgagatattttctagtaccacatcataaactagaaaaatatctcatctttccaaaatcttttaaatttgagacggtgagaatagatggacacgaacgcgcagcgcacagacaggtacaattgacgtactccatccgttttcaaatacaagcattttatatataatataaaatttttggtcactgattccaacatataaaattcttttattctaaacaatttagaattgaaacaattgtaaaaaaaaagcttagaaagggaattgaaacaatttagaatctactaaaatttagccaattaacctttaaattttaagctttgctaaacaaactaaagatgcttatatttaataatattgggaataaggccatgtttagttcctacacaaaaattttataccatatcacattaaacgtttaaacacctatatgaagtattaaatataggctaaaaaaataaataattgcacagattgcgactaatttgcgagacgaatcttttgagcctaattgctccatgattcgataatgtggtactacagtaaatatttgttaatggcggattaattatgcttaataaatttgtctcgcggtttaccgacggaatctgtaattaggccctgtttagttccaaagttttttttccaaactttcaactttccatcacatcaaacatttcatacacacacacaacttttcagtcacatcgtttcaatttcaaccaaacttccaaacttcagtatgaactaaatacagccttagttttttattagtgtccaaacactctatacaacactatataatattcgatatgacacgacaaaactttataacctagatataaatgcacgccacgaccagtcaatatcttggaatctgtggtcaatcatgcattcatgccgctcgtcgtacggtactctcgtcgtccactcgtctccgctcatcagctcagctcacagcctcacaggctcgctcccgtgattgcctggaaagaacaacaaagaggcggtgttcggacctctaggttcctaaccatctctctcattttctacacctacgcttttcaaacagttaaacagtgtattttttaaaaaaaatttatatacaaaagttgcttaaaaattatattaatttatttttttaaaaaaatagctaatacttaattaatcaagcgctaatgtattgtttcgtttttcgtacgcactgttcctgctggaacgagcaccagcgcatttttttcttctaatatattgacgtgcaatccttttacgcgttcgcgaaaaaaaaagcaccagcgaacacagccttaacttttcttcactttaatctaataaccatttaaaagtgattggcttttggaaaacaaaacgaaggaagcatatgcggggataagtccattttacaccctttaactcttcattttgtttcaaattcatcctcaagctcccgaaccaagcatttaacaccgtccaactatcgatacttggtaaattacatttctgagcggtttataggctagttttggtaccgtaggatgccacatatcagggactcagggctaactttcttctcttctcttcttactctctcgcacgggcgcacctggtaggcgcattgcctcggtgaactcgcatggcgtgtgccaatgagcggccgctcaccaccggcatggaggaatggcccccctactcctccccgagatcgaggcgctcatggaggtggagctcgatggagacggtgcactagggtgctcggcataggtgcgggaagcagatcttgagtaacggaacttcatcagagccgcacccacgtggcaaggaggagaggatcgaagccactgtccacataagtgattttttttatttttttaattcaattaataaacctttaaaaatatttctcaaaactgaatctcactgtttagtctttcatccaaacataatggaacataatggagggggaaataaatgcacgacacgtcgatcatgcgtgaactgtggtcaaatcaggcattcatgccgtaagggctgttggtcaaatcaggcattcgcgcacggtactctcgccgtcgactcgtctccgctcaccagctcagctgaaaggctcactgtcgcgattgccgggaaagaataatacaaagactaatagccccattgattgacttaaagcaaaagctaaaatttatatttttaaatctaattttaaagttaaatttaagatattttcaatgtaattttcttttagtattagcttgatatataaagttgtacttataaattaatttatattccataataaaccattttgacttattaggaaatatgagcgatcgataatactctaacttttcttcactctagtctaataaccatttttgaaagtcataattggtagtttttggaaggaaaaagtacaccaaggtccctcaacttgtcatcgaattataaaatcgtcctccaaccacaaaaccggatacaacacatcccccaacttacaaaaccagtgtaaattagatcccttggtagttttgaccctagttttgtccgacgtggcagctgagtcagcgtagaacccacgtgtcagcaccatcttcctctctccctttcctccacagttcggctcggcagtgggcaggggcgcagggcagcagaccggtgggggaggcgggagaccggcgacgggcgacgaggcggcggcggcgcggcacggcctcccgcgcccgccctcccacgccgccgccaccgggggaggagcttggcgcggccgtcgggggcggaacggggctcggccggcggggcggagctgggcgcgggcagcagctgctgcatttccgctgccgccgccggccgttgtatagctaccgccgcccaccattcttgctgccgtcgcccaccgtttcgccaccgccgctcgacgccgcgccacccccttcggccacgtgtcgccaccaccatcgccggccaccatcgccatccaatcggtgctgggcatcgtgccactgggcgtcggcgtcatgttcagccttctcttcgtcgtcttccccaccactcgccatggcatcggatatccagtcaccaacgctactacttagttacatcatctctcatgctccgtcatttgctgctttttgcattgatcaaagtattaattacttcctatttaatataattacttcctattcaggaaggcgcgttgcggcggcgagagaatgctgggactgtacgccatgtcaatacaacgcgtcggtggatttctattggtcgccgttgcaggtggaatccaactccgaccacccgctgcgccaccgcatcgccgaccggatcgtctgcgccgcctccatcaacaagcccgccgcccactggacccacgccgacgtcttcgtctttttacttctacctctggtggcaacgccccgccattgaagtcctgtgagttttagctagtagtagcaagcttgcacgcatggacatggatgcagttgatctcgctgacggacccatctcgccgccgcctcagccgccgaagaagaggacgccatgacgatgcagtacaagctagccaatccaatcgtcggcgttgttgtcgtcgactcgtcgtgggcgaaagacggcgccgctgcacggacgaccgttcgtgtcgtcgctgagcagctgcagtgcgccgcggcagtcctcggcgacgtacggctgatgtcgctattcctccgggcgaggggagtttgggtcacacgacgacgccattgccggctacgcgcgcgcacatttggctctcccctcactcttcctccagatccgctcggcgcagttgacgagcgtgacaggcggcggatcgggcgagagcggcggcgggcgagagcagctatggcaggcgagcgcggtggcggtgggcgagcgcggcggcggctgctggtggcgccccgtcgccgcccaaatccggcggcgcccgccccctgctccgcttcggccgccgcccctgcttcgcccgcgcgcccgtctcggcccgtcgcggcgtcgcctacccgctgaagaagagagaaaaagggaataaagaagagatgacgtggcatcctgacatgtggggccatgtaggataaaaccgggataaaaaccaccaaagaatctaaagtgaacggttttcataacttgagggatgtcatatattttttcggttgggggacgattttgtaactcgatgacaagttgagggaccctaggtgtactttttcctttttggaaaacaaaacgaaggaagtatgcttgaggtttttgggccctggcgaggaatatgtaattaaagtttttctttcataagggaccaaaatccagtagctcgtatttcccagtttaaaccagctggttaagcaaaggcccagcccacgtaagcttatctggacgggccaaagtcccagcttattcacaatctggcccatccacacatggaccacaatctggtccatcaaaagagtaactatagtacacaacagttttttggttgaaaaactttcagattgtatatttaactaactaatcgtcgggtaattaatcgctgaactgtagtctgtacataccttggcatccattggctaggtaagggtttccctcgtatcctttggagcaattgcaccgtgctcggccgtaaaggttcccgtcaacagcgtcgtcgatggcgctgtgcacgctgacacatcgcgtccattgagagaccctggtgtcgtaccagaacatgtcctgatcgcggtccatgtccagcgaccactccagcaccgtcgggaccgccgtcgagtcggccagcttccgcgggtcagcgacgaagccgagctgcagggagcgttgctcgccggcgaaccactcgccgtcggcgatgaacgccgccccgtacgaccccacggtgaccgacctctgggtcaggtcgttgaggtggacgccgtaggacgggaggcccctcgccaccggcgtctggcagcagccgaagccggagcagcttgaggcggcggcggcgtccctcggcagcgcggatcggaccacgcacagcgcggcgcagacgctgatgtagtcgtcgtcgtcgttggcgacgaggttggcgaggaggttgcagcccatggcgacgaaccggttgtgcctggtcgacaccgccagggagccatttgccggcaggccggccggccacgagccgttgagctgccgcggcagcgacgacgaggagtccgtgcccagcatcctggtggcgactctcaccgtgccggacggcagggagatgtcgatcacttccacgccgtttcttgcgaaacgcagcttcggtggtgcagcagggtgcgtctcgtcgcaggcgagctcgaagccatcgcggaagcagccgtggccaatgccgaaagggtaagggacggtgacgttgccgcaggtctcggggcagccaggcaaggctaccggcgcggccaatgctgtcactacgagatgaaacagcagagccccaacaacaacaacaaccatggtgccaatctttgcagggcatgaggaggaaagctgcttcatcttgctcttgcagagatcgagctagctattcgattcggtatttggtgtctttgcgtggagaaatacctcttcatatataaccatgatatcattaaacagccagatgaacgagaaacctcgtactgaacttgtctgaaattgttctgttttgtttaatctttcgaagagttttgggcgcaggtgcgtgtcccatgtgagataaagataagagggtaacatcataagatggttgacctatattcatttttcaaatgagatgttataaaaaataaacttgaaagggtatctcggggaattcattaatattaattagttggcttcacggtttagattagcaaatgatctggatgccttccatttcccctggaatggacagacgacacgaccattacacgacgtgctggtagtggtgctgctgtgctgatcaggatatgctagcttttttttgttttcgggatatggtagcttatttgagcagcgtatgatattccaaaatagtcccacttagcgctgacttgctgtagtaaataagtaaggtttcggttcgaagtcaagtcgccggcgatgatgtgccgaaatttgatcggccgctaatttcagaaattcgattccctggttgaagatagacaaagacggcacgtataacttgcaagcaagacataaatcactttggactaaaaggtcaagaaaatcaaaagaaatcgctttgggcttggtgttggcgtcattttttaaaaaatttattttttaacacaaggcaagaagattgccttagagcaagtattataagggctcatgtgttgtccctaaaaataccacataagattggttgaagaaagaaaaagataacatgtataactggaaaaatatacagtgcaaaccacaaatatagtgaaaacatgaaaattttcatttggatcgaaaaataaacgtcaaatattcgtccacgtcaccctgagtaaaaaattttctctcacaagtaaatttgtgagtaaaagttttactcataatgacgtggacaaatctgatacgtctttttttaatccaacggtagttttcaggttttaactatgtaatttccaccacatattccatgtataacttgcaagcaagacacaaaatcgctttggctaaaaggtcaataaagtaaataagaaatcgctttgggcttggtgttggcgtcattcttttaaaattttatttttttttaacagaaggcaagaagattgcctttatatggtgctggcgtcttgggcttggtacaaagtaggctcgccttttgtgtttggggccggaaattaaagtactctctagcttggtacatgaagggttaggccgagcctcgtacttctcaggcctttgtggctttgtgggcttggtacatttgttgcttctgcggcgtctggcagcagccgaagccggagcggtccacggcagtgcggagcggacgacgcagcgcgcgccggcgcagacgctgatgtagtcgccgttcgatcggtgcgtacgcgccgacgagaggttggcgatgtcatttgcccttgtagatgttccaaaatagaatatcacgtcaagttttaccaaatatcacaagaaattaggagaactatattttttagccgcttaaaatatattatattattaaaacataaaaaagggaattatgttacttttattatttttaaactatcagtgttagtatggcataccccgtttgcctgcacttgctatcacctagaatatcgcatttatatccttatatagaaagatattcatgaggatgatatagacaaggggaggggcatcggatcaataagacttacacccggctacatcgggaggaaacccttctgctagccgctgactacaatttgccgcttggtctgtcaagattagtttggtacgctagactagctaacttgcacctcttttctactcggtgtgagatacaccagatcaatacatataaacacaacacaagtaaggctattatctacattaagagtttgaacctatataaactgctatctttattacctatacttgaatatatatcactcgtaccctacgtctctaaatactgtgatcgggtataaaccatcgacaaatccatttcacggtgaaagttacgtgcatttctatttaatgcttttaaaatactgaaaacaatgccatatttatgtgtggctaagaaacagttccttgaaatattttatttttaagctgcacatatattttatttttaagctgcacatataaacctttgaaactgctgcaatatactactgtagagtagagcgagctcaccaacccatttagctcatctttcagtgctctatccacgttttccacaatcatccaagcgacggtaaaaggtatctgtaattctgcagtggtaataaaagtcatcttgttttcttcatcagtaactcatttacctcaacggcgactctcgttctgattcagtgaatttcagctccaacttggctgttaaaacagtggcagttttaccgccctttggtactccgtttgacatgtaagctctcaatcagatgcaactagttcagtgcttcacaaaactagtagtagtagtaggtacaaactcttatccggatcaagtttaccatcgctactcgctagccgaacagagtccccaaactaatcaaacagtttcactgtttcagtgcaaaagcagtcagaattgtgcatgagaattaaaggggtccagcactccagcctccaagtgatttggccactgcctgctctttttacaacttgcacgtagtagaagaacattaaagttctctcatcagaatcaatcagtcgccactgcctatagactagcataaacaccggacgctgtcgtgatcatgcgccatggaagcatgcacgtcgattgcagcagtggagctgaccggcctcgtgctgtttactagtcttggaactccaggccaaagttcggcaagtgcatgtgccattacagactgaagcgccgtgatcagtgccagaatagttttccatcaagactttgcaaccgccaaatccaatatttaactgaatttcagtttaaccatatttgattccatggacgatagtgctcctctgcctagtacttaaatgtggattaaaaaaggatacagtgacgcagaaatggtttcaatttcagatgaaagtgtctggtttagtggttatctgcatctccttcatgggttctcctctagttaggctgctactactatcacctatcagtaccattgtatcagagttcagtaaacatttaagtgaaacaggtttcagtttccaaaagaatgttcaaaaaaaatttcagatggaataagtgaaggcaaaaaaatggcattggaattacagacagacacaaagtttgggagatccgaagccatgcatagagtattgtgaaacaactatgagctttgctttgcttatagctcatgtttaattggagtatttactccacactccaagcaaacatgcagcatgcctaatttgttgacatcggtcagactcgctacgacgaacggcactgctgttcacacctgagttaaggactagcagatggagatttaggtctcataattttgtaaattatcgccttattggtttctgaagtcgcaaagtcgcacgttaaaccccattttgcaaacctggacccgcatatgtgggttgcaccttttgaaaccacgaccaaagttggactagagaaatgcaactatgcaagtggctggatcttgcttgattctgatctactagataccaggcaacaagggagtagcagcagcatgattgtctcaattatcaccatgaataatcatgtacgtacgtatgaccaatacagccttttcaaacctgttgttccgcatagtaggtcagtagtacaattgtgaacttctcaaattcaaggcatatcttcgtctgctctgccatggctataaaacttatttagttatgtttagttgttttttcttgttatacagaattatacaaagtgaatttggcatgtactgaacttccttagtgctagtctgctagacatgtggaactaagctacataacagtgtaaagttttatatttttgtgtatgatagtcacgccaggtaaaaagtgcaagtatgttgcagatcgtagcagcattctgcatgtaaactaagttttcatcacacttctcattccgtgctttctggttgtagtccactgagttaaaaacaatggaagacaaggaaagccgacgcactcgacaatatccaatcggtagcttgacagaaactgacagattggagaagcatccagtaacctcatcagcactagcctataaatcccgccgctcatgtagctctccttgcattgcagagttcagtgtaacaaagacactgaagctacagcctacagagagagagtatctggatacttaattgtgtgcttagcttgcggttaagcaatggcttattccaggcaaatcttcgtctgctctgccatggctgcgttgctcttctctgctgttgtttcggcgcagctctccactgatttctacgacgagacatgccccgacgcgctcgacatcatcgaatctgccgtcagagacgccgtttccaaggagtctcgcatgggagcttcgctgctgcgcctccatttccacgactgctttgtcaatgcaagtctcacacaactcacccttttaagttcagttttccttctcgttttctagtccgacctttgaagtagatgtttcaatttcgaaattcgctagtcgctacagtttacttacttagttactagtcgccaaacattttatattcagatgatttttcccgtgttcataaatcataatagatataattcagaagttcagagtggatgctgacgggtcagttaagcaagtggtgtgcatgcagaaagcgcgcgaaaagtctacttaaaagttaaccttttcaaattcgaaggactaaccattgacctcaaaaacggcgcgcgcgtgcaggggtgtgacgggtcagtgctgctcgacgacacggcggccatcaccggcgagaagaacgcgaagccgaacaagaactccctccgcggcttcgaggtcgtcgacgacatcaagtcgcagctcgaggacgcctgcgagcaggtcgtctcctgcgccgacatcctcgccgtcgccgcccgcgactccgtcgtcgccgtaagcaccagaccggccgatcaccactccgatccctgtatttttgatgaattgatcgggaacgaacgaactgtgtgcagctgggcgggccgacgtgggacgtcgagctgggccggcgagacgggacgacggcgagcctggacgcggcgaacaacgacctcccgccgccgacgtccgacctcgccgacctgatcaagtccttctccgacaagggcctgacggcgagcgacatgatcgcgctgtcgggcgcgcacaccatcgggcaagccaggtgcaccaactttcgcggccgcctctacaacgagaccaacctcgacgccaccctcgccacctcgctgaagccgagttgccccaaccccaccggcggcgacgacaacacggcgccgctcgacccggccacctcctacgtgttcgacaacttctactacaggaacctcctgaggaacaagggccttctgcactcggaccagcagctgttcagcggcggctccgccgacgcgcagaccaccgcctacgccaccgacatggccggcttcttcgacgacttccgtggcgccatggtgaagatgggcggcatcggcgtcgtcaccggctccggtggccaggtcagggttaactgcaggaaggtcaattaaagtggttgataccgtgatcagtgttaatgtggttggttagtgtcaggtttcttaataccgtgatcagtgttaatgtggtttgtacaagtgttcttctttccttcagcgatgtagtctgcttcgaacggttgtagcactactatacgcaaaaataatctgatgaaggaacaaagactggttcctactgaaaaatcgtgttgcacaagaccttgttttactggaattattatgtttgtaatcaaatagagataactagaaatgagatgacacagttgcatgggaatgggaatcactaattagtactgtcaaaattgcagattacaaattgaatatcctacatgtacgtgttaaaacggctcggtgtcgatttgggccctatcaggctattaaattaggcggcccttctcaccttcgccatcttcttactacttgggccgtaattaatgggccgcactggattctgcaagaaatggcgatccaagagggttcggagaagaaaactccgagtctccgacccctcctgatcacgtacaaagagactgacgtcaagggcccaccagaccgctcgtcatctccagcagcgcgcggcctgcaaccccttgtcgtcttcgctgcgcctcctcccccgtcgccgcctcgccgcccgcgacgctccaccttccaatccctcgctgtctctctcgccgctctcgctttcgccttgcatttttcaaatccccaacccaaccaccaccaccgccaccgccttcctccttctcccctctagttaatccctccccacaccatgccggccgcctcaccacagtgtcgtcccactcccaccctcttctccccggccgcgcccgccgccgccgccgccggccgccgcgatgccggctccccgcttactccgggtgctcctgctgctcgtcgcgctagcctgcgccacgtcgggggtcgggtgctccgacccgcggttcccgcacctcggccgcgtccgggagctccaccgcggggagggtcgccccgcggccgagcaggaggccgcggcgcgcgggctcctagcgctcctccttccgtcgcactccgggagcttcgatttcagggtcatctccgcggtgagtagttttaggggtgggtaactgggcgtggcgttgcgtagtaggctacccggaggatcgtgtgtagtgatcgatcggcgagaatctgaagccagttgatggagcctgtcgcgtgatcgtggagtggttgttggaatgggtcatttgcttatttcgactgtaaatcgtgtttattggacaaattaatgcctaaattattttgcgttggtaaaatttgcatctggtatcctgtaatggttaggatttcccactccccggtacagtagtagtacttatctgcaaggactcacaatctgttccatggaatccacaggaccaatgtggtggaaaggcatgcttcattgtggacaaccatccattgtttgatggagaagggactccacaagtactgtatgtttctgaatttctccattttagcattcattttgaatcgtttttccaactattgtgtttgtatgggttctaggtgaaatctattttgcagaagcagaatgtagaggagtcttcatgtaaattatggacatgacaaccatactttgttttagctcactacaagcctattaagtttactattagtaaaatatccatttgtagagatgttagatgcactgaaaactgacttgcctgaaatcaaatttcccaatattttcgaatgtctagtttttcaccactcttctgatttgcgttcttttgtgcatccaaagtgatgctgactattctggccacagcatgttctgctagaatcatgcaccagcttctcatttaactagttaggtccactgtgcggtgcagaggttacatgccattatgctatactagttgaggcttacctacacattatagtggttcccctttttataagattctgctactatttctacatactgaaatcatgagctatacattcctttcatgtatttttgccagtttacttggaacaagtggggtagaaatctctgctggtcttcattggtacttgaagcactactgtgcagcacatgtatcatgggataaaactggtggtgcacaattatcatcagtgccacgtcctggctcactacctcgtcttccttctggtggcattttgattcaaagacctgttggctggagctactaccagaatgcagttacatccagttgtaagcttgtttttactttatgtacagttttaacactttatcctgctatattgccgaattcttatggtggatatgcatgccttcttaaaaacgttttattttcccactgttatgtactaagcaacattttcagattctatttgaaaatattcaggtcaggaatagtgctgcatttccatctcccaaattgatgtcctggattcaattgtttgctacccatgtttgtgtttgaatgagatatttcctgattgtatctctttgtgttgtactgtccggtgtgacttttagggtgccttcggtgtcgatcttttgttttattgaattttataccatgctaactttgagcaatttttctcagctgttactttttatggaaagtggaaatgattttcttaaagactacttttctcttataagattcttttgcttggtgggattgggagcgctgggagaaggaaattgactggatggctcttcaaggtatcaatttgcctcttgctttcactggtcaagaagctatatggcagaaagtttttcaggtgcgtgtgtgttctgctcttttattaaaaaagcttgctgttcactgatactgaatattttgatctatgcaatgtccgtgtgttcttagatcaaaaaatgtttaaactctgt

SEQ ID NO: 5553 - DNA, 21116 bp, Oryza sativa
gatgaacacttccccactgacaaagtgacaatagtgattccgagaaaccaatcggagaggacgcattcgatcacccgacaatgccgagagcgccatgatcagtaggagatcccgacgagggcaaccatggtgtaggcgacgagctcctcccgcgacctccgctcgcctggcgacaacgacgacgagcgcccgtagccagacagctgcggcagctgcaccctgcgccgcccgctcaggaacatccgcatctcgccggcgaggaactccgccgcgccgcggagcgcgacgcagacgcgcggcaggtggcgcgccagcggcagcacgaggttgaacggccacaccaggaacgagtactgcaagaacgcctgcaggaaccctccgcccgccgccgccgccgccggcacggcgagaagcacaacgtgaacagccatctcgatctccaaactccgagcctctccagtttagtttccaccactgccgcgcgcttacatatgtgcgggccgtcgtggcgtgcgcgtggcctagctaccggccgtctgcctcggccatgatgccgatcagcgtggtggtggtgctctgcgcgctacagaaagggccatggcttggagtgggtgatgcctgatcgataccttgcttgctgatggagagatgcttttataattgaatccgatcggatgacggatcggctcgatcgcttgacaggtttggtaactgttaacccaaaccctctgccggttataaaaccagtcccaataacatgttagagatcgtaatgtgaaagaacgttatagaaaatccaaacgtgatgactacaccaagatatatttggtgagggagttcaattgtagtgattatcaatgttcttcctcgatccagtataattacagtgtgcctagggtatctatgagatcatgaccatcgaccaaagctaggctgaggactagttgtttctcgcctatactaccatcatcacgttattatatgtgtgtctctgtttaagagaggtctaagataaaagtccaacttcattattatcctactacttattacatgttttagtagttaactgtaatcgattttatacacataacatattcaacagattaaccctttacacaaatttttgcacggccggccgcccggccggagacctctcgttgttgcttgcgtttgtccaagtttggcgtaacggcgaaatggaattagtgagagacactgtgtcgggagatagcgagattcttggcatgggccaaccagccattggcatcgatctggaatttacctttctgggggagaaagtaatgacactgcctgattgcttgcgggcccgtacgcacgcttttgttctagtctgaactgaactgtaccgaccagctttacatccacatgcactcagccactcgctactttagcagtggtaccatgtccaaggtcactgaagcctggcctcttttttcatttggattattaagcgtattgttacggtaaattattgatttaattatagaagtgaattaaatatttttataaacaaatataacaactagttttaaaaaatggctaaggaatacagtaggaaaaaaatattttaagagattatattttttttgaaaagcaaataatccgttaataatctgataaataagctgaaaaaacaaagcattacgatagctgatcagtgatcacggatgtaaaagttcagatatgggcattgaccattctaagtatgaagttatacgaatctattaggccatcagcaatgggtactcttaacccgtgtctccgctcacggccgtctgcctcccgtcgctttttgaggccgaaccattccccagcaggggagcacggcgcctcgcaggggggcgcggctctctccgcgcctcgcctactttttcgtggggggtccgagccaggcaccacgttgaagcgtggggagctcgtggacacgacgccctaccccgatgtttccccttgtaccctcgcccttaaccacagccactggccgccggctcctcgtcctcatctgccgcgccgccgccggtggctcgccgttgaccaccgtgacgggaaagagagggaaagggacagggagaggtaaacggcagcggcgagagggaaagaagaagaccacatctggccacagcttgccgttgaccactgcgtcgacatgccagatccgcgcgtggctcccctgtcgtcagcggcgatggccctgcgacggcgacaaccccgcgacgagcggagggatctggctcgccgttgaccaccgcgtcggcatgccatatccgcgcatggctcccccgtcggcagcggcgacgaccccgcgatgagcggagggatctggcacccccgagcggcgacgggcggcaacgagagagagggagaaagaagagcggcggtggacgccggtgacgggagaggcgagcggtggcggcggagagagggagaggcaactgcggcttgagggagaggcgagtgcggcagcgaaaaaaagagaagagggggtgggagagagagagattaggggtagggtagaaaaaataaatatgggactttgtgggctgggatacccattgtgggttggagtgtctctattaagttgcttcagattttgaggagactatccagaggtatcctctattacgagctgagttcccctatgagtatcctcagttagtgaggacactctaggagtagcttacattatagatgcccttatgagccctcacttggccgacagaataaaaaaggattgaggctgtgttcacgattcttggttcccgagggaacattatgcacgaaaaacagagtggtctattagcgcgtgattaattaagtattagctattttttaaaaaaataaatagattaatttgattttttaagcaactttcgtataaactttttgtaaaaaatacaccgtttagcagtttgaaaaacgtgcacgcggaaaacgagggagaggggttgggaaaatgggtgccgaacatagctgaggtgtaatcggaagcagaatgattactgtatatcgcaatgtgatgtcgacatcggcaatgttggctttagttcacgctaaaattgaaagtttggtttaaattggaacgatgtgatagaaaagttgaaagtttgtgtgtgtagaaaagttttgatgcgatggaaaagttggaagtttgaaaaaaaagtttaaaattaaactcggacatcatagtggcatcttccagggcccaactacggatagcctgacacctgatgcacaacagcttcggtcgatgccaagcaaatgcattagcagctgtctactacgcggcaggctctgaaactaaaagaaatgaaatactctcgtttcattttgtagacagatcaacatcgtttttaagactggataaggtcttagctcgggtgtgtgtttaaatattggtctccctatatttaaagtgagtagcatgacattgcagttgaatttttgtgtagttttgcgtaccgagctagaacaggtcaagctggaagcaagaacaagattggatagttcagatatatctttcaaacaatgtagccccacaaggatcagtagacagtaattggtcgaaaaatcaacaaaccacttactcgatatgcacaagtttcgctatccattttgttatcatatatgccacatggtcgtttccccgcaatttttttggtcgattcaaggtacatgtgctggcctttctcggttcgagaggccacttcgattgcatttttggcctttcggcaaatccctggctgcatttgggatccatttgatctgtagatcatccactgtgtcacgatgaatcaatccaaatccaatcgatgaactgaaaccggcaagtttttccatcgtgacgtgcaagcatacttgttccctcaatcatgcctgcacagatagctacgttcgttgtacggtataaagatgttaattcagacaacagggacattcagctgtagaaaaatacgataatgtactggaatacactgaaatattactaagattcgttgaaactgtaacggaaaatgaagcaaatctgccacctgttactggtggcatcttcgtcctcaggcttcaaagccttcaatgatcctgacgctgcaagcaacaaaagatgaaggggaatgatggctggaatgattggaagcacaaatactgccgccgtgcaggacagctgtggcgcagggcagactgcacactgtacactccataatgctgtatgccacgatatattgctacagatcaagtgatcactcctgaactaattttcgcggtcctgttgtcgatagcattatggcatggcatagtgggcgggcttgccggccgggaccggataaatcaaggtaactgcctgtgatacaagagcagttatcctcccatgaaggtttttttatgtagccacagaagaatgaaggataggaacttagaaaccaaaaatcttgtgaaatactccctctatcccaaaagattgacgttttaaggattcttaagcaaattggatacatgtaaaaataatcaagttacccttattctggccctgttcagaggcactagctgccgcagcggctgcggcagcagcagcccagccgaacgcaccctctatttaatatgtgtggtcgttatttcagtgctatttaatttgaggcaaattaagtgaacatgcatacatgttatacttatgctgaaacgagagcttttgtgggacattttttgagatgtaaacgacatgttttgcgggacaaagaggctagtataaagacgaagtacaccaaatcagaactgatctaatgcaacctagggtgaccggcattgtatgcccgatctgacaacctatagtaacccaatctacttatgagcaactctttgcatgataattaactttaatgtatccaaatgtatctataaagtgcctcttctatgttaatttattaactcaattcaaaaaccaaagctaaaccctagttttcctgtccaaaagatactacatcttgagcctcaacttctcctctattcatacttaaaagatgactgcacaaaagccaggaatacactatctctttacaaatttggactcaaaacctacttaaatttagactccttttaaatatgaccatttttttcaattccaaacactttccatgtaagccatatagaagctctacctccacatatattgttctttatccaaaatatccggtatgatctccttactgatcccctcggtttaatcatgattatatcgccagcaacatccctgaagcctcaaacaagtcccgatatttgagaataagttctttcctaacttgattagtattagtataaacacagtatatcatacctatataaaataattagaagctataaacaattaaaaattaacgtgaaaaaaattactctaattacgagttaatcagtttgactgttgtgatggctggtctgacttgtcaagcatctctggttagatcgcctatgcaatgacactccaccaaattaatacctcttcataattctctcaataaaaatcattgcaaccaattgttcatgataaattaataatcataataatgatttcacaatgtcctgcttaaatcaggacagcaggacatcctagataatacctgcgcttgtgttagttttactctttattttagaaaaccttgtgttagttttactacccatttacagtttgtttcataaaatggtcacaccatcactaaaattgcggttgttttgctgaacgtagatggacgagttcagagtcgtgcagcactactgtcgtactgtgcactgatcacagtcagcgtaattggcgttttgcagagcggcaaagatattgcaaccgtgtcgtaactgtcagtctaagccgtctcagcctagtgcagacgcattctcgcagcatcaaaattcgcaacgttgagacgagattttctggccgtatttcacttgtatttacacaaaatcacgcggttacaacttacaaccagccctgaacctgatacggtgaacctcgcaatggtgtcgccacgtggaacaccaagagcagagcatcaagaaacaaaaaaagaatgaacccaaaaaaaaaaaaaaccaagaagaagaagagagaagcaatagcagttcgtcagcttttcagtaggagatgctgagcagcgcctggcggaggagctcgtccgcctctccgccgccgccgtcgccgccgcggatgcttcggctccagacgttgccgccgccgccccggcgcgcgtaggcgcggcgcagcaaggcggcgtggaagacaaccccgccgtagagcgcggcgcaggcggcgggcaggtggcgcgggagcggcagccagaggttgagcggccacagcagcggcgccgagaggtggaacaggtggaggaaccccctcgccgccacgatcgccaccaggtggaaccccataccacagcccgctcggccgcttgctttgctcggttgctcccaacccaagtttcacgagagcaagtcgtcgcttcgctgcacgctgcttgcgagttgcgagctctctcaagtagcagtgggcaactgggcatcattggtagtgcgtgtttcgtactcgcgggagctgtgcgtgtgatgtggcgtcggccgcggtggtggtggagggtggcgcgggtgcggccttccccagttgagggcgccgggcgcgggtgggcaactgggcacattgatggctgattttattttgtgtgatggtcggtcaaggccccccgacacggcaacaacgaaatggctaaaacggctgcaggtacgacgtgccataaaggacctgggatagctttgagaagcagctattggtagccggtttataagaatctggcttctgacttctagtttattttataaattctacaactacagcttctcagaatctggatcaaaagatagactgattgggaaagtttctgattttagaagaagctatagcagctagaagctccctcaaacaggcccagataaactcggaagctaaactagaagaatgaaccgtcgaaattaaccgttagcacttagcagctggctagattcggcgaattttacacagtttttggaatgctagcatagtaagcctcgtttagttggtaaatttttaaatttgattgtcacatcggatatacgaacatatatttgaagtattaaaagtagtctaataacaaaataaattacaaatttcgccaggaaactgcgatacgaatttatttagcctaattaatccatcattagcaaatgtttattgtagcaccacattgtcaaatcatgtcacaattaggcttaaaagattcgtctcacaatttacatgcaatatatttaattgatttatttttcctatatttaatatttcatacatgtgttcaaatatttgatgtgcgtgaaaatttttattgtgacaactaaacagggcctactactagtaagattctaggtgggcgtaaacatcacgggagcatctgaaccagcagtacactactggtgctagcgagcaagtgtcgtagtaagattctagcagcacaggcccacaacagaagggagcagcagaggctgcgcaggccaggccaggccagtatcccctgctgcatctcgtgtacgggccccgttttgagtgccatttcttatgggctttacatgggccatatttgcacgcgcgcggcccggcaacttgtatcctaacaatcattgtggtagacaattgttatgttctccatgtgaagtgaacagcagcagctagatataaagaaaagtggtgcaaacaacttaatgccgcaattgattccgcgtgcgccacagaagcagcaacatacaccccactcccattcccatatgacacccagagcacacactcccccaagaactttgcagtttaagtatctgaaaatgaagtccttcaacatgtactaggaggagtacaaggtagtagtagtgcgagtacgatctttttcgatatgcaaggccatatcattacaagcactataaacaaaccctcactgcacagaggagccatgttcaaaatataagttctcagagttctaagcactgggtattccagtactactttagtaagactaccaacagacaaagagcatgctgaaactaagtttaaaatcacgaaaacattttacagcatgctaaaattcttagctggaagcgaactagtcagagagatcatgaccccgcagccattcacctacattaggaactgttctactggctttttttttctgagcagatcaatgcatgcaacatcgaatggatcacttcagaattcagataatcctgccgacataaacccatccatgactaggaattgctagtaagatcgctgtcattgtctccggcagtatctgcttccttcacttcctgaatcatcttgaggacttgccaggcagttggccgactttcaggcgaggatcgaacacaggcagatgctatgtcaacaatcatagagagacgttcgacgtccactccatcgtccctcgcagactggacataggtctgaagattagttgcaaccaatactgagtgctgaagcggaggcttcccactgataagttcaaggaggaggatgccgaaagcatatatgtctgactttggagttagccttctgttggacttcatgttttctggtgctctataagcagcatcgtctttgacttctgatgattccaaaaggaatgccaagcaattgtccgtaagacaagcctcaaagtcagaaccaagcaggacattggaagacttgatgtttccatgaacaagtcgggatgcttggtgaatgtaagcaaggccctgcccgatgtcttcagctatctttaggcaggaagtccagtgaagtggttttgctcgagatgaccttgaacctgcagtgcacacaatatcaatacaacctacatctacaaagtatggctctaaggtacagtaatgtacagaggaatgtatttcaacatcatcgaatccgtaaattacttccatttatcatgccttaaaggaaacatgctattacttggaaaataatatgtccttgctccaacaccaacatatcaaataaatcttagtaacaactatatttgagctccaaactttcactaatgtttgtgcgacagcttaacttataagaatacccacattgacaaaagactcgaatttgagcaggccctaaattctacaacaaattggcaacaatcacatttcaagtagctagcattgctatttggtcatatcatagcctttgatgaactaagttcacagaggaaaatacagttttccttttgtaaactccatttgaccacccatttcgtgaattcaattgatatttagtactatagaacagtgaccacatataataccattggtccactctagaggctaggcacttggtgagaggctccaccgacgttcaatcccacccaacccggtagctagcatgatagatcaatgagcacttaagtatggctattcactatgtttactcagtccataaagaaaagagtccaatagatcatccccaaaagggtaaaataaagcatcacatgcatatgttcaatacaggcaaatagtcattctcctgccagatttatattcacgtggcccaagttctctaaattttaattccatcccatgttagttgggatgaagagaatgtctggttcaaaaaggtaatgctatcctagcacccaactagtataatccaatggaatttgcattagagtagatgtaacggcaataaccagaattgctcctagcacaaatgataatcacacaacctatcaaatttccagatagagaacaacaaaggctgcagggtacgcaccatggatgagagagtagaggctgccattgggctggtagtcatagacgagcagccgctcctccttcgcctggaagaacgcccggagcgagacgaggttgggatgccgcagccggccaacggcgtccatgttctgctcgaacgcctctgcctccagcgccgcggcgccgatcttggccgcgtccagcctcttcacgatgaccacgaggcggccgtcgagcaccgccttgtacgtcgtccccacgctcccgcggccgagcacctccgccgacgcgcgcatcagctgctcgaggctgtagctcgcgccctcgcccgcgcagaacgttaggcagccgctccgctccagccgccgcgccttctcctccggcatcatcatcgccgccgtctcctcgtccggcacgcactccacatagccgagatcggtgttgtccctgctcacctccgacatggccgcgctcttcttggggctcgggtatgccgcggagctcggccgccgacgcttcttgccccttttcattgcaatcatggcacaaagtagaagcacggccacgaacgctgcggcggtagccgcaacggcgatggcggcccgcctcctcagtttccgcgaacgcggcgtggatgaatcgggcaagctgatgtcgtcgcgttgcggtccgtcgccggtggccgcggcgctctgcaccgggggagcagcggagccgttgttgccaggaccgtgaaagaagaggaggtgggagccccggcactcacggcggagaacctcgccgcagagctctggattgcccgcgaacgcggcggcgcccatctgcgccatgacgggggtgaccggcacgggcccggagaagttgttgtacgacacgttcagcagcttgagcgaagactggttccacgccgggagggagccattaaagtggttggcgtcgagccgtaggaacgtcagatgcgggaacgcgacctcaatgccgggagggagcgcgccggagagcctgttcccggcgaggtcgatggagcggagccggcggagcgacgcgaccgaggcggggaacggcccggagaagcggttgccggcgaggaagagcgccttgaggttctcgagcggggagaggtccgggatggggccgtggagcgcgttgctcttgaggctgagcacccggagctcgacgaggcgggagagcgtggcgggcgcgaacgtcccgttcagcccggacgactcgagcaccaggcgggtgatctggccgtcggcgctgcaggagacggccgggtgcgaacacggcgacaccgccagagggaaccgcagatgcgcggagggatccgccttggcgaggaatgccgcaagcagcgcccccggggtcgccgtcgagaccagcgtggcgggcggtggcacggcccgcaccggcgcgcgaggagggaacgtgggctgcgagtgcgacccgccgcctaccgccgcgggcggcggccgtacggcctgcaccgggggaacagcgggcagcgtaggctgcgagtacgacgaggcgacgtcgccggcggcataggcggcggcgacgagcacgacgaggaggaggcggaggcggtgccgcatcgtggtgggcgcttgggttggggggttttcgggggggttgggtgagcggtgggtttcagtggagtgcggccgcgtgatgtggagtggagtgaagtggcggaagcggccggggtggtgtggtgggtgtgtgtgtgtgtgaggctcgggaagggagaggaggggtcagagagcggtcgccacggcacgtgggtggtcactgcagcttagtttcccgtgcttcttttggcacttgatcggttgatcgtttggagagcctgcaacgctgcaacgggtggataaagaggcacactttcgagtttaaactcagatcacggcaaccaattgcacgcactcatgctcaaagttcaaacattcaaattctaggaaagaaaaaaaaaacaaatccattgcaggtaacatatcaggctctacagaaagttagtactccatactccagtagtgctaatattcaggagcattttggttatccatctctggatctaaacaaagtttgagtacctacctcctcacctgaaaaacattctaatgtgctaatggtaggaatgtaggattcgccggaaaataaaaatactcgggagaatgtttgaaaaagagccgttgatagcgagcagccatccagtactataccgaagtcgacgtagcggtccattgttaatttgactgtgctgctgctgcctcctgctgctgctgcatgggtgtgagggcccgatcgcagttgatacctggggccacgaaattcaatcagcccgtgggacccacgtgcctgtcctgctcctcctccccctcccacggtggagtaaaagttacagtgttcttttgtcggttgatgggagcttcgctgtgtttcttcggggggctactgtgcccaccacacgttatcacatcaccactcgccaaggttccgggcctacagctcgatcggaaaggcccacagcttcaggcccaaataattagggagaaaaaaaactgtacaaattggggaataagttcaccggagatccctcaacttaacagcgagattttttgaggtcccttaaccacaaaatcagaaatgtgtacccctaaactcactcaaaccgttcaccggaggtccctcggcagtattttcgtccggttttgctgatgtggcatcctagtcagcaaaaattttttaaaaaaacaccgtagagcccacatgtcagttgcacatcttttttttcctcttttcttctccttctctcctcttctcttttcttttctctctcctcttctccttcaggctgtgggcggagcagccacgcgccgtggccgtcatcgtcgtcgccgtgggcgaggctacgcggcgtagcggagggcgagcgtggcaacgaagcaacggaaggtgcgagcgcggcggcgggccgagcagtggagcgcgagcaggccgcggacagtgtagcggagcgcgagcgcggtggcggagcggcggccagcgagtttgggagggagggggaggcggccggcgaccaataaacaatctcttcctctgcctcttccccttctcccgccggtgatgcctctcctagcatcgtcggccacccgcgggggcacagcggtggtggcggccgagcacgggggagctcctcgtcccatccactgtcttccgcttcgcctagctcgccttccgctgctttgcccaccgccgcgctcgcccgccgccgctcttccgccgcgctcgccttccgctgcaccccccgcatccgcactcctccgctgcacgtaatggcatatatacatgtgagtgtgctcagccatatacacatgcttggctaatatatacgtctgcatgttatcgggcggcaaaccaacaagaagctagctaggctatagctggtcgtctccatgcatgcatatatatgctcgtacgaagacgcatgtacatgcggccgtctgtacccagcgtatatgcgtatgagctacgacgtcaagtgctaccgcgaagtcggcgaagacggcgagggacaccgcgcccacgccgaccaccgtccacgacgccgatgacacgctgagtgtggacatgctcctgctgcagctgcgcgagctgagcgtccgggaggaccatgggatcaggccggcgacgctgccgccgccaccactgtcgctgccgcggcacaggaggagcgcgagcgactgtggtgcatcgtcagccggcacttcgacccacctatgcacggccactgcaacgcctggccgatgccgccgaatggccgcgccgtgtagcctcgcccacggcgacgacgacggtggagagccgacgacgacgacggccacggcgcgcggctgctccgcccatagcctccgctccgccgccgggctcgcctgccgtccactccgcccacagcccgccaccgctccgctgccgcgctcaccggcgcccgccgccagcctgaaggagaagagagaggagagaagcgaaaagagaagagaatgagaagaaaagagaagaaaaaagatgtgcagctgacatgtgggccccacgtacttttttaattttttttgctgactaggatgccacgtccgtaaaaccgggtaaaaatactgccgagggacctccggtgaacggtttgagtaagtttaggggtagacatttctggttttatgattaagggatctcaaaaaatctcgttgttaaattgagggacctccggtgaacttattcctacaaattggtagacgatcctgtttagaataagttcattttaggtacccacgtcttaacacgagtttggaaaacgtcagtgaaccgcaatatcagatctaacttgttcttaatcttgcaaagccaaggtagatagggttcgaagttaatatcgagggtagttttggctgacgtaaaactaacagcaaaagtttaaaattaaaagccatgttagacctagatgtcagtgctggactccaacgagactgccgccgagcatacccgcggagtcacaactccaatggaaggtggagcgtaagagaggttccatgttgactcaacctggttgactaaagtaagctcatcacgttagctaaaaccgagagcaatactatcttgggtcttgggatctaatgtgacccaattttataagattagggatgtgttgtatgtggtattttggttcagagacgattttaaaactcaacggcaagcgaggaacttcaagtgaacttttgatgggcagatgggccgcgagagatagttctgggccattttctgaccagaccttttgaagcccaccgatgtttgggcctcactgatgtttagtgggcaaaccgtcagatttcatgcccctctccatctggattctggaccagttggactcttctccttgtacttgcgacatcacaccgacgccgctggcgattcgtgttgccaccgtgcaatgcccaaatgtccgtgcatcgccgtcaactgtaaagcacaacgctgccgtggccaccatggaaagaagcgacgcttcacgtgctccggcatttgacaaaaaagagaacgttactttccgatcgattgctgttgatcgttgaagctatcaaattatcactagcatttcacgatctgcagcaatctacaaagtccaaacgtcgacctatatatatatggggcctattcagattggagaaattaaactgtttcatgttaaaatttcgtaaaattcctatgttctgaaggaggcaatagggcaattttgtttggatctttggggcactgcagcttgcttgctttggccgttgccgccaattcatcctatgtgaagtggccagcttcatgtttcagctaacacaatacagaccacgcaatttaactagtagtactccagaaaacacatcatttgccacgtgcgcttaattaataagtccatcatagtgggtaatacccgcatttccgcaactaaactgtttataccatgtgaaggaacagtgctgcttgggatgtgattgggcactaatctgactctaatgcggtctctgttgcgtgcgaaagcagcagagctgcaggtcaagaagaaacgactcgatcaaaaccagcgccccgtgcaaagtcgtagtagcacatggggggcccagtttggtggattgacgacgtgggccttcaatatgggcttaccgaccgggcctcctccatggcacagtcgtgggccagaatgcctatggtcggttacttcaccagactaatcagtgtgtgtgaagatgctgactgacgtctcagtgttaggcgcaccaagttgtaattttgcattggttagatatagggtgtttgttgttaagtttggtgcccctaacagccatgtaatcctttaaaaaaatacgcaagcacacaagtatattgggatgatcctactgtatactaagagctaattgtacaactaataaaatccaagtgcgctcatggtcttactaccaaatttcaggcaacctataaattagaacgttgttaaacaaatgcaaagtggagtgacaaatcaaaagcaccactgtttagcttatgcttatgcatataagtcaaaattaaacattaatacttattcttgaagttgattttaaggttttttcattataatttattttatagtgtttgctttttaaatcactaaagatgcatatttaaaagtttcatctaaaaattatgttttggttgctaataaacggtatcaataagtataagtataaacgaaaagataagaaataaaatcatgcttttctctctacttttctttttcttttttcctttaggagtatgatgggttttccttttccgttttgatattgggttatgttggttggtctgtactagaaaacaaaactggccctagccattttattcattcactcattcactcgctcactcggatcccattcaatcattcattcatgtcggattgatgccgtatactgacttgatgagctctgactgctcatgccataatccataccatgccataagagtagggtaacgagcagttgaccactgagccagactgcctcttacccgccaaaatataattactgtacggcccacttgttacgcggtagattttgaactgacgaagtccagaaagcaagcaaggacagatagcaacaaccctcttctctccagtctacagcctacactaccagttgagaaagaaaaaaaaaatctcagctcccagctcggcacgagcacgagcacgagacgacctgacctttctcttctccatctccaccccgtcccctgctcgattcccacctcttctctccagcccacgcgcccccgcctcgccacgacccgaatcgccgtgagatcgagccgatcgagcgtcgagcaccttgcgcgcgcgcgcggggatgaaatcccatggcagccgagacaagctacaggcggccgcgtcgtcgagccaccgccgcgtcctcctcctcctcttcgccacctgcttcgcgctagccacgttcgtcaccttcgtctacaacacctcccacttcgcctccgcctcgggctcgggcgcggcggcggactcctccggtggcggcgcaagcgccggctccggcaccggcgccgtctccgcgctgccgctcccggtgttcgacgcgctggtccacttcgcctccatctccaacgccacgcaccgcatgtccgacaccgacatccgcgccatctccgccgtgctccgcgccaggggcccctgcaacctcctcgtgttcggcctcggcgccgagtccccgctctggctggcgctcaaccacggcggccgcaccgtcttcctcgaggagaacgagttctacgtcaagtacctggagccgcgccacccggggctcgaggcctacgacgtctcctacaccaccaaggtgcgcgacttccgcgacctcctcgacgcggcgcgggcgtcgcgcgccgccgagtgccgccccatccagaacctcctcttctccgagtgccgcctcgccatcaacgacctccccaacgacctctacgacgtcgcgtgggacatcgtgctcatcgacgggccgtccgggtggaacccgacctcgccggggcggatgccgtccatcttcaccaccgccgtcctcgcgcgcaccggcgccaccgccgccaagggccccaccgacgttctggtccacgacttccagttcgagctggagcaggtcctcagcaaggagttcctctgcgacgagaaccgcgtcgccggcagcggcacgccgtcgctcggccacttcgtcgtccgcccagacggccggcgcgacgccttctgctccggccaagacagcacggcggcgggcacatcgtcggagaagtccggcaagtaaaaacctggccaagaattactcttccctcctctgctaattttttctctctctcctctcctctcacttgttaattatttcctgttacatatattttttttactgttttttgggggacaataatttgtaacacagtgatgatatcattgcatcaatagagaaaggaaaatgcaaatagaggttttacacaatttactacacttttcacaacaaccaaaccggcaaaaagatcttggatttgatgacatatctgggggttgatttggtaaaagggtttgtgatggctggcaggagagcgatgctacagtagatggtgcgtggtgggtggttggatcccatcgttttcgctttcttttctccttcgtgttggttgcgtgtgttgcttggtcaggtgagcaaaaagtggatcagctcatctcctcgtcgtattaacggcactattagtataggagtacaagtagtagcaaactagtcgtctgattgatctgacgaagatgtatttgtttgtttttggttgagtcatctgatcatcagatccgagagggagaaatctactaggcgttggcactaattagctgatgtcgtaaccgtggtgtgcttgtgggtttagctccgtcgtttcgtttaaagttaagttaaccgtattttgcagcaacgtccgatcgacctctcaacaactcttgtgtccgatcttgatcggcttctccggtaatggaaaaacaagtgtcgcctacgtggcaatgatcactttgataagccactgaccttagctggctagctggcaaccaatatagtcatgtgtatactctgtgtttgagcacatagagtatctgatttctgctggatcaattttgatagggtagcaatatctggtcagattgaccatcacacaaacaatgggacatcatttcagatctcccagcgagcaacctgcctgggagcgtaaataaccaaaatgtgtcaggcattgtgaacgtggtttgggacttggatattcatcatcaaaatactgcgcgccaaccggatagtgagtacgaaacagaagtctgaacattggacattggaggccgaatcagcattcgtactaaaccggttatttgtccgtccgggatctttcatatggatcgatttaactatttaatagcgactttgatatcccaccgttagaaattagaaaaaaataattaaaaaaaaataaaaaatttaaattaaatttttatattaatgtgtaattcttctgcgcgtttgcaagaaaaaataaattttatgtatgactagaattgaaaacagttgaaaattgtacctttttaaggagatgatacttcttggtcgggaatttctgcaacttttttatccctattgagggtttattcggttcggaggaattttacgaaaatttgaaagaagtgaactgctttacgtgaaaatcctataaaatccctgcgttttcagggagccttggacattgtagaccaaatagccatgcacgttaacatgctctcaaaacctttttatctcatgaaggcgacggaccacgttgcgagctgcatatcacgtaccatccgtttgcggttagtcgtcagatcagatatcggcgctgctcgtcttctcgctctcggtgcccttttgggatgagaacgaacgaaccactcgtaggacaattataaattggattaggctgcactgcagggtacaaatcgaacggaccaacagcgttacagcctttgcccccacatgccgtccatttcaggactttctttctggtgacattccaacaaccgcgaccctctctccaaacaggatgtcatttcaggctttcaggtaagagggttgagcaagccaatcccaagctttagtgatcaaccaggtccgtagcaaacttaataaatggattaccagctagtgatagggtcgttgcaacgatgtcattgtcaggatagtttaccatgttactgtcactaccttaataaatgaggaaatatcacaggtagaattttatatttatggagatgtaaaacattttcattatcttaaaacaattatattcagtagtaactttagcttgaaatggacgtgttggatttaccctatcaagtaatgactgtatttgcgttacagggtttgttaaactgtcaagcttcgcaaccccccgaaccgaatttccgttctaattaggttaggaagcaccagcttaaatatattgacctcgtaggcagatataaaatcgtactactccatattttaatgtataacaccgttgactttttattcaacgtttgaccattcgtcttatttaaaaaatttatacaattatcatctattttattgtgactcgattcatcattaaatgttctttaagtatgatataaatactttcatatttacatgaaaattttgaataaaacaaatggtcaaacgttggtcgaaaagttaacggcgttatacattaaaatacggagtaagtaccagtagaaaacaccacctgcttctggatggatgtaacggagatgtgttcttcattgctaattaggatatctccaaaacgggttcaacaaaactagaaaacgggttgagcgacccaccatggtcctgacaggaataagttagacatcatgtgcttggcgccacccagctctggagaataatagcatatggttccccttacctctgtgggtccttgatttgtattctgatacctgtagtatttgtaatcgcgtttcatgtgtgtactggctttgtgatacggagtactagtatagtaggactagttgttggatactactactactcctgttcaatagttaggcatggacccgggcggattcgacgtgacggccggacgagtggcgtaaccgcatggttgacctctcatcactcgctgttccgcctcatgtcacgcgttgggttgcctctgcatttccaaagcctttgaccgtgaatagcaaatgcatcactgcgttaggccccatttgcaccgacgggtcacaatacggcaatcggctgatcgacgacagcgtagaccggccgaagccgaaacaggcaaggcacgctcggcatcctctggccgcggcagcagggaagctgaacccatcttccgctggcgcgcgcacgtggttggaaccggtgtcatcaaacacaaactactaataacatttttcatgcaatcaaccaatttttatagctatcgataattatcgatatggagacagtaacggtgtcaaacacaaacgacaaataacgtttttatgtaatcaactaatttttataggtgttgatagttattatcggcagtgaagaaggtaacggtggacgtggtgagtggtgaccgtgcctggcctacccgggagctggctcgctgctgcacgtggtgaggaccgtgccatccgcccaccccacgctaggccgtttagcggcaaaacgtccgggcgtgcttgg

SEQ ID NO: 5554 - DNA, 25924 bp, Oryza sativa
caacggatgcttaccgcaacctccctggtccttgatctcagccacggcccccttggtcctccagtcaacggactccggcagcgcctgttgtcggcggcgaggtacctgtcgctgaccttcctctccctccgcggcttgttcctgaggccgaggtaggtgtcccggtactcctcgttggtgaggtcggcgaagcggttgaggccgaggcggaaggagtggaccccggcgtcggcggcggcgttgtgctcgtcgatgtaccggaggttgtccctgaacgccgcgtaccgccgctcctcctcgccgacggcgttgtagctcttgccgtgctcggccttccactccgcgtacagccgccgcgcctcctcctcgctcctctccccgtacgacacgatcgacatgtccgccgctgccagcgacagcagcagcagcagcgcggccgccgcgagagccatggaaatcctcatcttggcgagctaggagaagacgaccaagaagaggaggaggaggagaggtagaagaggagtagatggatttgatggtggtatcgggggtcgctttatagaattggagaggacgagtggtgggcccagattccattatattcgtgcaattttcttccaatattaatctagtcgaccaccagtaggatattttttttttttggtttcgaatttgtattgggatcgtttaataaaggtgccactgaggtggacaggttggattgggttggggttaatttcaacttaatctattttttaaaacacatactctctcctctagaaaaaaaacccaaactaatattatctccgtacttaaaaacccaatctaatattaaatgagatgtttctaagtacaatgaatctggacatattactgcccagatttattgtactgaaaaaaatcatagcaacctatatctttttataaaactggttctaatcacatttgcacgtccatccccttctaatgagaggtttcatttttatttttcaaaaagtgttgcccacacaaacaaaacacttaatcgattgctaaaatagcccatacgacacatttttatttttttaatcttataagcaacacatgtagagacaagtcacattaaaaacagtgtaaactcatttcatctctttctttattaattacttatcatattaacaaaaatattgacatgataccctattcaatgaaaataaaactctcattgaaaatgaccttataaagattccacacgtacacactacgtagcacctctggaaactgggctgccatattttaaaacggaatcattataaacatattcttatcaacgatatgttgtttgtcacgaaaaaataattactagtaaatacggtgacatcttcctgtattagtctatctagcctgtagcctaggcaattatagtgggttgtttatttggaagattggggtaccgtgtcaatcgagacatgtagaaggaggtgacgagagaggttacgtggagctgcaagattttgactgttatgtttttttgctcctgtttaagctgcgatagttaattgcgccccggttgaattacgatcggtgatgcatcacggtgaaagagagagtttaccgtatcgtgtcgttttaaaggccgcgctgcagcgaaaagcgaggtgtttcacgaggcgattatattaaaagcactagcagtatgcatctgttcgtacaaacggagctttcagccgtgccaaagctaatcacgatttcccttcacgagagtggtagcaaactggcccaaagcagcagctggtgactactccttccgtctaaaaaaaataaatataagactgaatataatatattcatagtacaataaatctgtatagatgtatatctaaatttattatattatgatgtgtcacttttagtatcttttagtattttagtatctggttggttttttatggaacggaggaagtagctacaccatgtttagttacaaacttttttttttcaaacttccaactttcccattacatcaaaacatttttacacatataaacttttaattttttcgtcacacgtttcaatttcaaccaaactttttaattttagcttaaactaaacacagttctttgtttcttgcagacatgaagcatatcccacgatcggcagatcgggcggtggtcatgcagtggcgccgtcagtagtcatggtcccttgcctcccccagttgcctggaatttactgggaacgcgacgagatgggctggacgtacgcaggcaggaggggatggaaagggaaggcggccaataaagtggacggacgcaggatcgccaagcaaccggcggccagttcgtcctcgcgaccccaaaccgatccagagagacgcgccggatccatctggtagttgggatttgggaagatgacgatgataaggcgatggatgggagagatcgaaggggttcgcggtttcatggaatcctccgctagtttcgcgtgccaaaacgccgccgatacgcacggtagtaggtatctctatatgccctatgtctcctcgggtatgtttggagtagctatagattctgagaagcagctgtttgatacccagtttctgagaatctggaaaatgtttgaaacctagcttctccagcttctgacttcttagttcatttttcagaatctataactatatattctcaaaagctatgaattgtttggggcagcttctagcagaagcatcttcagctaggacaagctccccaaacagggccttcgtgacttcaccgatggaacgaggtggaattatcggcgtaatttaggattaaactgttcgaggaacgtgtgtgattatcaaggtttataaaaccgtgcggtaattaataagttatcaagtatagtatccttcttaatttttgaaactatgatataccttatgataactacccggttactacgataaccgtttaaacgtgaggtggtgataaccttatccaaaacgatctgataaaccctaattattcgtcaacgagttgtgttttttttcctagttatatccaaaatcggagcttagcaagcggggaaccaaaaatcccacattccggtgacgcacgcagcgagtccaatgggaggaatcttttggcccgcaaaaggaaagagcgcggctgcggccgcatcggtggacggggatagcagcggaggagggcgttggaatctctcgcggcggccatggcccatgggttggttggttggttggttgggtggctggcgtggaggccccgcacaccggaatcgtacaacaaaatcgtcgcgcggaaggatggatgagtgacgagacggacgacgagatgcgcgcggaaggcgacgggcgcgacccggcgagacagtgagtcggcagcgcacgccaccccgccggattggctagccgcagcctgcgctacagtggcagactgcatatccaagcgatgcacggaacaaaaattggcagaaactgtaacaagaattacaccaagacagaagaaaaaacatttcctagggtgatgaaatcgtcgatctttggtttggtttagttaatatctaccataagggtcggagtatttgattccaatgtatttaaaaactataaatgtattcaaaacttccagtgtatttaaaaattataaatgtatttaaacacgtgactgaatcatatcatttccatcaaaattcatatggaatgaatgatcatatagagattttgaataaaagttaacccaagcttcaatcttttaaaaaaatttcttcgagtttatctttctcctatgattcatgtgatctattcaaacgatcgtacatgtttcatcattctctgttgctcttgattcttataaaaatcttgtgttttttctattgctctaatttttcaatccggtgtttcaaaggtgtcctaagcattttctttggatgaagattgtgaatgagtttggatcaactactaggataggtaactttttcattttcatccatgctttccaaactcataaaatagtgtgcttcgtacagaaactttataaatagattttttctaaacaaataaatttattttttaactttgtaatagttaatgcttaattaatcactcgttactgatttatctcaattacaacgtgcaatagattatagctaggttcaaatgcaaccaaatgtatcttagggtctgtttgagtggaacttaatattttgataagtagatgtttggtagtcaatttataataatatgtagattctacagctataacttatcagaatctagataaaaaaatactaaactgtttagaagagcttctaattctaagagaaattggagtagttagaagcttccctaaacagattattaagctattgctaaatttgattttgtggcacgattgctaatcaccttgcgataagcggtcggcggtagcggcattggcttatcatttctcatgggatttctggaggaagagtatatttaggcagataattgtctctttcaacttgagaaacaagctaccactggagtaatgtactagcactacatacccgtagtaatgcttgtcacggtaccgcggctatctccttggtccatagtgcggatgtcgtagcagcacttgtgaccgctcactccggctaataatagcctgagaaaactaagccccatgtggacccacccacttgatgctgctgcctatagtaatctatttggccatggtgacgagaaccaggcaaaaactttataaaactagcgccgattgccgactaaatcaatcaaatgtaaaaaaaaaggatgaattttgatctagttaaatcagttatcagttcatcctgcccatagttaggagtgacgacaagcatgtgccagggataatacagcaacataaagtattgagacaggaaagaaaggccatgttagtatgttactgctacctcgatcatgcagagtacgttcataaacatgtgatgcgagatcactaaaaaaacatcaagaaatccgtcctgtgtcaagcactgctctgctggttcccctcccttgcacaactcttttttgtcagtggagtatttttacttgtgaagcacatgcatccactctcgtttttcttcccctgaattctcattgccatgtcgttcgtatcaactgcccagcacgcaaccatgcatcgacgtgccatcgaatagttctttagtttatgagttctttgttacggcactccagtcgatcggtcaaatagttctttggataaccatattgaatagttttgcactctttggataaccgtattgaattatagaagtagacgggttcagattgatgcccaccatggaatggacatggtcagtttctgagtttgtttgcttcacaactctgataaaaaaaaactctgaagccgtgggtcaaactttaaactctctaatttgagctcggagtgccacatacttaattggaattctgcagctattatgtaaccctaaactgtaacttcagattgaaggattcctgaatctatattttccaatagcgctttttccaataattgaagtcatggtccaataatgtgaactcagctgattcctgtatcatggccaagatagagccaacaaagaataagagaaaaaagatatcttcctatcttgaaaggaaattccaattagttaaacagtcaacgatctccttgttgctttcatttattatgtgctgaggcttacaatttcactgatatttcttctgcccttttgttgacgttgatggaatcattacaaaaaaaaaaaacagagaggtgacgttgatgaactgctgtctctgttcctgtggccattaattcggcctataatctagcaattcatttcggaaagtacagcccaacagtgaacagatagaagtatcagatacgtgggccaaattcacatgttcggtcgatatagtcccagcccagctagtataataataaactaacaaaggactgacgaaacgagatgttcaataaaacacgagctaaacaaaatatccaccgatcaagccaatcgggatctttacctaatttactaacatatataactaactctcacaaactgatagtaaaaaattaaccctaaaccaaaacactctaaacctaattaacgcccatctcaatttctagttgattcgaaggaatttcttgattggaccttccagctgctgcatgacggccttccatccagcctccgtggggtgcacatcgtcccagtagaagtacttctccggatcgttgcacacgctgaacaggtccttgccatcgtgtcccttctgcccgcagaagccgttcgggtccaagctctcgcagcacggctgcatcttgtgctcgaactggctcgacaccttgtgcttcgaacctacatatcaaattcgtcaatggacacatgtacgttgtaaacagaaaaatgaaagttcatcaagaaattaagacgaatcaacaatgcgtagtaattatatattaccttggtcgggattgacgatgttggagaaggcagtgttgaggtcgacatggtggacgtagtcgaggtgcgagagcttctgttggaggttgctgccgtggaggtaggcgcccatgttgccggtggagctgcagccggagtagttgcccggcctggttacccacggcgtgcagccgacggggtgcaggttgttcaccaggatcttcctcgccccgttgttcttcagcctgtgcacctgcttcgcgatctcgctcgtcacctcatcaacaaacttgatcatctgcaaacacaaagaacatgcaatatcgatcgatcagaaagactgttaactaggacgtactccagtagctaatgtgtgtgaaggctgatttagatgactatttaggtagcatgcacgaaacgagaatcattttccccgatctgtgtactgaccttgctagtgtcgttgacgttggcgaggcgggcgtagtcgttgccggagacggcgacgagggcgatggagttacggaggttccggcgggtgatggtgccgtcctgcaccaggtccctgaagtggtcgacctgcttgtcgagcgtcggcgcgccgctcggcagcttgaacacgccggagccgccggcggcgaagttcatgccgtgcgggtgcacgtagttgtccaccctcctgtacgtcggaggcgcctcatgacgccccagcatccgtgctgcaaaatgtacagccaaattattaagtacgcagtaacattttcaatctgagattgaatctgaaaatggatgctgttgaaaatttccttcaagatagattattcaatctgaaaatggataattaggttatagttagttagttaattaccgatgagatcggactggaccatggcgttggagaagcggccggttgggcggttgttgccacggtcacggccgtaggggtagtaccattcgcgcgactgctcgctcagtcggcgcttggggagattgccggtgtcggcgaacgaatcgccgaacacgaacagcgtgtagaacccgttgtcggagtcgccgaaagcggcaggatcgggacgcgcctccacatgaacagctgttatatatacgcacacgcattatcgatctcattaattcgtcagaaatgaatatttgatttgatcaattaatattaaattgataattgaacacataatcaagaacaagaatgaaggcgctgcagatggcacgtaccatgcagaacgaagaggatgaagcaggtgacgggaagtagcaaggagagcttcgccgccatggccggcaacaactgaaagctcctcggttgacggtggaaggtgtaactcgttgaattgcttgtggctttgcatgcatgggtgtttaccaccctatttatagacacgacgaggctgcaaatctgttccgaatatactattctcaaggtgattttgcgaggtgattggatcacgcggcgctggcgcccttaacttccgagtaacagttgggattaggaagtactccaacgacgtgcagcgagcagctgtgattttccaatgtgatcgcgtactcctatctaccagggccggccaaaatgctcccacacgaccagcccaatcatgtgggccgaatcacgccggccgctcagctcctacgcttatccatgtgataaagcagttcaatcttatcttcctgcttatatattataagaaaatctaattgtcaggagttttacactaaactaaactttatatactttttatctctatatatgccaataaaaatacgagactacccattgatatttcaatagatttgaagcttcaaattttacagaacttccaaccaatacatatagccatttttgaatgaaataaaagaaaagggacaaacatatagaaaatcataaatcttgagaaagaagctgttgtaaaatatgtttttttaatgtaagagtgtagttgctctgtaattaagtgtaaatactctataaccaaatataagtactttgtaactaaatgtaattgcaactttgcaagttgaattcataggaacacaaatcttgatacaagatcgtacgggtgaaaagtcagagtataagaactcaaaattctatcgcaagtgaaatagcaaaacctcaaagatcatactctgtactagttttgtaagttgggggatacgttttatccagttttacggttgaaaagcacgattttgtatctcgtgacatgatgagaggaacctcaggtataccttttccatctgactgattactgtagtcttctgtaattctgttcgcagttacaaaactttttttcaaacaagtttacgtactacgatgctcgttttgtttctctcttaaccgtgaacagcatgatattgaattttgagtaaagtgcattagcagtacttaaacttgtagggttgtgtcatataggtctataaactctcaaaatgtatatccggatcgcataacttgtcaaagtgcatcatctaggtcccaaattagcacatcccctctaagatcctatgtggcgctgatatggcaatgccacatggacgtgacgtgtccttttccttttttttcttctttttccttttctttttcgttttcttctcattcttatttttttccttttttctgcacgggtcacagagaaaggagaagaaaggggaaaaagataaaagaaaaggaaaaaggaaaaaaaattaaatgggtcccatttgtcagtcaaaataattctatatcatgtccgtgaggcatacacatcaacgtcacgtaagaacctgaagaggttttagtgatttgggacctagatggcacactatgacaagttatgggacttggatatgcattttgagagtttagggatctagaagacatacccctacaagtttaaagactgcccgtacactttactcttgaattttttatcgtcctatgatagatgcctagaatccaagaactgcattatttttttaagtttataacttattcttctcattttccacacgcacgttcttaaactgttaaatggtttgtttattttttaaaaaaacaaaagttgcttttaaaaaatcatattaatctattttttttaaaaaaaactaatacttagttatgttaatgagttgctccgttttgcgtgcgagaaaaattagtttccaacggcaaggaaggaacgaagtgttaaattgacgagtagaagatgtttctctgtgggcggaaagacgatagaggttgtgtttagttccctttaaatttctaaaaattccgtcacatcaaatgtttatacacatacatggagtattagatgtggacgaaaaaaatcaattacacagtttgcatgtaaattgcgagacgaatcttttaagtctaattacgtcatgatttgacaatgtggtgctacagtaaacatttgctaatgatggattaattagacttaataaattcgtctcgaagtttacgggcggaatttttgttttgttattagtatacgtttaatattttaaatgtgtgtctgtatacttaaaaaaaattagctgtgtaattaaacacggccagaattgtagtccaagcttcgaaagctactctctcccgccccctttcttctcaccattcataatggcacagtgctagttgtgctcgtcccttatagtgatgtactcccatgtttattattttcaatggaagattcagtgggaaagctctctcctccagtgatttctccaaaaaaagaaaaagaaaatcacgagtagctctctctaaaaaaatcacgagtagcgacaaatactaaaaacagttcatccaagaagctgccatagcctatgatccaagaggcgaagaccaatttacaaagttaggaatacgacagcttccacctaaccataatgttcctcacaatcttatagacacatcagacaagaacagacacattatggatataggctgtgttcggatgcctgagttctcaactctaacagtgcgcacggaaaacggagcgatccattagcacgtgattaattaagtattagctaatttatttttcaaaaatggatcaatatgtttttttaggcaacttacgtatagaaactttttataaaaaacgatccgtttaacagtttgaaaagcgtgcacgcgaaaaacgagaggtgagtattgggaacttggagttccgaacacagccataggaggagaatgaaaaatggattgttattatttcagacgagtatacaaccaatggtttaactcccagttacccacaccacatcaattcgtttttaaaagtccctgctctgatctatattacacaaaaacaatatgcctaatttgctatctaccagacaagggacagatggcacatataattaaacttttatctattttacacggtggtacaaaatatgcgcggtgatttatccccaagattacatgtactgtctatggtttctgtagagtccagagaaataatctgagctgagttacattatgttacttgagagcgtttggcaccgacgaggcatagatgcatcagtgaagtacttggggcagatctagtgagccatatagaggtatggtttcgatctgatttctattttccaacaaaaaatggcctctagtgctgaccttcagtattcaatagcgtggtccgcttgagtggtgtttctggtttggcatcctgttggcgggaagcgatggttaccagaggagggtcaattttccatctgcacaaaaatgaaggataaatttagtactgtggtttaagagaaacatcagggttaatctgatagatcttcaaactcaagcaaacaagaagggggtattcttttgattcttatgccatgcaaatcacaaaagacatataatgaatttataaacaccaaaggttacagtgacaggacatacatttcatattcaaatcaccacacaacagggtaaggttgattcaggaaagaggtttcatcattgataggaatgatgtgttaatggaagtgataagtatggccaattagagttgtctgcctctaccttttattgacacaacgcatgggacagctagatcaggccagaaagtggaagaaaataaagagccttttggtgaaagtaaggcgaatgtggtatcatatccccttccggtcctccacagattaaacaagttaactcaccacaaacatcatgaaacgatggcaagaaaaataacagttttaaatactcgtactccatcttaaatgatactccactcactactagattgttgacatactaaagaaaacccaatatcctggcacaatttgaggagtaccagcatatactagtaccatatgtataataattaatatactagtacaagaagacagacgtatttggtatatcagatgagttgcccaagactcggagactgagataggctggtcacaatatatgaacactgttgctaagaaaaaattggccctgttctagtgttgtgtctggtcggcacatgtgcttgagacctacacggatcgctttcagcgatcgtccccaccccaccgaacatattaggaacacaatgaccatcgtcgcctcgccaaccataatctgctcgacctaacgtaccttaccttgccatggtgtcgggatcaaatcctagatctgacccatgcaatttcgagctaactgctaacgtgctaatcaaatcacccgtaatcacgcggtaacatagtactagcatttggagatttattaaatttgggaggagtaatctggtgatgtagagagagggcaccgacgaaacttactcgtgtgggaatttgacctcgtggagggcatccgaccggtgggaccatgccagggcggcctggccgcagctggcgagcggctcgacgcgggcggcgtcggtgaccagcgagagcgggctggcggcggcgccgtcgtcgatggcgtcgatgtcgctcacccactcggggcgcgacgccgcgccgccgccctcccagagcgcctgcgcgttcaccacgaacccggcccactccagcctgctcgacagcagcatgtcgccacggttcgccggcagcatggtctcctccgacacgtggtagcccaccagcttcccctccgcgtcgcacgacggcgcctggaggaacgtctcgctggtgccctcgtcctcgcccagcacgccgacgggcacggcgcccaccgacttcaccttctgcgcctcgtcgaacagctccgtccggaggatgctgttctcgtcggcgaacaccacgacgccgtccatcttcctcttccgtatctccctgcatttggtggcaccagagagatctcaattgcaacatccgaggtcgcgaatcgagagcgagatctagctgcggtgattacctcagggcgtgcattcgcaggcgcgaggtggaggagtcgggtcccgtgatgtggaggaagttgaggttggagcgggacagcacggcggcgacggcgtcggtgtggtgctcaggctcgacgacgatccacgtgagagggccgtcgacgaggcggagggtgtgcgccatcgacgtgagggagggcacctggagcgcggaggtggtggtaggggtgacggcaatgacgggcctcggcggcccagccccgcggcgacggctgctgcgctgcgcgttctggacggcggcgaggatgtggtgcgccttgaggagctcgttggggtcagggtgcggccacgggcggacgcggatcgggtggcggccgacgaacaccggtccgtggtggtggtgctgcgggtgtgccccgacctcggcggccaccgtggtggtcgtcacggtcgtcgtggtggtggtcgtcgtcgtcgtgatggtggtcgtcgcgttggcggcggcgagcatgacgggcggggagacgagcgagacgaggtgggcggtggggttgatcggcgtggggaggaacagcaggtagacgatgaggcgcgagaacctgaacccgaccgccatggaggtggcgcagaagagcgcgtgcagcagcagccacgcggcgggcagcgacggcttggacggctcgggcggggagtccggcgaccccgccgccggcgacagcatcggccacagcggccgcagcagcgggagcttcatggtcacagcttattagctcggcaaatcgcttagaggcaagaaagcggcggtggggaagtggcaagtggtgaggtataagagagcagctggtggtcgccgccgcggctcgggtgggtgaataattgtgtggaattattaggaggaggagagggggaaaagggcaagcagctggtggtggatggtgaggtgaggtgttggggttccaccgcgaactcggcaattggagaagagaagaagaagcgagagagatgacacgaacacgaggtgaggttggggttggggttgggctggcggtggcggtggcggttgaggcgtgggattgggggagaaaacacgcccgaacgctgggaatatttcggccgttggcggccacgcggtggcagccagacacggttccccgttttcacgctttttaaaaagctcggttgcttttacctctctgacggcggtgtgggtatcttgttcactttggttggtgaagctgtctactccgtatggttatctgaagtaaacgcgagctgacctaaacagttgacagtaaaagtcgcctagtaaaatacatactgctatgaagagggagcagtattcattcatcttcctgtttccacgcaataaatcaccgctcaattatcttcccctcgcatctttcatccattattaatactcccccctacggtacagtaccactgtcgctgtgaacagaactattgcactccaagcaattctcaaccatccagatccttttgcaggaactctatggacagtagacatgagctctctcgctgccgatcagatccttgaacagtctgcagcgaccgatgtttccctgtttttttttctcttgcaggaatttcactgtgttgtcacaagccggggtgctgcctggctagtttgttgtactgccgttaataacatggcaagggacagtagtactacagtaagcttcctgtcgttggctaaaccaagatgtgtttgattaacaacaaaaggggttggctgttgcctaatgcacgcactgcctgtacagatttatttaagctaccaatagtacagcatcttcttgcagcgttaaaactgctacaggatttttctagtcggcgccctgaactttcatcagggatggtgctcacgtgcaggcaaagggcaggcagcccatgctggctgccgtaattctgaactgatccaacgtatggccaatttggccatggatggattggatgcttggctgcttgctcgttctggagttctgacctgtaatgtcattttcttaatcctttctttttctccccaaattttgttttcctgccaatgtcagtgtcaatcccggattggagtagaaccggcactcgatcatagttccatactcttgtcttgcattctgcattgccatgtgtgtcagatttcttgttcattctgaagaaagtagctttatgagcagtaagacactgtcccattcagtccagaacacaatacggtgaatctgtgaatctcttgcacgaaacaactgcaagaacgggcagtacaggataagttgataatatgatctgaaaagtgattaggagagtgtacaaccaatcatgttttgaactaagcttgaagaaacaataatccgattggtacaggttgggttgaatctgctacagttttattcaggtatgcttgtcctcgtgttcgacctgatgggtactgaactatctacctagatgcctacacatataaacaaattacagagattacacgaggaggaagaagtgcatgcaatgcaatgaaaatggacatgaaagcttagagctagctaaaccaggatgttgtcacataattatgaattgaaaggaacatgacataggcagtgttagatacttaatatacttggatacatactagtatatcatttccatacctacgcagcttggtggtgtgagtgtgacgctcaccggccattgctgaagactgcacttgaactaccagctagtgtgcattttaattcctggggctgcattcttaataattcagtacgattgccttttcgtctctctatataactttagttaaaatgttctttaaagaaaaaggataactttaaaatggacttcacactctgaagtctgaatatttctttctggcaacgaagtctgaatgtttgttgtgcctggtctgccgtactggccgttcggtgaaacatgcacataaacagcgattgcataacagtatacagtagcattatgctcctccttttttcatcagctttaaaaattgttaatgatggccgattaagccacatgtaattataattaccgcgtaacaggtggctacttaattatcagctcatgaggttaatcatttcctgacgctaaatcggcaatagcgacgtataggttgcagttaggtggagtccttttctttcgcggcgtttaagtattgattagcacctgctttatgtagtttaatcgtcagtggatggagtagtagttgcaacgttgtcgtttacactagaagccatccgtgcccagccaaattaagcacgaatgcatgcatgctttcagctcaagcgaaacagagcgaatcacagcctctcctgtgagactgtgactgaatctctgggttgttacttgttcaaagttacaacggtgactgtactgtaagctactcctaaaagttggagggaagtgaacaagcaaagcaatggcaggtgatgaaaggctgaaagcatctgcaggcatgcgttgcccgggcgtgaattctgtcagaaaggtaatataaagttttggagacgatttcacaataattcatgtggtcaggggagtaatcatgatcataggagaggttccattcaactaacagaaaaggcagagcggaatctgcactactttcttcagcactttgtggttgttcctccttttgccggtctctgcaatttgcatccgggtatgatttgctactgttgtttgctttgctccgtactactgtctactggtagtagttcactgctccactcttcacatgcagacatgctctgattgatctggcacatgcatcaaattggaaaagaagaaatggcatgcacaaatgaccaagatgcgtgctggtagtacacaagaaaccaaagaatttgggtcttcatagttaataccgggcctagttaactagcagttttgcaaagtttctagctcaaccaactggtagtctttcggacctcggatcatgctctctatgatttgtttttgaaaagaatggaatgatgaaagcttaatcttcaatccaccattttggtccagtttcatttcatgcagtccgaccaaaaatggcaactgaagatttgatcaaacatgattgcacattgatctgtgtcataaaataagacactagcactagctaaaacgaatgcaggattgagtcctttgcttagaagcgacatcagagatgacactcactcagttcattacaagaaattgcccataatcggtgcttctgataaaaatatccatggcttcctttgctgaatcagttatgtttgtacagattttcaaggagcacaagcgctagctactggattttctctaatttgtctctactaacactaggtgcacttgcattaatttgttgctagtaacactgatacctatcgattcaaccaaaaaagtaccatgtgacagcatctatagcaccaagaccagttgtgctatgaacttataagctaacaatctgaattagtatcagtattaaatcagataattgcacctaactaactcgatttttggtcatagtacatatgagaacttatgcattgtgacgccgaacgaccaaaacaaccaattctccaaatgaatgtgctccatttgttccagcgacagtccacctgcacaacaatggaggacaccaatcatttggggtcctagtacgccccatgcaaatgccataacaaacttcttttgacttaatgggcacctcaggccaaacctccagctatgcacaaacagttcccctagtttggctgtcccatagaagaattgaaggttttcagttcacgtttcatgttcttcttttgttcgacatctcattgtaatcagttgacgttacacaatttggggccattccataattgtagtaccttgacttgcagagagatatatcagaagatcctataggagagatttttgtcagtaagcagacaatggtagaacgctacaggaagcaatgtcaagaatatagagcaacgattcacccttgtaactatcatacatttcaaactgaagacagaaaattttagcagcagaaatatgattagtttgctaacaccacatggttctaccagcaaaaactggtgcttctaagttttaacaagtaataacaattctcccacatggttcacaactcaaggccagcagaaaaacgttctgcagagaaacgaagctatcccagctgtgcttttcagaccaggaaaggctctttgctttggtttcaaacaatggcaagaaaaggtcacagctacatgcaactgtagtactagtgatcaatgctcatgaacagatgcttaaagcagaggaatggaagattcctccctccagaaatccggcacatgggttgttgtctttgtttttattttatgaaaatgaaacaagaacaggttaggttagtcgaacgtcggcgtatgggaatcggacatctcctctgctgagagggcacctcccactgttttttttcacaagtcacaaaggtcagtaggaatcagggagctagcagttggaggcttggagcagagcccagtcaattagatttggtttggtcagattatgacaccgactcttcaatttccaatttgatactagcatggaaatcaagctgaaaactatgtgtatgctgctactaacacgcaaaagctagcatcctagcacatggcatatgaagcatatgcaacgcaatgccgtggaatctgttcaaagggaaagagcacttacgatagagtagtttgttcaatcagaaggtgacagaaagtttcagtctttcaggtgcttcctgcaaacgctgcagtggaaaggggaggcacatcaacttctcatctactgttgagctgaaatagccgcctgatctaaatttcaagtacgaaatgatcataccttgcataagtagactggtagttgcatgccatgcgcggtttgttcagctatgcaacagacaccgaaagctgagcctccatttcgaacgagaaattctcacacgaattcaaccgtttactgcaaatttcaatacaaccaagttaaaagaacaccaaaacaatcgttatttatttctcatttctaattgctttgcttattgatgaagctgatcaggtgtatgatttagcatttgatacaatgttcagaacagacaagtgaagaccaatcaaccaaccacgtgcagtcaaagcttctgaatctcctgcacaaaccgctccagatcctcgtaggagctcccaccgctcctcaccgcgatcgcggcatcggcggcgagctccttggcgcgcgcccgggcgccgctccccttctccccgaccgcgtcggccagcacggccgcgagctcgccggcgtcgggcgcgacgccggccccgcccgcgcacgcgcgcagcgccacgcccgcgtcctccacgagcagccgcgcgttcacgaactggtcggccgccatgggccacgccagcatcggcaccccggcggccaccgcctccagcaccgagttccagccgcagtgcgtcatgaaccaccccaccgccgcgtgccgcagcgccgccacctgcggcgcccacccgcgcaccaccatcccgcgcgccgccgccgccgcccgcgcctcgaacccttcagggaccacgccgtcgccgctcacgacccacacgaacgggacggcgctccgctccagcgcctctgccagtgccgccgccatggccggcgtcagcaccgcctggctaccgaagcacacgtacacgaccgaaccttccgggaaggcgtccagccacgcgctgagatcgccggctgcgacggccgcttccccaccgcgctcgccggcggcgtccgtgtccggcgccaccgggcccaccgcccacacgcgcttgaaccccaggtcctccagcggcgcgtccaggtacctcccctcgagtgcccggaaggtgttcgacacgaatccccagccctccagattccagagacaattctgcttcagcgactcgccgacctgctcttctacgaggccttctatgtaggccttgtacaacatggagatctctctccactcaaacgccggctcgccggggatcgccgggaacgcgaccggaaacccatcgtcgcaccccacgggccgcttcaccaagcggcgaaagagcgagtgcggcacggcggtgccgagcacgccggagggcgtgaagacgaccctcgggacgccgatctcggcggcgagaggttgcatccacccgcagaagaagtcggatacgacggcgacgacggggtgcgcgggctgcgacctggcccacgcgaggatggggcggtggagcgcggcgagcgcgtggatgaacacggcgatgtagacgggagggcagttcatcgtgttctcgaggccggcggggagggaagggtgggaggggaaggggaggacgagcgggcggacggagtcggggtgcgcggcgaggagaggggcgagctgggcggcgttgcccggcgtggtgacgacggtgaggcggagcccccgcgccgcgaggagcgcggcgaggtcgtagagcggcagcgcgtggccctgcgccgggaaggggacaaggaggacgtgaggcgtggcggtcggcggcgccattgctgcggtggtgaggaacggaggcggcgtcggcggcgagctcctgatttataccgtacagttaagaattttttaaattttattaaaatatttaaaactatttttttaaaagttttacaaatctgacctctcatgccctgtgaaagggcggatggcgtcccgttctcctcactcatcggccatgttttacaaacggcttaacaatgtattttttaaaataaatttctacaggaaaattgttttaaaaattcacactaacccactttttaagtgtttttacctaatgcttaaccaattgtgcactgatctaatatttcatttttggtgcgaaaggtgagagtttccaacccgcggtcggtcaccttgcagatagcccttttaccggcctcccaaagggctaggccgtctgcaaaacaatcgggtctaaccagtttacaggcagtcacttgtcgccgatgggtagatttgtaaaacactgaaaaaaatattgttaaatattttaataagtaaacttaaaactgaaaaaagtttctagttagtgggatcggaatgggctgggcctgagaagactactacatgggccggtggttcggcccagaagaaatcaggtagccgacgagtcatccacagcgacggcgagtggccaccggccgttctacatctcgcgcgcggcctccggtcgtcgtcgcgactccgctgccgccgtcgcccggcgccgccggtgatcccgctcatgtgctagtagaaggcgttcggagctctttgggagtgtcgcacgcatggagatgaccagaagccttacgctcgtgccgctcccggcgacgctccggccggcatccgcggcctgtcgccggcggcggaggcggcgagggcttcccttcggtgcactcttctcaccatcgcctccttcgaacgtatgtttcttcctcccccagctaattctgttccctgcttgaatgattcagtagttcgcaattcttcttcagcagcagcagcaggaaatgcacatcagggcgctgcagccgcggcaggattgggtgggggagtgggtccggagcaacgacacgctagtccgcggcctgcccatcctcggcggcggcgcctccctgctcgccgtcctcctcaaccgtgcggtttccggcattgcagctgtcgccgacgcctccaggtcatcctgtgggtgcagagccaccccaagaaatgcccccattttgcgctcgtcttggattggatttatgattactgaccaattggttaatttgatcttcatctcaatagttcgcagtcaagggctgacatactgactcttgctctctccgtaactgatattcttgctggccttgtttggttgtccatccggccgaaatccatttctcctgtgagttttttatcctttgcggcatattactgtagtaaattttttacaataattcctcattttgaaatgatcttaggttgttcctcgaggtgtcgagtgcaaacgggtaggaacgggtgtattggactcggctcttcgtgaactactttggtaaccattttactgatacacttcctgcttatttcaatcttaagatcttattttaattcatagagatcatggaagctcaaataatgaaatattattacttaaaaacctcgctaggtgttccataccgtgattctatataattactagtgctatgatcttccatgaacataactaaacaaatctttcagttttatgcatacacaatcccatccatgtacttcatgtcaaggaaattatgttgtgaggctggctgtgacttcaacttctcacaaataggacatgggattcccttacaactgcaacttgttgcaaatccttggttgttgtgtatggaggtaattgtgttcttcaaattggggttgctgctggctctccagaggatggtaatgcagttatggtggatgcacagaagttcatgcaaggttccctttatagaagtgccatggaatccaagaagcgtgagtgtcttttgttacttataaagttctttttttctgtttgatttcattcagaaacttcactttggtcttcttgcagaatcttacctagcaaatcttgccttatatcctggaaggactgaactaccattcttgccagctaacacgcaggtactaaaaaattctttcatcttagagaaattacatgtaagcacgcattggtgtgtttgtcaacttgttatacttcacgaaagctgatcataccatctttaaactaggaaactccagaatgcatcctctcttttgtttcattgaaaaagaagggggaaatcttattaagtctaaagatgactgcattcaacattcagatgaattaattgtatgaatgtttaaaaccaaagcttttgatatcttccctgatatacaggccctaatattgcaaccaattggtgataaaggaattgcagttattggtggtgacactataagggggttcactaatcttgatcaggtgctatttctaatctacagcctcctaacatatatagtaccacgttttgttttgggtgattcgcacagataatacagagaaaaacaatctatatgtgtaagctaaagatcacagtttttaaaaacaaacacaagccaaaactaggtcaactaaatgcttaacattggttttatgctcacttttgctgaagcatacaatctctacggtgtgtgtttgcattggagcatttgaagtattgacggtgagatcttgcattatttgcattgcagctacattattgcttttgagagcacaaaagaccgaatgtaatgaaaagcctgttggttgtaggttgcacacttgcactgttttaaattcagtatgacggttactgtaaaaaaaaaatcagtatgacagtagagagacaaccattatcctgttgattttccttgcaggcatggattgcaatgatagcagataaactggatgctacattgtcaaagtcgtaagaacgcgtagtttgttggatattgtttgtatcttgcaattggccaaactgtcacgagagatgatcatctgtcactgtacatgttcaagttacaggtagagtttgcaaaaccaacggataaaacagtacagggctggggttgaccaattgttttaagccaggctgtatgattaggcttgattaagtttgaccagcatgaattgattacaatgttagttacttcttgtaaccagtcactgttggctgaatgaatcacattactgatgctttcatttgtaagatctcatcacatttcaaagagtttgcagtgaatttacgttaagaatatcctcctggaccctctctaatactcgtgatcaacagtcgataaaatggaggaataaaatgagccctaacaactttctacagttaatgcctagcaatctaaagcgcacaaaccgctgaacaagaagagcgtctagagatcaaaattgttcctctcatgactcatggtgagatcaaaactgctcctagccgaatggtctcaacatccttctccagcttcattcatccaatctctctgcatctcaaaatcatccctccaaagatcttcattcagccactgatatctttgctttcttcttctcatgctttttaccagtttttcgctttttttgcttatccccatcattatcttcttttgttggttctacatgctcggtaggtggcggtctcttgtttgaaagttctgacttgtttagttgagcgccatacgccatctttcgtacatagaagcttgccacatccccattgtcgcgtttcagcagcacatttttttgaagtcgcccgctagagtcctgtgtgtttcagcatagtatagaactgagaaatttaacagcacattgatgcaattcaaccaatcaaatgataagcacaagggcaaaacccaattagtggaaaatcaaatggtataacgtaccttggcctcttggccatccagttcatcaaatgccttctctacctcatctctgtctccaaatgaaatacatgtagaataataatcaccccgaacccttgaatcaatctattgagaaggaaataaaaccattagactataaaagtacatgtgtattgagcaaatcataattagtatgcaaaaaccttctcatcaatactgggatttccagaaaataatttgagcagctcctgacaaggcaggtagactggaattttgtgagcaagcaacttcatcatatcagattcaggtacctaagaaatggaaataaacaagtcagttggcaactccctaacaatgctgaggtttaagataattgtttactcttacactatctcttgcaatttcaatgggatcattaaatccatgcttaagcttggcgagaactagattcatcgcagcttctgcatccttcaagcagttatgtggctccccttcttctcgaacagcatagcccaaaacagactagaagcacaaaaatcaacaaaaaaatttcagcatgcatagattcagagcatggggttcttcaggccttgtatgcattgtttttcttaagcagaacatcattcataaggaaacaaggctacgagtaaataagatgctatgcagtatccctttaactgtaccttgcacaggctgtttaaagaggctgatgcagtagtaggcaaatttgcatacttaaagatgtatgctgtatcaataacccgagagtagtcaaacttaagagctgcaaacgaatcaaaaaaatgataaaagctgagttacatactgagtaacaaaataaagcctgccaataaacatgatggatgcatagaatgactatatcaaatagattggaccgcattaatcacagattaccatgtaaatcttttgataggctatgaccaatcaagatctttcctttggacaagagcttcttcaacgatttctagggaaggaaaggaacaatataacttttgcaagattaaatcaaaccaaatacataaagaatttgtagaagcatacctgaacatcaactaatgagcatgtgactccttttaaatccttcttagacaaaccagtaatgcttgtcctatagtctgcaacagcttttaaggggtttacaagttcatctaacttcacctgaaaaagaatgaatttagtgtggtctaagaagaaagatggaaaattatggcatgattaatgattacaagtcaaaggacattgcatcaaatatacatgtgtctaatgtttaaaagatttggcataaactttatctaaccagcattaaaacatgtttttttgttgaaattatgtagtgttaggaaagttctgcttgttgaggcacgcagcagaagacaattcaatgcgtccaaatataatacctctagattgctgttgacaacacatactcggaccaaggcttccgtaccatcatggcaaaggaccatctcacagtcaattgccaacatagttgacttcataaaattggtaattttgccttcacgcagcactttccatccctgtcaacatgtcagtaaatctggagttatagaaaaccatagacatctctaatcttcgcaatgggtgacatgaagtcagagaaattctcctgtattaaacactactgaagtacagtagatagacaatactccctacatgtttt

SEQ ID NO: 5555 - DNA, 18089 bp, Oryza sativa
aagaagaaagatggaaaattatggcatgattaatgattacaagtcaaaggacattgcatcaaatatacatgtgtctaatgtttaaaagatttggcataaactttatctaaccagcattaaaacatgtttttttgttgaaattatgtagtgttaggaaagttctgcttgttgaggcacgcagcagaagacaattcaatgcgtccaaatataatacctctagattgctgttgacaacacatactcggaccaaggcttccgtaccatcatggcaaaggaccatctcacagtcaattgccaacatagttgacttcataaaattggtaattttgccttcacgcagcactttccatccctgtcaacatgtcagtaaatctggagttatagaaaaccatagacatctctaatcttcgcaatgggtgacatgaagtcagagaaattctcctgtattaaacactactgaagtacagtagatagacaatactccctacatgtttttgttaacatttaatacagcggtagaagtgcgggcggaaaagaataaaatcatacactttgaattaatgaaagaacaattcagcttgtacctctttgtaagatgggaaattataatttttcctgtactccgggtgttctgctgtcagttgaacaagcttctgcattttgcagaatatacatcaaaacaattgttaaccaagttttgacacctttgtcttggttataaccagaacaatccagaaactacacaatcatgagatagcataaataataccagctgaggagaaatcttgtcaggaaattccttcaggaactgctcaaaagcacttcgttcgttcagacgccttatcaattttccgaagtactgtaatcaaaaaggagaaagacacaaattgtcagtatctctactcaaagagaaatttaaggatgcctgacgaaattcgtggaacgaaacccatcgaactgaatcaaaataccaccttctggaaatctttggagaaggttagcaggaaagcaagcagcacatccttggaccgcttcttggggtcactcacggaagctccgaacttcttgtcgttccgagccaagaaatccttccatcccccctcggcgcccttgagcccgttcttctgggtgaacctgacgatctcaacgagcacctgacaacgaacacagcaacgcagaatcaggggagaataactcacgccaggtttccgcttgctgctgccttgcttttacctctttctcggcgccggcgagccgcttgcccattagacgaccacgtggaaacaagcaaggaagagcaggggaagggagtaggaagcaaggggaccgcgggttgcggcggccgctcgttctcgtgggcggcggcggcggcggtcgggaagtggcggcacggagaaaaccgccggaaaaaaataaaacaaaacccttctctttgctgccgcaagcgaagatcggtgggtaagtagaaaatacggcccagcacgttaactgggccgctttggctaaatttgtgaaatcgatcagtgggttcagcccacataaggtccatgtagtaaatgagattttcttctttaaaagcctatctttttatgtaaaacaggtccatatagttaggtctgcaaattaattaagttattattagtatatgaaaaaaggccaaatggccccgagtgacaatctttatatttgttgattttagtattatatccactgagttagcaaaatgggatcgaattggttagtttaatgcagtgatccaatgcaaattgagttcacgttccggccgatccatttctttcgcgtgtcgattgcttcgaaccggctgaaatgaatcgacgagtcagcattctagggaggtcggaagcaggcaggctgcaggcatacgcgttgaactgagctggcctccaaaacctaacctagtaatagtaagatcatcgatgacgccatggacctgatcagatcgcacaacccaaaagctgaggcgtatctggaggctggagcccagcattctcgcaatctcgcccgtgccaatcgcctaatccacgcgtgcacttgcatttcttaatgcgattgatatccatcctgtcatggccaggttcttcgtagcttagctgctcgtgtcaacgctgacattgtcacagttcaaagtcagatacacgctcaattacacagccagtacacaaatcaaaccttccatctgacagagtagcaaaaaaacaagtactgtatgctgtactacgagcatgcgtggcaatctggtctggatgggtgcggacaatctgaagcatatccctgacgtgtcacagccaagtaagtgccagcctcatcgcaaattcgcagagcgatcggcttgtccgtgctcgatcccgtgtcgcaaaacgcgattactttgtctgacgaagtgagtgttacctccagcttattagccttatctccggctttgctattggtcaacacgatgaggtagcatgctcagctccaaccaaatggcggcacaaagaaataatttaacgactcgtgcacgcgcattatatttcttactcgtgccgataactacgttgatgcatgctaatgcttgtgtgtgacgtattcttccccggttatagcatgtgtgcccatgcgaaggtacgtgtttggttcatatgtaactgatcgattatccatcaccggttaattaagcataactgcaaaaataaagggattgggaaataacatgcccaaagatgtttctctcggccacagttacacggtggttgcttttttttccccctccaaacagtgaaaaagaccgatactatttgcagactatgacttgcaaggaacaaaagataaatgagaaaaaaaatatcttttcggttaagatttttaacggcaagtaaaacgatattcaatagtatatgattaattgagtataaattattataaatttgaaagatgaatttgtttatcttttaaaagaaatttctatatagaaagtttttgtaaaaaaaacaccattcagcagcttgaaaaacgtgctcgcttgaatcgaggaatttactaagtccaaaaatcaaatagaacacaacttgaggccccctttgattcaaaggaaattcatagaaattttaaaggatttcattcctataggaattttttctatatagccctttgaatcaaaggaatgaattctctgtaatcccatgaacttcctatggaatgtctcttctcatgcaagttttggaggaaatttagcatgaggttctacctcgtgttaagaatcctttgagtctttatctctccttaaattcctgtgtttttcctgcagctaaattaaacggtcattcttatatttttcctgtgttttgcaatcctctgttttacacttgtattcctgtcagaatcctatgtttttcctattcctctgttttttcattcctatgattaaaaggggccctgattgtttaatatcgtgaatgggctgttcgtactccttctctctcaaagtaaaagcatttctagaatggaattgccaaatcacgtttgacagaaaaatacagttaaaaatcttgtaaatttctgatcttcaaattcacttcacagcatgtgtcaagcctcctcctcgacatcgacaaactctggcgataggagatggcctgacgagttaaggtttaggttggcgttggggttagggtgagaggggagtaagggggaggaggaagagatggtcgtgagaagcaacaactattgattagcttaattaattagatgatcttcaaaaaaatattggaggggtcctagcctctgcatgttcctctgtttttgccttagcactgctcaagtcgcgagatagatagtgggtgatagatcagcgttgacagcaactcagcaagggtaaaactaatctaccagttaggaggcagggacggtgtggttgcaactggaacacattcccgccctgtcctgaaagccatacggtagtattgtagtactctagtactctctccgtaaaaaaaaaaaacaaaccttatgtttatgtgtcaacgtttaactgtctattttatatgaatttttttataattagtatttttattgttgttagatgataaaatataattaatactttatacgttatttgttttttaaattttttatattattttaattttaaataagaaggacagtcaaacgtcggagtcgtcttttttggaagggtgggagtagatcgtttaaacgtttgaggtttcagctggctggtagctagagagatcgaggacggggactggcagagcaacgagcacagctagcggaggttgagttatggctgggctggacgagcgggccatcgagtcgcaaaagtagcggacgttcgtacggggtggatctgggaggatcttggcactggggcacaagaccttcttggggagccgtgcgtgcgggtcatcaggtcaggtccaccaacgacgccgggccgccttgtccgacgcgaaaagtgggggaatccaccgcgccgcgcggccccccggccgaccacaactggagggaaacggacggccgttgcttggttggtttctgacgcctctgcctctgcttcctgctcgcctgcgcccccgcgtcatgtgcggtcgaaaagcgcggcttgcctgctgcctcgttgtcctcctcgtgcatcccgatgctcacggccgccatggctttcagcgctcggtacactttcgcatgagatggagtcgtggaggcccaggtgtgtacaccgagcaattctacacaaacttcaatcgcgatttctaaaaacctgtgtaacaacatggttaacatggagaattaagcaggggacctttgtctgcttgagttaaggtctttgtactttgctccccgtttcttgccttcaaaaatggcttgctatggctggtgaaattccgggggacaccagccgcatgacaaattgacaataggcagagggacaaacaactcaaaacaagtcgaccattgttctatagctcgtgcatgctctaagagcaggtacaatagcagactattagccggctgtaaatatattttaatgaaataaaagatgagagagaagaacagcgggctacagatctgtagccagctgcagcgcaaactccaagacgcaatgtgcgtatgacaggtgggaccatatattaattacatataaaaagcaattattgtatgaattaactattaaattggctatagataaattagagctagtaatgggctatactattaaacttgctctaatctctatagtcaaatcaaccatttttctatgcagcctgcactttgtagcagtgtgcaatttgcaaatagacaatggcagtactaccactagtactggaatgaatctgcgtgagagtcagtgttcactgcaccctccactcgacagccgtttcaaaacttgcatattcctccagttagcttacatacatgcgcgcgcgtacgtgtggaaccaactcagcctagtacgtttccttaattcttaatccaaccagatcagattaaataatcttctccatgctagctgctcggcgccaaggcggctgtctgtcttgtctttcctccctaatttgattcattgattcttagctccagataattaggatctgtctgtctgccattcgtgtgtggtgctgcacgagtacttgagtggtaattgctactctcgctttccattgcacttgcaaagttactgtgatgaaaaggaagggtttaacccaagtaaattttggttttaatctctggctcatcgagtgctcaaaagctttgcatcagactggcctctcggctcatgaagtgcccggcagggctgcgcgtggcggcccgtccatcgggagggagtgatggggagccacacgtcagcctcagcatacagttccccgggcccacatggcagcgaccggcacagtgacgccggagaagagggcctagtgccacgaatctgcatctggctgcttcctctcacgtgcgtataccagctggtattactcctactacgtactgtactgttgcataggccctgttgagattcaaaattttctcttcaaacttctaacttttacatcacatcaaacttttctacacacaaacttctaacttttccgtcacattattccaatttcttcaaacttttaattttgacgtggaattaaacacagcctaagcttctctctcttttttttcttttgatattcatggctaccgcactcgagtacagagcagtttgttgatggagtccaaagattcggatcttggagggaccctgaagacgacagcttttgcctccgtttcaacatcagattccaagatgcacattggcagagatagatgccggtccaggacgcaacgatcgaatcaaggctcgccacaaacaaaggattccagcaggataagcagtggtccagccccgggggttgatagtggctcttcgccttgttttcctagtgaaattgctcacgtcttcagacaaaaagagtgaaattgctccagaaaatggccgatccattttgaaagtgcaatagtgtcaaaactcaggtctgtgacttgattgcatgagaacagtagtgttagtgaaagcgaaataactaaaatgaatatatgtagagacatgcttatgtgcaactttttaatctcagccactgatgatctttaatttccgtgtaatttttttttcgagcacataagcacatctcgtatctcgtgtatgtattaacttcgaaacccgataaataaatctttatattgtcacttttgtggaatagtatgcgcttactgttgtatggtgatgacatgtaggtttgaggttttcaactacagtggcagtcactctagaaatgtcagtgtcttgtggaaaatgaacatgtctcggaacttctaaaatttttagggttgttcagattgataccgttttcaatcatattattttttagtaaagttgtcaaaaaaatctacgtttaatttgttgctaattttggtaaatacataagaaatcatgctaaaattttagcaatattaccatcttgctaaaattttggtaaaatttattttggctacaatctaaacatgccctttactccctccgtcccaaaaaaagacaaaccctggtttccgtatccaacgtttgaccgtccgtcttatttgaaaaaattatgaaaaaattaaaaagagaagtcacgcataaaacattaatcatgttttatcatctaacaacaatgaaaatacgaattataaaaaaatcatataagacggatagtcaaagttgtacacggaaattcagggtttgtctttttttaggacggagggagtatgtcatatgtgtgttgcttgctggagagaactgataccagcatccactcctttgggacgcaggtgaaaatacgaggcatctctcactgtccctgatcaggacatacacctggatttaaatggttattagatcagatttaacatgcaacatgcacacatattcaaaaataaaactaaaaagacgaaagggcactaaaagcatcctttatgtgggacaggccaattactatcatgctggagatggaaagcaacggattacagttttaactcatagtgtgcctaactttgacatgaatttgcgggtattttatcctacgcgttaacccctagccagtaaaatctgctaagtgctaacgtaatccttgaggacaggatattctgagagttttcaaggaaagtacgatgctaatgtcaccaatacgtggaatattcatagtaaactaaactactattggtagtggaatcctgaagattcacttaataatgctcatggaatgacatcattcgtggaaagaaaccagacatcatcgcgcagtatccttcctttcaggtttggagggattgcagtagctaatttcattttgctgactaaccttgactaaaagagttatttaatttgtaaagcacaattgaagtactgaaagattgcaatttggagtattgaaagttcagagcgcaccagcgaggtctgaattgtaaacacctttttattacccctttttttttttaggaaaagcactagcgaggtgtcacgtctacacttagcgtagcagaagcgttcactgtaattgcgatgaaaagttgacaggccacgttaattctgcttgctccaatcgatcaggaaatgcgctattgtgcatgtcacgtccttagttggatcgaaaaagatgcaagtgcgtcaccgattcgtttggtctgaaactatattttgcttccgaggagattaaaacgaatctgggaagaacatgttcttgtttatgcctcgttccaccggatcagctactattgttcgtccaaaaagaatgcaagtagcagattaattacactccacgcccttaagaattcgatcaaaatcacgcacgtaattactctgcagtttccacggaatccttgtttacactttcctcattgtgacagatacgaatcagggtgctaaaattaaacccgagattacagcggagtatattccgaagaacaggaatcttctgagtttactccagatataagcatttattccttgcctttaaaggcctgatatctcacagaatccattagtttcattttgagagtggaacggctgccatttgtaaacaaccttccacaatatttcgctgtgtactagtactatactactatacacagaaatctaatatgcgtcacaaacaggaaagaactggcagaaaaatatacgcctcccactttccttgcaaaactgtaggatatccaaatgcatcgcgaatcgcagcaaaccgagaaatcccacgggaaactattttaatccctcgagagaatatcccctcgttctttgtatgtcactcaaatggtcatgaaaaaaattgaaaaaaaatgagaatgtgtattaacatgtgatataatactctacaaacatgtaagttcaaattcaactcctatatatcgtaacgaaagaaacaaattaaactgtagctagttaacatatatttagagtcaaatttgtttttttcattgtgagatgtagaagttaatttttttacttgcctgtttgtacagtgatatatcacatgttaatatattttcttaaatttttaaaatttttttcataaccatttaagtgacaggcaagcaacgagaggatatccgtccgagggatcaaaatcctcttccgaaatcccacccaaatttcattcctgctgaaggaactagaagctttataaccgcgataaaaaatacaagcgacagcgatttaggcagtagaatcccccgcgacccgaggagattagtctaattaacaagtgcagattccctagcatctcgtgctgtgtttaactgcgtgagtgcgcatccgcccctgattcccaacttgcgcctgcttgtctggattccacagaatcacgcctcggatcttctgcgccaacgccgccccccttcccaaaagaaagaaaaacaaacaaacaacggcgttggctacagttgggtgtcgcccagcctggctcgaaaacacacacgcgacgcggtcgcggtcacgcacaaaatacacgacccatgcggtgccccctcccggactcgagttctccataacccaacccagcggcggaaacccctcacgtccgacccctataaatacccaccatctgccgcgccatcccatcgcaacgcacgcacaattcacagcaacacaagcagaagcacagtagaacgcctaggaaatactacgtcgatggcgaggtgggccattgcgatccacggcggcgccggggtggacccgaacctgccggagcacaggcaggaggaggcgaagcgcgtgctggcgcggtgcctgcaggtgggcgtggacgcgctgcgctccggcgcggcggcgctggacgtcgtggaggccgtggtgcgggagctggagagcgaccccttcttcaactccgggaggggctccgcgctcacccgcctcggcaccgtcgagatggaggccagcatcatggacggccgcggccgccgctgcggcgccgtctccggcgtctccaccgtcaagaaccccgtctccctcgcccgcctcgtcatggacaagtccccccactcctacctcgccttcgacggcgccgagcagttcgcgcgcgaccaggtaaattatctttcgctaattaacccacacccaactaataaatcccttccaattaattatgctaatttcctggttaatctaacctgcctctgcacgctaattaacaaaacatttttaatgtggaattattctgtggacatggcacgagggaacgacggatattaataccggacagccaaaatctaatggtggtaggaaataattaaaaactgggacatgttcgacacgtgtaaatgacgtccgggaagccatgtacaagtgtgcaacatgaacctccaaacagtaaacagagcagcaacagctctgcattaccaaaaatggctccttgtttccttgcacagttcaatccagcaagattccattccaacacgacaacacatgcatgtgaatcctactacggctttacatgaaaaaaaaaagtaaccttttttctgttagcttatttgtaggatataagtgcaagaaatctttagtttcgtttttttctatatcccttaatcctattgagtcatttgggtgaacatgtcatctaactatgtgagttgcatgcttatctagctttacgtgatttagtgggaaatacaattgatgtgatagaggtttaattcaataggccaacaagttaagcaatcttgcttaacaatttctatgtttttgctgcatgtgcatacaaatacatccacgcatctgaaaatttttctgtgtttttgctcacgagttttaccattttcctttttgtttatgcttgtgcacaccttcacgtgctgtcgccttttcgtccccgggtctttggagaaagctgtggaccaaaaacgagctggtttctagtagtatcaatgaaagcaacagcggcgcaactgcctcctgctgtgcttgaatttccctatcaatcgctagagcggccattagcttgtaggtgtagtaatttcttcgttagtgttggcgaaggtattcatttctttcccttacatcaagtgctgagaaaaaagaaaactaaaaaagtgccacccaacatgcatcaatagccgccatgcaggtttgcacctaccaaatcctttttttttcatttatttggtcgacacgattcgtgttaaaccttcctgcggtattttgtatcgcctagtagtatagtcgttcgagtcctcaagtcaagattgtgtagcacccagccacccacaccaagcaaagcctaggagcactgaaaatgaaatgaccagtccgatgcatgtgccggaaaaaacatttttcttcactaaacaaaagtaaacactagaaccaactactccgtggcactgtagcaactactagcatgtactaggatggattctatgcacagctaggcaggctctccactgtgccagattcggcgctgctcctgtttctttctgcccggtcgaattttggcaggaccagcagctgcaggaggaatccgtcctaccagcgtggtccacccgaatcctgcagatctcacggtgtagtggtggctgcgtagccaagtacaggagtattagtagttaagaaacgtttttaagatagatttgattataatcaaaatggatttggactggtctgattttttttctctgtggtcactgtttgcagggtctagaggtcgtcgacaacagctacttcatcaccgaggacaacgtcggcatgctgaagctcgccaaggaggccaacagcatcttggtccgtcgatcattacatttcattgactcatgtacattacttgaaaattgctgacatctaacggtgattaatttggtacgagcagtttgactaccgtatcccgctgtccgggtcggagacgtgcggcgcacaggccgtgtcgtcggacaacagccacggcaacggcatggtgatgaacggcctccccatcagcatctacgcgccagagacggtggggtgcgcggtggtggactccagcggccacaccgcggcggccacgtccacgggcgggctgatgaataagatgacggggcgcatcggcgactcgccgctgatcgggtcggggacctacgcgtgcggcgcgtgcgcggtgtcgtgcacgggggaaggcgaggccatcatccgctccacgctcgcgcgcgacgtcgccgccgtgatggagtacaggggcgccgggctgcaggaggccgtcgactactgcgtcaagaagcggctcgacgaagggttcgcggggctcatcgccgtgtccagcacgggcgaggtggcgtacgggttcaactgcaccggcatgttcagagggtgcgccaccgaggacggattcatggaggtcggcatctgggagtgaggtgggcagcctttgtgcgtgcgtgcgtgggcctgtggccatcatgcgattgccatagagtggtgtcttggggtcatgggccgcctcccgtgtgttcgtgggctagaattagtgggtattaattagtggattggggagattggaggtgggcttgaataatgacgatgatggcgataattcgtctggaaataataatgtgaaaagttatattgctaccgaggtgtgacatgttttctgttctgtagctatttcctcactgtctctctcaattctgtacatcaaatcgctctaaactggagttagcgtgtgttgcgctagtttaggatatgttcggttaatcctgaaagggaggaaggaattggaggggatttattccacatctattatggtgtggatttatttcccctcagacaccttcaatccccttcaaccccttccgaaccgaagaaggtcttagggagaagtttactgtagagcaaagggtttctttggttggacttcctgctattgattcctggactgtgatcttgtataggctttccaattgctccggcccataattggttgtcgcacatagatataaggcccatctatcttacctgctctgactttcaagctctcatcatttccttattcagcatcagttgccaacatttaaattttttaaaaataaattagagttgatatcaaagttttctcatcaaagtttattttttgacattagaatttaaaccgctaagagcatatatatatatatatatatatactcacaaattattattactttgctaatattatccgtattaggctaaacgatgggggcctcaatctttttctcatctccatttttctggccccactttgcctctggcatctacgcaccatttaaactgtaagttgttcgtggcagtggcaatttctgtgaatgtcccaaccggttcttgcgttagttcaacttttctttttgttatccaaggaataccatatgatcatatgatcgtacctattccgacagttcgactgagcacggcatgcatgttgttagttggatgaaataccaaagggcaagttggtgctcaagtgatgtcatcacttaggtggcgaaaggatttgatgaattgcagacagcacaccttgccagcctcatcctccctctggattagtcacgtacttgttggccgcccgtgtactactccactaaatcccctaatcagtagagcatccgatcagggcagatcagccatcaggccatcaggtgtattggatcacggattctacgactaagccatattactgtagtgtttagtgtagcaatcagaaccgacaaactggtagctatagctttagctaatgcggcgctaaacaaaaaattagtcggaccgaagattccaacacgactctttgcttgtttattgtatatggccacttgaggcagacaacaacaatcgcgtccatgtgcaatgtaactgtgccactccgcagtgagcccgaaacctctccttttcggcgtgcagatgtaatgcgaaatcgcgaatcgatcagccattcagccaagccggccgtcagattcccgtcttccaacggctccgcggccaccagcttgcgctgcgcggctgcggcgatcgcgatcgcccggcgcttctgtgttttgaccccgtgctgcgattcgcgaagcgatgcgtttgttgttgtgttatgtcgtcgcgcccccgcgcgcgcatcggcatcgggccgtggccgccgtcggtccagccagccaccaaccgcccactaagaatatctcgtctactttcttcgtcacataaaaaacgaatataaaacagatataacatattatatatatttagatttataatattaagatacgtcatattcgatacttgattgtttttttaaaggaatggaggcagtactcggctagggtgcgtgtgcgcgcgcgtggcccaccgttttttttttcctcttgagcacactgacgtggtggaccagaagtggtgctatttctcagagggaccggaccacctgcgtccgggcctcctgccattacgtgatgatgtgtaaaggacgaggctttttgagcacacaggggaggaaaaaacctcggcaaagtaggcggcgctgggtgcagatcttttccgttttgttggtaggagaagaatttgccttgcacggtttgcgcctcgctcgttcagcatagtagcataccacctaccgcagcaatggacgtaccaacaagcgtacgagtgttgctcaccagagctactactaccggtctgtcacgctcaccctagtataaggatcaatgagacttttcatcctcccaggagacttttccccttgccaatgtagcagcagctcagcaaatttgatcgtgtttgtgtgtatgtccaatctatcactgctaagccaaaatattacaatactacactactatgcagtaccctttttttgttacgaaatataataatttataattagatgaaacgtactttggtaccatgaaactagatagatcatctgttttgttatagtactacgatgatttgcaataccaactaggcagttttaaatttgccattttgctagtacttgaccagccaagcgagtgaccccaaatcggcctcctcaatcaaggttaggtaggtgccaatcaatttgatctctcacctcactctcgtgggctcaccacctcacctcgctataagtaaaagcgccgcacgcaacccaccaaagcccacccacatcgccgcctcctcctccttcctcggtttcccccaaaaaccccaaacccctcctcctcgccatggcggcgccgtcccagaccaccgccaccaccacccaccaccgcgtcctcctcccgtcccaccaccaccaccgagcggtgcctccctcgctcctccgcctcccgctccgcgccgcgcgccggggccgcctctccgccgccgccgcggccgcggcgcccgccgcgtcgaccgcggcgccgtcggagcccgccgcgggtgccgtaccggggaagccgacggtgctcgtggccgagaagctcggcgccgcggggctcgagctgctccgggggttcgccaacgtggactgctcctacggcctctcccccgaggagctccgcgccaagatcccgctctgcgacgcgctcatcgtgcggtcggggaccaaggtggggcgcgacgtgttcgaggcatccgggggaaggctccgcgtcgtggggcgcgccggggtcgggatcgacaacgtcgatctcgccgccgccaccgagcacgggtgcctcgtcgtcaacgcacccacggcgaacaccgtcgccgcggccgagcacggcatcgcgctgctcaccgctatgtccaggaacatcgcccaggccgacgcgtcgctcaaggctggtgagtgcgcacaccctcctcaagtctggaaaagacacctctttaaaaaatgatactgtacttgtctcgatctctgtttaaagcattaaaaaaatcttgcatcaacgtggcacctgtaacagtggatcgtgctagaacgtctgtttgatgaattgctagcaaatcgagaaacacgaatgggtgctttttcactagaagcagtcctcagagattactttcgttacttcattcaatttgacataatcagaaaaagttaatatctgcttcagttgacaaagctagatgcatgaagatgtgaaaatgtggagtaagggtagtcttagatgaagcatctgccatgcaatcttcgaatggcatcttcggaagaagggcaacataccttttcaattatgatgagttcccatgttcttaacaatgtgtcttgtataggtaaatggcagcgcaacaagtatgtgggtgtatctctcgttggtaaaactattgcaattcttggatttggaaaggttgggtcagaagtcgctcgtcgtgctaaaggtttgggaatgcatgtgattgcacacgatccgtatgcttctgctgatcgtgcccatgcaattggagttgagctagtgagcatggaagacgctttgacaactgctgactttatctcgttgcatatgcctcttacccctgcaacaaacaagatgctcaatgatgaaactttcgctaagatgaagaagggtgttagaattataaatgttgcgcgtggtggtgtaattgatgaagatgctctagtcagggctcttgattcaggaatagttgcacaggtatgtttgattctcttagtctacatccttttttcatttcatgctgacatccggtgaattatttttgaacagcttgtttcccagagtcatgctaatttttttgtttatccctctgctttaggctgctcttgatgtgttcactaaagagccaccggcaccagacagcaaattagtgctgcatgagaatgttactgtaacaccacaccttggtgccagcacagttgaagcacaggtatgcgaattagctcagaatgctatccctttgtgttctgttatactagataccaaaatgataaatatctgaaaatcccaggaaggagtggctattgaaatagctgaagctgttattggagctctgaaaggggaacttgcagcttcagcagtcaacgcaccaatggttcctgctgaggtatgaatctattgttttctgctaaatccaacttattccacatggcatttgatttttatcttacatccttgtgatttgttcaggtgctgtcagagcttgcaccttatgttgtgctcgcagagaagcttgggcgcctggctgtgcagctagtggctggtggcggtggtatcaagtccgtgaaagtgacctatgcttctgcaagggctcctgatgatcttgacacgagacttcttcgtgcaatgatcaccaaggggttgatcgaaccaatctccagtgttttcgtcaatctggtcaatgctgacttcactgcgaaacagaggggagttcgtatcactgaggagagaatcttgttggatggctcacccgagacacctattgactacatccaagttcatattgcccatgttgagtccaaatttcccagtgcaatatcggagagtggagagatcactgttgaggggaaggtgaaggatggcatcccccatctgacaaaggttggatcattccaggttgatgtgagcttggaaggaagcctgatcctttgcaggcaggtcgatcaacctggtatgatcggcgcagtaggaagtgtccttggtgaggagaatgttaatgtcagtttcatgagtgttggaagaatcgctcctcgcaagcatgccgtcatggcgattggtgttgatgaggaacctaaaaagagcacactgacaaagattggggagattccggcgattgaagaattcgttttcctcaagctctagattcatgcgttgtatgtttgaagctgcaaacatggtgtgcaattttgatgtagctagctatttaatcaggatctagaggactgatggttctcgttggaataagccttttttgggttatggtgctgtttgtcgagtttgatgcagtgtcttgattaatctggcttaggtttgaacatggtgcttattaataagaagccctctgttaatctatgtttactgtgttctatgtgatatattttttgcttgccatttctgcttttaggctttgtgaccggataatctgttgatagttttaagtaagcctagcttatagcctgctt

SEQ ID NO: 5556 - DNA, 1897 bp, Oryza sativa
catgacaaggcatttcgaaagccgacacaggtttaccatatgccgacgagaggggtcccagaccaacaacaggttaggtcccagaccatactgtgccaggaagcccaggggtcctccccgacaccaccccggcgaatccacatgtctctcggcatcaaggctcccctgataagctagttactcagccaggggtgtcccattccacccatgtggtcgtacttgtcttatgtttggatgaaattccaaggaaatctgtccttaagtgcgagagcgggaaaccgtacacccgttacgttccccggtccgcggttttggaaattcatttagttcgcaagcaccgacccaggtgtcgggttttccaagtcttttgtaaaactccagttttacccaagttgttactcagattttaagtttaaaggcgaccgtcgatactcgcacagagtgcacgaatatcgagccgcaactgggtggttacaaggggacatggtataacaattaacaatggaaggatcaaatgtaacaaattaggtaggtctgccaatctgccttgcagacgggacaacagattaagtgtgatcctatcaatgcataatatttcgcaatcaatataattaaatttcaaatatagggtcaagatgttcaaaggtggcttgccttgctcgagatccggagcttgatcctcgaaatcctcgcactgcgggtcttcgggctccgaaactacacgcgaaacgggacaactcaacaaacggcgaaaataaagccctattaatgacctctaagcgtgccattagatagatctcgagatttgaggaattttggaagttgaacggagtcaatcgaatttacggttgggaagatattgaatttctaagattattggatttttggtctaaaggaaaaaggatttatttaaatcctttttttggaaaagaaaaagaaaagaagggagggagggaatatagacttttctcgggtggctagggtgcggcccaagagatttggggcggctcggccgagcttaacggaccggccggcccaagacggcccaagcgcgcgcgcgcgcgggagggaggagagagagggagccggtggaccgggctcaccacgcgtggtcccgggtgggacccgcttgtcagcggctcggctcaccgtgcggagggagtatgcggcgtacgcgcgcgggcggggctgggacgcagtgcacgcgcgcggttcgcggaggaacggatgcggcgggcccacgcgcagcctcacggctcaccgcggaccacacgcacggggagaaacggagggagcggctggccgggtcggcttatccggtcgcggccgaggtggcgccgacgtggcgcctacgtggcagccacgcgggccggcgggaggtagacgacgaaccggccgcgaatggacggcgggcgacagcggcgagcggcgtagcgagccacggcgataccggcgaaagcgagcacaccgggtggctgcacaggacgaggggagacgagccaacggctcggattcgctggaggttgctcgacggcggcggattacggcggcggcaaccggcggcgagggaagagggaaacggcgacgaggccacgaggggccgattcccggcggtgagagcatctacgcggcttcgggaactcgacgctagcgtcggattgggcggaactacgccgagcgaggccggcgacgagcgggtgctacggagctcgggcggcgatggcggcgagcacacggcgagcgatggcaacggtcggggcggcgccagctaactacggggaggctactcgagctactaccgaaatctaaggggaggagatggagcgaggaggaagaacggagggagacactaccgtgcgggacgaggcgatgtgacgagaggccgacggcgcgggag

SEQ ID NO: 5557 - DNA, 11052 bp, Oryza sativa
agagagagagagagggcgcccgggagagagagggggggccggggaagagatgggccgagcggaattcggcccatcgaacccgggggaggcaaactagacttttgcggagggattcgatttggaaggaattggattcggaattgatctcgacgatcgatcgcggattgagatcttgagatggcacggacactagacaacaagcaaagaaacaaatttcgcaattagggtttttaagagataattttcccgctaggcgccacgacggaacgggcgctacaccagacgtggccattctgcacgggctgggtgatccgggttagtaatgttgagtaggtaaagtgtaccccctctgcagaggttattaaactgttcgaacaactgtgcccacggtcatgggcggatgtgaggtgattcctagcgtagttttgtttgactactgcttgtgaaattgctgttgtggaatgggttcgatgtttggaaaaatctgcggtggatgggatcagccaggcccgggtggccgtttgaaaagctgttggccgggagccaaccttgatctaatcaaagactgatacattgtgtcgacgtttgatgtcgcaattctggtatttgcatggtatggggatcgtcggtgctaaggtatacgtgagactaaggtaaaagagatggagacagggatttttatacaggttcggcccctgagttgtcaggtaatcaccctacatcctgttggccgaagccggtattgctcttattcaccataatcacatcagtacaatatttggggtagccaatctaactgttgtcgacatggcggtctgacgatctgactcgtagtcgacaacagggtagccttcctcctcgaatccgtgcccggcgagatcagagatagcgctttcgtttctcctgacactatccggagacaccgtagggtattagccgtgcttatccctgaagtcgatatccggcggcgtgtcttggcgtatgtaggcttctatgttgattgtgttgggtgttgatcctgtcgggtgttgatcccgttgggtgttgattgtcttttccccgctctcctcctaggggggcctgtatttatacccataggtgtccccttgtccaagtagaactagggaaaccaatatggatacaatccgagtagtccttgtcgtttccatgtagaactctggttgtctttccttatccggaactccctcgaggtcagtttccgtataagacatggtatgtagtggatcctgccgagatttagtcaactactattaggtatgtcgtatccataacactaacagtagcccccgacttcgatgcaaatgaacgagttcatattctcaaccgcagactttggaggaactgttatcgagctcacatgaccgttctcggtgagtttagagataacgttagacttcctttatcagcctcgtgcgggcaccgaaagggtttgtctaaatcaatctccgatgtcgaccgagaaagtacagagcgtacgactaagtctcccgtcttgctgtaatcgagaatttggattgaagttaagaaattttatctcggcggtacaccatctcttcattccgtattccttgtcgagatccagcaaccgttctcgagtgatcgagaaggcgtagagtctgcgacggaaccttgtcgacatttgtcgtactcgccttagtcgatcttggtgtagaaccatagagacatggagtcttcgataatgtcgaatagaattttcctgaaatcaatactcagaaaagaatattagatagaaatagcccccgagcgaatgctcaaagggtgacatgttataatatgacagactagtgaattgaatgtacagaccagtgctttgtatatgagcgtcttctttcttaccgactccgatcagtcagtttgtagagtcatacactctccctagcccccagccttgtcgtcggagaattgttctcggatgacaaggctcttggacctttgacctgcctcggttgaacaagcactgatcctagcccccagtcatgaagttggaaaattcaatttccgattacacggcttggttaatacgcacggcgagaactcttacacgaccagatcttacatggtctttcgtctctgaaggatccgacaaggccttatcagctctgggcatccccagccgaagttccctcaggttcctcggaggccttgtcaagacggagtaaagggacagtaggataggtttcaacgctaggtgtcatctgggtaagggatctctgggtaaaacacttagcgatcttgtgcacctgatatcaactttgttgaagcaggggtaatgggagaatcactacatcgctggtcgaggaccaggcagtagtcgtaactcgaccacttaaagtggaagtagtgggagaaacgctacatcgctggtcgaggaccaggcagtagtcgtaactcgaccacttgaagtggaaatagtaggaaaattgttacaccgctggtcaagaacctggtgtagtctaaactcgaccactagaagtaattgtacgagagatcgctacgattgactggttgagaaccagtgagtaggtgtctcttgatcatttgaagtcgtggtgcgaggaccgctgcgttattactgtagtcgtacctcgaccatctgaggttgcggtacgagagattgctacgtactggttcgaggaccagcgaacgagtagaattatctctcgaacaccaacggaagctgcagtgcgagagattgctacgtactggttcgaggaccagcgagcgtgtagaattatttctcgaacaccaatggaggtgctagagttggtttattacatgtgcgtctcatgtggctagcatgactcacacacccaacttgtagcatatccggatgtccattcgcaatcatgtcgggtgatcaagccgacggcgttcgtgaggaattatccgttaacaaccttttctcgagtagtccagccatggccggtgctatgagataggtcgtcggtcttcgttggtaggtcggttgcgataactccgcatttgtcgagaatgttctcgataatagagtgtactcgaccacaacctactcgagtgctcaattgttcctgaaaaatattttctagaagacaagacatatagcagataatatcgagtatgtactcaaaaaactgcatggatcttctagtattattatgacataacgagtagatgtaaatgtcagggcattatgtgaaccgtaaataagcatgatttatacagaagaagacagcgagcccccagcgttagatcgtagtcgatttaacatcggggacacccgcgcaacagatattattgtataaagaacatgctctaggtaaacataataaattatagatctgacaatactgtatgatctgaataggtacgataaattgcagataaaatattgcgtacctttgtagatacatgccagatgtatttacgaaattagtagattgatttaaaaaaccaatctaccaattaccttgttgcgtactcgttcgatatcatgcgatctgacatcttttggtacgccgcaaagcttgaggcttggatgatctaaatagaccaagttgtcaatgacgatgatggttccgatctggttaggttggatctccccctcagctgaagtcgtcgagtagctcattgtcggagaatccatcttttgaacccatctcgtcgaaatcctgaagcaccaaaatccccctacctggcgcgccactgtcgacgtttgatgtcgcaattctggtatttgcatggtatggggatcgtcggtgctagggtatacgcgagactgaggtaaaagagatggagacagggatttttatacaggttcgggcccccgagttgtggggtaataaccctacatcctgttggccaaagccggtattgctcttattcaccataatcacaccagtacaatatttggggtagctaatctaactgttgtcgacatggcggtctgacgatctgactcgtagttgacaacagggtagccttcctcctcgaatccgtgcccggcgagatcagagatagcgctttcgtttctcctgacagtatccgaagacaccgtagggtattagccgtacttatccctgaagtcgatatccggcggcgtgtcttggcgtatgtaggcttctatgttgattgtgttgggtgttgatcctatcgggtgttgatcccgttgggtgttgattgtcttgtcccccctctcctcctagggggccctgtatttatacccataggtgtccccttgtccaagtagaactagggaaaccaatatggatacaatcctagtagtccttgtcgtttccatgtagaactctggttgtctttccttatccggaactccctcgaggtcagtttctgtataagacatggtatgtagtggatcctgccgagatttagtcaactactattaggtatgtggtatccataaccctgacacattgcacatactccgaccggacgagacgcactgtctcatccgtgtcgtttgagaagcactcatctagttatttcaaaaatgagtttaattaaaatcaatcgcaaaaacaatagcccttcctttgaagcatgcatttaaacacttaattcccatgacttgctgagtactcttgtactcacccttgctctatataaataatctccccccagttgctgaagaagatgaagtggatgtcacgaccggaattaacccaacgggcgttccttacgtgcgtgtattattccttgtcccaggaggcaaggtacaccgaaagttgatatatttcagagtttatcaagcggaagcgtaaatagttaatttattacatgggcggcgaaggcccagcacacacaaagacaaacgggaaacagcggaagactagggcgacgaccacaggcgcttgacggcaggcacgagctagacaccaaagccttcatcttccaggggctcctcttctgggtttgggaaaaaaattgagcaagactgagtacaaccaacgtactcaacaagacacacccacaagtgcaggataaatgcaagggagtaaagggggttataatataaagggttagggtttgcagtaaacagcattaaaagacacttagttgctcaaagctattttgtaaacacgattccagagctatacaatattattaatcaaggccgtgaacccacacgaacctgccttaacccaaggcctacgatgattcagaccgaactggcaacccgaccctgggtcccagctcgtcccaagccaacccaggccaaccattccacattttagttgttaagcaggttttaagaattaaaacactaacttgggtacattgctcggcttgcccataacggagggcgcggctattcgaatagattatactctgatcagaggtgtacatctttacccacaagacacatcttcctcacgtgtaaccacgtgccacataccaccacggtatacggacggaagacgtgacatagtttccaacccatcctagccatagacaagagtaccgacccaaccccacctacggccggaacccctgggacaggtaggcaggactgagcccctagcagcaggacaccggccctgtgccatgacatctcgactaccgggccgcagctcgtgtagccttcatttgtcctagagatgtccatcgacccccaacttcgtccatctccatccgtgtacttttgtttataaccagactgagccacaaactaagccttactgtcacgccccgaactagtcccgaccggaactagcccgtgacgctccaatttagcctgttaatcgataccagtcccaggaaacagtgctggtatcacagggagacagaatatcacagcaacagaggtctctttattatagagtagaagtacagtcatgttgggctgcggacagatcccgagctcacaactgcattacaaaagggaaacggaagccaggacttggaccaaacatcacaggcgcgacttgggaactaggccgaaaccctaaaactcatcgtagccggcttgctcctggaagaactcctcatcagcaggatccgcttcatcttcttcagcaactggggggggatatttatatagagcaagagtgagtacgggggtactcagcaagccaggggaaataagtgtttaatgcaggcttcaagggaaggctgttgtttttgcaattgattttatttgaactcttttctgaaaacaactaagtgagtgcttctcaaacgacacggatgagacagtgcgtctcgtccggtcggagtatgtgcaatgtgtcaatctttaggattgcaacaaagttggcacccggccaacagctttttaaacggccacccgggccaacaacttttcaaacggccacccgggccaacaacttttcaaacggccactcgggcctagctgatcccatcagctgcagatttttcaaacatcgaaccccttttcacaacagcaatttcacaagcagtagacaaacaaaactacgctaggaatcacctcagatccgcccatgtccgtgggcacggctgttcgaacagtttgttaacctctgcagagggggtacactttacccacacgacattactaacccgggtcacccagcccgtggggatcagccacgtcgggagacctccaagctttcatgacaaggcatttcgaaagccgacacaggtttaccatatgccgacgagaggggtcccagaccaacaacaggttaggtcccagaccatactgtgccaggaagcccaggggtcctccccgacaccaccccggcgaatccacatgtctctcggcatcaaagctcccccgattagcaatttactcagccaggggcgtcccattccacccatgtggtcgtacttgtcttatgttcggatgaaattccaaggaaacggtccttaagtgcaagagcgggaaaccgtacacccggtaggatccccggtccgcggttttggaaattcatttggttcggaggcaccgacccaggtgtcgggttttccaagtcttttgtaaaactccagttttacccaagttgttactcagattttaaggttgaaggcgaccgtcgatacttgcacagagtgcacgagtatcgaggcgcaactgggtggttacaaggggacatggtatagcaattaacaaaggaaggatcaaatgcgacaaattaggtaggtccgccaatctgccttgtagacgggacaaacagattaagtgcgatcctatcaatgcataatattttgcaagcaacataattaaatttcaaatataggctcaagatgttcaaaggtggcttgccttgctcgagatctggagcttgatcctcgaaatcctcgcactgcgggtcttcgggctctgaaactatacgcgaaatggaacaactcaacaaacggcgaaaataaagccctattaatgacctctaagcgtgccattagatagatctcgagatttggggaattttggaagttgaacggagtcaaacggatttacggttgggaagatattgaatttctaagattattgaatttttgatctaaaggaaaaggatttaaataaatcctttctggaaaagaaaaagaaaagaagggagggagggaatatagacttttctcggatggctagggcgcggcccaagagaaatggagcggtccggccgagctaaatgggccggccggcccaaggcagcccaaactcgcgcgcgcgcgggaggagggagagagagagccggtggaccgggctcaccatgcgcagtcccgggtgggacccgcttgtcagtggctcggctcaccgtgcggagggagtacgcggctcatgcgcgcgggcgggggagggacgcggtgcacgcgcgcggttcgcggtggacgcggatgcatcgggcccacgcacagcctcacggctcgcggtggaacgcgcgcacggggagggactgaccggggtcggctcgacccggtctaggctgagctggcgccgacgtggcgcctacgtggctgccacgcgggccggcgggaggtagacgacgacccggccgcgaatggacggcgggcggcggcggcgagcggcggaacgaaccacggcgatacgagcaaaagctagcacaccgggcggttgctcgtgatgaggggagacgagccatcggctcggatttgccggaggaagcttgacggcggcgaatcgcggcggcgacaaccggcggggagggaagagggaaacggcgacgaggtcacgagaggtcgattcccggcagtgagagcatctacgcggcttcgggaactcgacgctagcgtcggattgggcggaactacgccgagcgaggccggcgacgagtgggtgctacggagctcgggcggcgacggcggcgagcacacggcgagcgacggcaacggtcggggcggcgccggctaactacggggagtctactcaagctactaccgaaagctagggggaggagatggagcgaggaggaagaacggagagagacactaccgtgcgggacggggcgcagtgacgagaggccgacggcgcgggagtgatctctccggcctcgggccgaggaagaggaagaagagggcgcgcccggagtccccttccgcgtccacgaacgcaccggctctcccggcgcttggcgatggacggcggaggcgaggcagagcacgggagcggcgacaacggtgaggaggcgaatgggagaggaaaggaagggagggggaagacgggtttaaaagggcggcaatgtcggtttgagagaggggaaccgacatgggcggtcaagccggcgagctggcgctccggctagcgtccaaagcggcgacaggaggtgacgccggcgagaggggaaaaaggggagaaaaagaggaaaaggagggacagaaagggggctcgcccctttgccgattcgggaaaaggaggagggagcggggcgactcggcagagggagaggggctctctgcctccgccccttggaggctagcgcgcggagtggcgggggccgggcgatgacgacggcgatgacgacggggcggtttggagcggcgcgacgacacgggcgacaggcgcgggctggcgcggcagagggtgacggcggcggcgaccgggcggttggccactcggcacgcgcgcgcgggaaacaacgggcggcgcggctgggcagcgggaccgggcgacgcggacggcgcagacgacgcggctcgggcgggaaaccacgcgggcgcgcgcgcgagcgacggtgcgcggggccggctttgcgagcggggagctcgcgcgagaggagggggcgctcggcgcggctctcgcacgcgcgagcagcgagcggggggggaaaacgcgccggggaaagcgagagagagagagagagagagagagagagggagcgcccgggagagagggggccggggaagagatgggccgagcggaattcggcccatcgaacccgggggaggcaaactagacttttcggaattgaactcgacgatagatcggggattgagatcttgagatggcacggacactagacaacaatcaaagaaacaaattttgcaattagggtttttcggagataattttcccgctaggcgccacgacggaacgggcgctacacttacccactagacatgtggaagtacggtagtgctttgcaacagaggcccgaagaccggtccttatatggccgaggtgctactatcaaaaccatgcaccccgagcccagcctaaaaccattttgaggattttgaatagagggggaggtgtgaatccaattccacaataatccatccattcaaaagtgtccaggtgatgagaatattcctaaagtctagagttgtaaaaccacctaatgttgcctaatgaaccagcgaagcatttacctaaaatcatactagtggtaccatgagtagagtgtccactagttggggttttgtttattctaggggaacaaggaaataataacaataacaataataaggtcataacaaaggtaaataggcatggctagataaaacagtgataacgcgggaatttaaataaagcgataatgcaataatttaaatcaacataattttataaactgggattcaatatgttcaaggatgatgtgacttgccttgctcgctttcccaaacgtcagcttcaacttccacgaagagcggatcttccgaagctacggcgtctacacgaccaacggaaaagaaaaggcttttactctaataaactccatataacaagctggaacaaagcacaaaaataggttcttgacttcttaaggaaaaattagagacttgaacggtccaattccgagttcaaatggccaagttatggtcatttgaagtttatatgctctttaaatgaatatttgcgaatttcttcatttaaattttaattttaaaagggcttattgcgtcagccgaggggagggggcgcgcggaccgggtccacgggagtggggcccacgcggcagcctcacggtccacggtggaccgggtgcacctgggctcacaccgaccggcgccatgggtcccacgcgtcagccgcacccgagggcgcgggcggctgacggccgggccccacgcggcagccactcggcgcgcccgagggcggccaagccggcgtagccggcgggaggcggcgcccgcgcccctatggtcgccggcggcggccataggcacggcggagcggcggccgagagaggggaagggaaggggaaaaagaagcggcggtccacggctcaccctaggtcgacagcgacgacgaaaaaggcagccggagcggaggaaggcggcggcgcggctcgggtcgacggggtcgacggcgttccggcggtcggcgagcgaaacggaggggtggacgaggtcggcgaggatgcggcgaagccgaaggaggcggcgccgaggtgggaggtggtccggggcgacgacggcggcggaccggagctcgacggcgacggcggagagagagcgacggcgcgagctcgattccggcgaggaggaagggcggcgagaggcggaaacggacggaggaggtgcggggagggtttaaatagagttggaaaggggagagagcggccggcggggaag

SEQ ID NO: 5558 - DNA, 13688 bp, Oryza sativa
cctcctccctctagtcttgatcgggacgggcccgacccccaagcgcggaggggataaccgccactccaccccgggcgccatcccctcggggaagtgccatgtgggtctaggggcagcctccttcctccaaactcggtaccctaagctgggagggggcggcagccactccacccgagcgccacccttctcaagagacgccacgtgagttggggggggggcggcctcctccctctaaacatgatacccctaggcccatatcaccgatagacatatacccaacatattgtcatgaaacaaactcagggcccctttgaatcacagggttgagaaaatgcaggaataggaaaaatgtaggattttaataggaatgaaagtgtaaaacaaaggattgcaaaacgcaggaaaaacacatgaatgatcgtttgattgaaccgcaggaaaaacgtagaaattggatgagagagatagactcagaggaaagttaccaagaggttgaagttcttgctaaatttcctccaaaatctctataggattgtccattccataggaatttcaaaggattggataggatttaatcctttgtttcaaagggctttataggaaattttcttataggattaaaatcctacaaaattcctatgtttttcctccaaatcaaaggggccctcaatggttctaaatatgaattctcaaaaaaaaatattttgctgcattgcttggaccacttatcgtaaggtttatttcataagatatttaatatattcctataatcgaatagataatatgtgacatgtgaataatctgtttcaaactctaccttaaatctacgtaaaactagaatatgaccatctagatgcttggtccatttatttccactatgttcactttagagattaaaaaaatatcacattaataaaagaaataaaaaaaatttcatcactcgatcgtggcgggttaagatgataaagccataaaggcgatgataaagccataaaggctcatatatattgatcgatatggtcgtatataaaatatatttatatcgaaatggaaacaaatatatttatctattcaattccacttttgaatataaaatctagctcgtgtataatcatggaaaatggtttgctagttacacaaatgcatgacggatggacgatgcatttaaatatcttgttttaaaaggcagagagaaaaagatgcgtaccgtcataattaatcaaagcttaaaatatatcgtattgtctgtttaggcgaccctactcgtacgtacggccggattcgttaagtcaactatcaaagcgatggttgtgcttgtttgctggtcctctccgtcgaccaagttgtatgtttgcacaatttatatacgaatgatcttaccctcctgagaagtcaccggaatacatcctagctagtatataaattttggtacgtacaaaaatctctctttggttatatgagaacatatcctatgcacgtaaaccatcatgaatacaccatgtacaccaactataaatatcataaaaaatctagaaaaaattgttccaagtggcttgcgcggtcggcgccggcagcagctggaggcggcgtccacagcttcggcatgcacgggcgatgggccggacagcgaccgtggacgggaggaggactggccgtggtgggtgacggcggcgaggtgaggatggcgacgacgaggtggctgggcgttcagcagcagcggttgcggtggtggtgaccgtgactgcgatcactggaggtatgacggcctcggacggctagccgagggcttggcagacggctgcatctggccggcgcggcatcgtttggaggaggggttggagaccggcttggcgcaaaaaggcgtagccgatggcagcggaggccggcttggcgcgagaggcgcgagcggtggagatgaaggtcggcttggcgcgagaggcgcggccaatggagggaggctggattggtgcaagagacgcgtccggtggaggaggccggcttggcgcgagagatgtggccggcggtggaggaggcgacctcggtgcgaggaggagctgccggtgggtgtggcgtggtctttggcgcatgaaggctggccggcggggggcgccggtgcaggggtcccagatgtcggcagagcttgagtggtggtggagcatcggtgcgtcagcgtagattcgcaggtggtgagcggcgggtgaaaacccagtccggccttggccggaccgacaacgatgattcattcaccctcctgagggtgttgtcgtgctgtctcacacctcaagggtggttgccgggtgaaagcctagtcttggctcatttgagccccgacggacggcggcggcggtttttccgtcgcttctcttcttgaaaacgtcattttggcataccctaagggacgatctcgtctgtgttcctttgttggtctagtggcggtcggtcacgcttaacggtggccggtcctgtgctagccttctcctagacttgtgtgttggcgttatcggtgtgtggggtggtggcatattttttcctttttcctggttatgacccttcagggttgtaatcttgtagtttttttttctctatcgatagaacttcgtatcgtcttgtgcaagtcgttaaaaaaaataaaaagacaaaatttcaatagacttgtagtcttaaatctgtcagaatttttgtttttttacgactaaaatgtaatgaatttcaggttaagatgttataagtaagtgtaatactattgattgattgtttttggatttttttatgatatttgttagttgatgtgcacggaatgtacacgtaattaataaatataaagttgtacttgttatactgttgtaattttagcttttcttacatgaaatgatttatgaaattcaaaattaatacaaataaaattgtactcagtttgtaccaaattacagtttttcataatttaataattctaaaactcaaacgtaaaaataagcatggagttgtagccatcttggtgttttgatttattactattttaatttattagttcttataaaattcaattaataattctcaagtcataattgacatggacccataaataacaaatatatatagttacaacttaaattccttcttgatatattaattccgaaatccaaagttcataaatacagttgtacttggcctgtcatctcagttgttttacctaataatttgaaaatcgtaatgaatagacatgaaattttaaatattttggactttcaggttagcatcatattgatttaatttacaattagacatcaatatttgggaagatctaactaatgtaaactcaagtaaacaacaataatttagtcccagtgcacttagatgaatagctaaatttattcactgttctttttattaatgtgagattcttttaaagtccaactaatatataatatttccgttccaaaatattgcaatctaaccaaacgagatatatagtccgaggaatccagatagatctctatcttgattcgtgatattaggattggtttttcagattcgtagtattatgatatgtctactccggttttatgttgtactacctccatatcaaaattaatggtcgttttgattttttttaatgtttgattattcgttttatttgaaacattcgtacaaattaaaaaaatcatacttaagatacttttgataataaaacaagtcacaaataaaataaataataattccataatttttttaaaaagacgaatgatcaaactttacaaataaaaacttaaatcgacaagtattttaggtattttaggacggaggtaataatattttgggatgcatggagtatatagattagatagatcaattttcgttgacacgttttcttactactggagtaaaatactccatagtagtaggtagtactagagtaaaatatagccttcactgaattatggaatggcagtgcaggcaaagcttaattaagcagccgttgacttcaatgtgtggtgagcatcaagtagccaattagccaaattggtactgaacgtgctgccatgcatgcatatatactgtactctgtgttcatgaggcgatgaggattctaatttcttcccctcatatgcttctttttttttcctgtcaaatttaacgtaaatggtggagaaaatttcacaatatagagcataaatttagattgaatagtaccgatatgtttatacattgaatttgttttttaaaatatttcttgatatgttaaactgagtttacatttgattttctatactatttataaaaatttgagtaaattttacaaacaacatatattttgatcaaactatcacacaaaactacagatttaaggtgttctatcacaaaactacatatttaacaaaaaaaaaacttgtcataaaactacatatgaaaagccaagtatcatataattagagattctagagttcaaatccctaacactatctttatgttggagctatataaatggtgtagttttgtgattagattggtgctaaacctatagctgtgtgataaatttgctacctaatctttattttttacactccatcttaattttatttgacactatcttaaatatttagttttgtgagaaatttcatgctaaatctgtagttttgtgatctgacactttaaatttgtagatttgtgatagtttgctcgaaatatttatggttctgtgaaatttattataaaattttgagggactaaaagagtttccgattatcttgggtatatagtttatgaaaattgttgtcgtacgacatccaacgtaacttgccacccatataaggtgaaatattgcaagactacaaatttagtaacaaaattatcacaaaactatatgttttatatcaactttatcacaaaacttggatattaaaccccaacatgtttagttttgtgataattttattattatatatgtagttttgagatatttagccttaaacatgtagttttgtgataagtttattgttaaatcagtagttttacgatacaacaccttaaatctatagttttacaataatttgactaaagtacctatagttttgtaaaatttaaatatttataaacacaaacacatatatatatatactatctctccgttataaattgtcactacctaatgaatctgtctagattggtagtcctaagaagtatcccatcctatacaggaataatggaacttttatgaattcatgcatgtgcctgtgcttgtgcatgtgttgccggtcaaatgtcaaaactattgtgtcttactgatgccggtcaaaaagtcaatagtcaagaccactagtatatataccgtgtttagttttcattgtttctactcgtactccattaagcaccatggacgacgcagacaaagctagatgtatgtacctttcagtacctcgtctccatattttggaaacgaaactacgaaaggaaaatatttgtcttcccaatggatgacgaaacaggagctttccgtgcaatttcattgatcgagaagaaaatgtcgtgtatattacggtgatatcatttatgcactcctagcaaaaaaaatagatcaattatgcgctagatgacatgcgtccacaaacacaattaatatagttgcttttatgcaatattctaatgacagttaaggatgcatgtatctgaacaaattatacgtcatctcaatactgtgtattttatgccagtactatcttaattatttcaggcacacaaagttgaattttacttgttattaataaacctccaactctgatcctttctacggtcagataccgtaggtgatacgtgagatcgagctacttaataattatgtagtatgataattaacataccgtatactgaacgggtacgatattttttgaataaacactacttgatcgatcgagacacaataatacgagatatatatagaagtgtgtcaaagttgtcctatgaacttcaaaaactgtagaaaattaaaactcgcagaacggaatatatattcagatatgtttgtatgcatgtgctaccaaagttttaatttttaattttctcctgtatcgtccagttataatatcccctgtgttctacgcaagggggcttactaaaatgcgcatctttttttgtcgtaaccagtttatctttgagagcggacacgaaatcgattgtttcggtgtctatcattgtcaatgaatatgataatcaactactgaccatgcatgcaaactgatagattaatcagcacgttttggagcaagttgaaagtgagttaattaattactgaggctgcttgaatttgtccattgctgcatcatatcgcacgccagctttgctccaattcgtggagactgagagctagcttgtcatcattatcttgctctcgcagcggagatcgaccagtttatctagctagttacttgggcggcttggagaaggtcacgtgacacattcacgtaatcacgttgtgctagcttggctaaaggagcattatctgaagctgtacgaggctagtagaaaaggcaacatgaaattacattcctatttacgcactccgtctaaaaatataacagtatttaaaatgtcatgttaaccaatattacagatcatccctatttaatttctcatcttgccttaatccctagtatatataaaagaaatctaaaagtagctactatatccgcctctaagatatactctcttcatttcaaaccatttcaggttataaaatgttttggttttgataaagtcaaactactttaaatttgactaagtttattgacaaatgtagtaatatttacattaccaaactagttttatgttaataattaaatatatttttagaataaatttatcttgggtcgaaaatattactattttttttgtcaaacttaaagaaatttgactttgaccaaagtcaaaacatcttataacctgaaagggggagtatccttttaagttatgagtctgttaatagatatctatccgagataccgcatccgttccatcataattgtatttttaggattcaaatttgtcccaaaataattatcataatagagtagtaactatttcattaatcacttttgatttgaatttctctgtaacgctccgtttttcgtgagacgttaaaaactaattcggcaaaatcctaattgcgaaaatttcgttctttgagtgttgagtctaagttgtgccaaagatctcaatttaaatccctcccttgtctcgataccctgttatcaaagatcgtctcctcaaaatttccatcccaatatagtcccgaagctcgattccttctattcggaatcccctcctggaaccccatccgtgaactttgtcgaatgcccgaaccctaacttcatctaaggattcaccttcgcgtcataagctctctccttggttccttcaaaccgattctcaaattcgaattcaacctctcaggttttgattcatctatctttctccctgtattggttcatcaatctacccttgttctctttctcgaacttctgatccaagtctgaatatgcaaatcgagatcacttccacccttgaactcaaaatcccaagattcaatccctttcgccctgagttctccccaaaatgatttccgttccgaaataatctcgaagtccgaacccttctattcagacttctctccaaaatccttacccacatatctcgttgagtagtcaaactcaaactcccaagttacactctctttctctaaattatccatccccttttgactcgtctccgaatattgttcccttccttgactccttcctattctcccgagaccgagtatcaacctcgaaattcgaatccagactccaaccctaaaacctcccaattaaatctctctgtgaaagtctatttaacctccctcataggttggattccttcatcctttttccggtccacctcttccttctcttccatcccatctctctctgagtctcgatctatctatctatcgatcgatccatctatctatctactatacctatctatctgtttatctatccatctgtcaatccatctgtctatccgtccctctacctatcaacctacctttctgtctatctatctatccatggcattctaccgctatctcccttgttccatttttgaataatgatcttccctttttgaaatcctctgaaataatccttcgtgccgccaaatataaatccatcccaaaaataccaaaattcccgcttttgaagcccttccttgacccctcccttggatccaccttgaaccctcgtgtacaaatatacaaattgaattcaaattcaatctccacatcaaacttctctccaaatcaaaccttctggtaaaagtctattttacctccctcgtgatgatttgggccgaaacatgccgctggcccatctcttctcaactccctccatctccacgtgcgccgcacgtgaccaccgagagagagagagcgctgtctctctctcccttccctctctcggacattctctcgctctctcgtcctcttcctctctctcgctgtctctctctctcgttcgatctctctctcccgcgccagcgctgccgccatcgccgatttcccgctgccgccattcgattttcggctgtgccgctcgttcccgcgcgcgcgcgcacgctcgtgaccgacctcccggtcgccgcctccgtcagcgcctgcgctacgctgccgctcggccccgctgcctgccgcgagctctgcagcgcgtgcccgagccgctccacgtgtgtcctgccaaaaccgtgaggctgagctcccgctcctatccctctccctccccaactcggcaaagagaagagctcacttttttcccctccttttctacttttgcccgacaccgccggcgtcatcacctgtcgccgccttggctgcacgcgtcgatgaccgccagctcgctctccttgaccgccaatgtcggttcttcctccctaaaccgacattgccatctattaaaccgagccgccccatctccctctcgttcattccctcgccaccaccgtgcccttgccgccttgctaccgccgtcctcgcttccctcctccatcgcgcgtgctggtgaagccggcgtgcgcgcgaggagctgacgcgggactccaggcgccgtctccttccccttccccggcccgaggccggagagctcgctcccgcgtcgtcggccgctcgtcacagcgtccgtctcgactctgtagtgcatctcccgttctccctccttgctccctctcctctccttagctctgggcagtagtgcgagtagccttccagtagcaagctggcgccgccccgaccgccgccgctgctcgccgtaggctcgccgccgtcgctgcccaaactcggtagtagccgctcgtcgccggccttcctcggtgtagctccacccaatccgactctagaaatgaactcaggaggtcgcgtagatgctcaagtccctaggaatcgagctctcatcgcgtcgtcgtcgtttccctcttttgccgccgccggcaagcgccgccgcgattcgtcgtcgccggcctccctccggcgaatccgatccggtggctcactccctctcgtccgtcccatcgttcaggtgtactccctctctctcgaatcgtcgcgacgagctccggtgaactcggctgccgtctgccgtccatctcggccgccccttctttctcctcccgccggcccgcgtggctgccacgtaggcgccatctcggcgccacctcggccttgaccgggccaagccagtcagccgccccctccctccgtcttccctcccgtgcgcgcggtccacggcaagccgtgcggctgcacgtgggcccgccgccatccgtccacccggcgcgccgcgcccgaaccgcgcgcacccgaaaccttagcgcccgcccccgtgtgcgccctccccaccgtgaacccaaccaccgccatgtgggtcccgcgcggtggaccgcgtccacccgcgtcggcctctctctccccgcgcccctaatgggctgaccacccgcgcccgcgctggcccaatggcctgaccgcgctgcgcatgaccccttgggccgagcctaagccgcctgagtaagtctaaatgacatccctccttccttttcttttccaagggatttgataaatccttttcctttagatagaaaatccaaataatcttaggaaatccatatctccccaaccgctcgtccgattgactccgttccacttgcaataattccgtaaattgagatctatttaatggcactactaattagtctaaataggatctttcttttggtcttttgtttaggttttcgattgtttgcgtatagttgcggttatcggattttcgtcgatcgcgggttttctcgaagattcgtgaagcttcgtgaagaccttgagcaaggcaagtcaccctttgatcaattgcccctataattgaaaagtcattattattttgtttgcaacttgcattattagaatcacacacttaacttgctgggcttcggtttgcgtgccaaaccgacggacctacccagtagtcgcactaatttccgtaggtcgtactaccctgattctttgtcgctccacccttgtggtacctcggtattcgtgctctctgagcacgtataccaaatatcccacatacatcgttgtttgtcgaaaacttgggaaatgggtttgtgaagccttcaaaacccgacatgtggtgtcggtgtgtttgaaaataaaatgaattgtgaaaactcgcgatgcgggggttgtgcctatgtggcactgtcccgtattcgcatataaggaccgattcctgtgggaaactcatcgaacataatcaaagtgcaaccacaaggtggaatgagacaccctggctaagtagctagtcggttcagggaaacctcgcatgccaatagttgggaacgccggggcggggtcggttggagccaaaccgggttcctggtaatgcaagaacgagaagcttgctgaattaccgatcgaggtggttggagtttgattggtgaacgcctaaaatggcctatgtttatgtgaggatttgatccttctatgtggcatgaggtatccctgggtcggcttgggaaaggctttgtcgcgaacctctgacaccggccagtgtctggagtaagttcgggtcttgtgggtaaagtgtacccctctgcagaggttaactaactgttcgaatagccgtgcccacggtcatgggcggatgtgaggtggttcccgttgcgtagatttgtttgcctgtgctttgtgaaaagttgttgtggtgtgggaatcgtaaccagaatcagcctatgtggcagatggatgacctgagtggtcagaaacgaatctgtgtgattcgggatgtctgtgggcatcatagactaggcttcctgagtggaagcggattgttgtgctgctgggtagctggactctgggagtccgagaaaatgaaaaaggctctgggagccgattaatcaagtggaatggctctgggagccgagaagtaatgatctgacccgggaggtcggtacattactaaatgagctgttgaaaaacatctcttaaagtcgaattgagacgcaagtctcttttcggcccaaacttagaaagaaataaatcacttagtgatttcaaaatgtcttcaaataaaagatttgcaaaacaaccttgcctctcttccaaacttgcattaaacacctaagttcccgtgacttgctgagtacgaaagtactcacccttgctctatataaatatatatatatatagttcctccgccctgaagagaagataaagtgaagtgaagattagagtttcgtcctggttcccagccgtcgcctgtggtgttgggtgttagaccgttggttctgctgctgctgttgttgttggtgttcgcctcatccgtgtcgtcggttgtattctcgggctgtctgagctgcaacctaagttaaggtaaataagtactctatttattttaaggattgctatgattcatatttgtcaccgtgggtaccaacactatgtcctgggactggtaccgagatcgcggtttcgtaggaagcggttcgcgccgttttccctacgacacgctcctgtcaggtgccgttgtacggcggtatcagattggggtgtgacattatccctattctatcctcaggcatcatcctactcttactagctatgcaccatttaatgaagggtatcttagtttttcttctcaaatcttaatatatgataagtaatctagaattgtaattattttaggatcagtttgggactgaggtagtagtatatagattttggtatggggtaattacaaggggaaacctttggtgccggcgattgagctaaatttggggcctgctaaatggatgcgccgttggtattgaaatgtctcaattttccttttgcgggaaaaaagtctcaaattaaaccaacagggctgtaaaatgtagagaaaatagaaaaaccgatgaactataaggactgtgaatgcttgcatgcacactttcttttcagatatacaagagtacaaagtagctagagtacaattcaaacctcctaattgtgggtaaacaccaaaacagttttctttacctgattaaaagaaaagccaaactatccatcataagcatggacaaccaaccataacaggacaagaaactcatatttaccacttgttttgcatgcatcaaagaacaagtccagagtctttttttccctttcaggaacaagtacatatatagagccaaatgatgtttatatgtgtgtagctcatataagggtgataaatatatatcattttatttttgtcaaaaataacatcatcgagatcaccacaaaggctatgtcgcctaaaacttctatttaaatcctaaacatgtttctaaagtgaaaaatattttggatatatttaaatcctaaatattccttaaggaggcgtgcatatttttccatggccatagcattcgacagtccgcaaaatattcagagcttatcaatggataaacgaattattgtagtactttaagaacataataaaaggtttggctgtacatgtacacacccacttttgggtgtagaggccaggtttaaatccattttctaaaaaaaaaaagatgacatttaataaaagccgtaatgtcacgccccgaactagccccgaccggaactagcccgtgacgctccaaattaacctgttaatcgataccggccccaggaaatagtgttggtatcacaggaagacagattatcacagcaacagaggtctctttattacagagtaggagtacagtcatgttgggctacggacagatcccgagctcacaaatgcattaaaaagggaaagcggaagccaagacttggaccatttatcacaggcgcgacttggaaactaggccgaaaccttaaaactcatcgtagccgacttgctcctggaagaactcctcgtcagcgggatccactgtcacgtcccaaaatgactctaaaatacatcctctaaattatgcctagaataattaaaatccgtgtgaaagcctccaacaattaaaatgtgcaaagttaaaagtcaaataaggcttggaggatttttgtatatttcctaaaagcctaaaatgcgtaaataaattttagtggaattttcagagcacaaataataattattaagaaataaaaaaagttaaaatgattttataaaaag

SEQ ID NO: 5559 - DNA, 21395 bp, Oryza sativa
agattaaaaaaaagataaaaaaaattacctgaattggattctaggacctgttcagattgctaccgaaatgaaccttttcaaaatttgacaataccaaaatttggacaagttaacaatattaccagattttaatattaccaaattttgataggatagattaaatgttttgttaccaaaattctttaggcagtaccaatatttgataacaaactaaatttattaacatatttattaattttactaaaaataatatggttcaaaatgccatcaatctgaatagttgttcaaaatggcatcaattcctacacgcacgatatgcccaccatagagtacgcatttcatcaattcctacacgcacgatatgcccaccatagagtacgtatttcccgtagggaggtcgaatttcaactggcagaccggcaatagtagaggacgattttcggtggagtaaaaaaggactggatattttccgtggagcaaaatagggctggatcttcactgtttgtcctcgccgcgaatacatcgttcccatccagccgctgaaccgcacagctcaccccagccactcacccagtcaccactcaccactaggatgaaaacggatcggatacggtcgaaaactagctttattatattcgttttcatatttttttctcggaatcagaaacccggatatgaaaacggaatcgaatattatcgaatacagatacgaagcgaatacgaatcaaaacgaatacggtaacgaatattaatcggaacataaaagcccctcaaaccgaccttcacaaatcaacgaataaatataactcgttattttttctaatagaacatatcaacattttcaaattttagtgttaataattttgttgtattcgattttttggttgagggagacgattcaatcaagagtaagacattacgatgctattattgtgttctaaaattatgttctatcgagttattgtgttcttactgctattattttggccatattttcttgtgactttgttttatcaagtaaaaaatttgaatttcaaaaaatagcaacttcaaataatattttgaagcagtaaataatttcaactgaaaaagttatgaatataaaagttgtagaactcgtcaagagctacaacttttattttagtcatttcttcatccgaccaagtgatagtaatattgtttataaaatttgcatatctctcttatatcttatgaaaccatatacaagatatgtaaattttgtaaacaatgttactataactttgtcggatgaaaaaatgactaaaataaaagttgtagatcttgataagttatacaactttgttgttggtgactttttcagttgaaatcatttagtatttgaaaatgttgtttgaaggtgtcatattttgaaatccaaattcaaactatttaaacaaagtcatatagaaaaataacccaaacaaaagttgttgatctcgatgagttatacaactttgttgttgacaactttttccatttgaaatcatttactacccgaaaaattatttgaatttcttatattttaaaattcaaaatttatatagttcaatcaaactcggatgaagaaatgaccaaaataaaattggtagatctcaataaattctacaactttgtttttgataactttttcacatgaattcatttagtatcataaaatttaattcgaagttgagggaggacatatagacttaatagctaattcttaggcccgttggcccatttagatggagggatatataaacctaaccctagtttctcccacacctcccaatctcctcccagccgccaccctttcctcccggctcccgcgaccaccacgggggcggggcccgcgtgcggcggacggcgacggcgacgacgggggcggggccgcgtgcggcggacggcgacggcgacgtcgggggcagggcctcgtgcggcggacggcaggggctcggcggcgcgaggcgacgacgtgcagcgaacggcgacaagcggaaccagccgcgccggcctcggggcggccgggtcgtggcgacggcgggaactcgacagcacgaggcgacggcgtgtggcggacggcgacgccggactcggggcggccggatccggggtcgacagcccagcagttgcgggattcgacgtcgtgaggcgacggcgacggatggggctcggcggcgcgaggggacgacgtgcggcgaacggtgacgagcggatccggcgtgcgacgtgcgacggtgtgcggcggacggcgacgagcgtttttcgatgtttgttaatttggattttgttgtttattttgattcggatatctggcaaaaaaaggtcggatagtttccgaccgaatccaatttccgacggataccatcgctactgtattcgaatttgtatccgagaaaaactatccgaattcgtatccgaatccgagaatatccgaaaaaaattcgaccgcaacaatccgcatccgaaaaaccgggatcggaactcagaaattatccgtaccactttcatcctactcaccaccagcaagcaaggcatcctgttcccagctatacttgcctactattcccttccttcttttgcccgcctcgaccccaatacgccgcaaaaaaaactttccgagcagacacacaaggaaacccgaaacccaccccccccccccccccaagcgagtcatctgccgtccatcctcaccaacggacggcccacgacgcgtccaaaccacggaataattagggcaaacccaacaagagccctgtccgcccacgcgccgtcatactcgcccccccttccccttttctcatcctcctctccgcgtcaagtccaagcgaccaccagagatctctctcgcggggcggccaggtcctccccatcccgcggccaccacccacctccgaatctgccttccccagaaccaccgcgacccctctttctttccttcttcctcctcctcctcgtgccgtctccaagctccctccagcttgcgaggcgaactataaatagcggcttgggagcctcttcctctgccaagacgcagcaaacaaacagcacatcggaagccaagccccaggaaagaggaacgcacgagcagcatatgtcacagagggccagcgtcccacactcctcctccatagccttcgccctccattcccatctcctcgtctccagtgagatgtgccccagctcctattggcagcaataggaatagaaaagattgctcctttcttttgagctttcttgcaattttggtcttctttccttttgatttggtttctttccgtccgatttgtgaagaggaggagcaatggggttcaagggatttgtggagggtggcatcgcgtccatcgtcgctgggtgctcgacgcacccgctcgatttgattaaggtgaggatgcagctgcagggggaggcgtcggcggcggcggcggcggtcgcgccggcgcaggcggcgctgcggccggcgctggcgttccacgcggggcaggccgtggcgatcccgcatgacgtgattgcgccgccgaggaagcccgggccgatagccgtcggcgcgcagatcctgcgggcggagggcgcggcggggctcttctccggcgtgtcggccaccatgctgcgccagacgctctactccaccacccggatggggctctacgacatactgaagaagaagtggacccaggagaacggcggcgtgctgccgctccaccgcaagatcgccgctgggctcatcgccggcggggtcggcgccgccgtggggaacccggccgacgtcgccatggtgcggatgcaggccgacgggcggctcccgctcgccgagcgccggaactaccgcagcgtcggggacgccatcggccggatggcgcgcgacgagggcgtccgcagcctgtggcgcgggtcgtcgctgacggtgaaccgcgccatgatcgtcacggcgtcgcagctggccacctacgaccaggccaaggaggccatcctggcgcgccgcggccccggcgccgacgggctgggcacgcacgtcgtggccagcttcgccgcggggctcgtcgccgccgcggcgtccaaccccgtggacgtggtgaagacgagggtgatgaacatgaaggtggcgcccggcgcgccgccgccctactccggcgccatcgactgcgcgctcaagacggtgcggtcggagggcgtcatggcgctgtacaaggggttcatccccaccgtgtcgcgccagggccccttcaccgtcgtgctcttcgtcacgctcgagcaggtgcgcaaggtcttcaacggcgtcgagttctaaaggccaccgccacgatgatgacgacgaacaatccacctctagtattacttctgctagtactacctctgctgctgatgctgctgctatgaataattactactacagcctggttgagagattgtaccttagcctgcctccccatggcatatgttccttctgttcctgcattcgaacgaatttggatggatttgatcaaaaacttcaatggaatccgcatttttaaatttcttgtgtttaaaacgtttccagtgtctcatattatttcgtcagtaatacagtaacctccaagcatgttggatcttggaacgtggcaacctcaagccctcaaagcttaaactgaattgaatattccatctcggtatttttagatgcagtgcacacaaccaagaccaaggtgatctagtagtgtttgaaacagacaagaactattctcaaacgcaattgaataatcaatcaacaaccaccctcccccagttcgaccctactcaatgatgatggagtaaattgctaatctaaaaatcataggattccgcgtgtgcgagtgagttccgctaattcagcagcaaccagtaaccagaaacgtgtctctcgcgccgttaaacatttgggcaggacagtgacgtgcatgttcctggccataggaggcttggggattgggacctgggggtatggcagtgacatttcttcttttttcccctcttgtatgattgcatctttgtatctaaatcatgtgtccatgttcacgctgcaaaacaaaatgtcaccaccacgcttggtagtggataccgatgcaaatcacacaagcctataacaatggtggtaagtgcagccatgacataagcgctttgctgtcaattagtacaaggttagtaccaactaaacacgaacagcacaggagccgttcgccaatgctttgtctgcacaatggatgccaactttggccttgtcagcaacagaacaagtgcaggaactttaaaaggctagacaagatatccgctgtaacaaattggatccacctacggacctaccaaccagcaacaggcaaatttggccgatccggcgatgacctactttgaaacacgctagttttaggcagcgttcgttctgggagattggaggtagaatgcacatcgttttccgcgtgcacgcttcctaaactattaaacggtgtgttttttgtaaaaattttttataggaatgttgctttaaaaaattatattagttcattttttaaatttgaaataattaatactcaattaatcatacactaatagctcacctcgttttgtgtatctcccaaatcttctctatctcccctttctcaaacacagccttaaatgccaatgcttttttaagacatgctttttagatggactcgagacacgtctgaaacactatagtttctaattctgaaatttcacaggacatagggaagattcatgtgttacaaacaaggactttgcatcagagctttctagtcagtaataaaaaaaataaattgcatcaattgcagcagaggttaaaatctgtactagttttgcaaatataactggtagtcatatcacatcttagaagaaaatgtagacgaggttagctattcaccttttgtgcggagtttgagcagaaaccagttgtttctcttgagaaatcacatgattgtccttcaagcacagcatcctggttcaaatttagcctttaagctttggcttcccaaccttgcatgcaaacttgttctgaatcatgctgaacaggaaacacatagcgtcgatttagatgcaaaggactacttcttggacatgtaacaagcaacagaaaattgtctgtcaacttgcattagccaattgtgggaattaaaaaaaaaagcaaaagaaacaagcggcaactgatgacatcataccaaattgaccggtaccataagaatatgcacaacgaaagcagtttgagacatgatggactgattttccagatgcatttgcaggacattagcagcagtgttttgatcggccatacctttttggaactcttacagtaaatttagatcaacagcttttcggagtcatcaagaatatttaggatctcactgacatgccttattaacaacccattttcacgtcagtgtggttggaggccattaaactcagtagagacctgccgcaagtgcagttttgcaaccccacctgcaatacatcccggcacctgagccctgaaaattacattgtcttgcttacttaaagaacaagaaaatgatcgtcattctttgatgcatgtgaactgagaggcatattatcaaggaggttaactttaacctcttgccctaataggttcaagtcctaggatcaacttggatgaccatctcatttttaattgaatgacaatattcacattatccaagccagtttttcttttactctttatcgtttcaataaaagaagattctggaagcacaatattacctcccacagtcccactagagcaatcatgcccatcactcaacatcagaaaatatgtcaaactcaacatatataacagtgtcagcttgataaacagcttgcttcggtaagtggcatattatcctgcatatgacagtatttcatgacatattacgtcatataagttatggccaggctgtactacaaatatccatttatcaagctctaatcagttcaagctagaaggtggcactggccagtagcaatttcatacaaatggtaaatgtaagcttgttagcaaaagattatatatatatatattgtttaataggagcatgagattgatatttaggcatgaactctctctagtctcatttggacaagaatatgattgatgtagatcatgtaaaaccaataaaacagtgattcagaaatcaaatgatggtgaccacgaacctacaactggtcctgtatcaatttgatttatctgaaaattctacaactattctggtgttaagtggatgctgattgctcaagaaattaggtatacgcaaatatctgaaaaatggagggccacaagtctctagtctacagcataattggagtgggcttcacaaatatttaactgtgatatatttccactaaattgcctaaaaaggaaattgtttcattattgccaatttgatgctaataaattttggccaaattaaagtgtcatgtcacaacataactccaatatgcctcaataaatctttgcaactgttagaaaattggctacataatgtatttactcttatccacataagtaggcattctatgtgcgaaccagtaaaaacagagttcacaccacaggtccattgcctaccattttgatgaaggatagagatgtgtacctaaataattactgaatggtttccctgccaactccaactgaatttctttgtacttgagagccaatcatgatccttgactggttctatcattccactccacgatcatgataacatgatgttgaagatggaacatgcatgatgcatcagtaaggttaaaaatctgtgcatttgcggaaataccagaaagggactgatactctaggattctagtttctacaatacaactttgaaacaggtgcttctcatctcaacacaggtaggggcttcaaagaagcatactgaaatgagaaggataaattacgcaatacaagtcaaatttaactttgaataaaagaagcgtcaagttttaccttcagcaggaacatatgtgagaaatctaccagattataggtgcaggttctgcaatcatgagaacataaagcttcctattagttggtacaactataacagaattctgaagtttgcatcttgcacttttgcagacacttgaaggatcacactatttgggctaaaattggcctccacaacttgttacccgattggacttggcccattaaaatgttttttcagttgccaggaacccagactggtaagaagatggaacatgcatgaagcattagtaaggttaaaaatctgtacatttgcggaaataccagaaagggaatgatactctaggattctagtttctacaatacaactttgaaacaggtgcttctcatctcaacacaggaaggggctccaaagaagcatactgaaatgagaaggataaattacacaatacaagtcaaatttaactttgcataaaagaggcgtcaagttttaccttcagcaggaacatgtgtgagaaatttaccagattataggtgcaggttctgcaatcatgagaacataaagcttcctattagttggtacaactataccagaattctgaagtttgcatcttgcacttctgcagacacttgaaggatcacactatttgggctaaaaattggcctccacaacttgttaccctattggacttggcccattaaaatgttttttcagttgccaggaacccagacatccagacaaaagatcgtaatcttttcctgtcttacaccaacctgttacttaacaactattcaacatttctaagacatgttgcaatatttttttatcagctacaactttcctaggtaggcaagctgacacttattcgaagagttctcacatgttaataccataaagtcaaacaaaccccttaaataggtcagaagtagagagaaaaaggttaatcttatttcaacttttcacctaaaagccagagcacacgtggtaatttgtgtgcaactgtgctatgggtatgcaaacaaacaaaagccatgcacatcaaatagcaaattactcagtgatacaaattttattcgtaatgccatctgttactttcaataattcaaggcactctacttaaccttagaagactcccttatgctaattctgcaatttcagaatggttacagcaatgtgggcaccatggtttgattatgccaaagacatactggtgactggtgagttctgtactggccataagcatagcttctcaacattactacctagaaggccattatggtacataagttgaatagtactgtaccagtttatggtagtattaaactggtcaagaatatttcagacttctattctattggcattcatattcgcatgtactagagattaaaaaattagccatattgaaggtggctgcaaagtttcaaacaaaaaaaaaggtggctgcaacctgcaattatagcagattaatattggaggatgatattcaagagcaaattcaaaataggtacgtcagcataagaaaagaagtgcattattgtgcaacaaccttatgttggtagcacctgacaagaaagcagctggtgtatttggtacttgtaaagaataatggaagcttcaatcttggcgcaaaccaagtttcaaacctggcgcaaacagtgtgtgttttcagaaaaaaaaaacgttttatataattagcaaaaacataaacgtttcacatcctccaggctacaagaaatgcttgcagcggtattcaaaggggtaccatcaagtgtatccatgtgcacacgctgaagtgcacaataacataatgaagaaaacaatcaaattgacaaccatgtggaaaagctatttcctaaatcaaaaggccggggtactgccaaaaggatctgtgggtttttctgctcaagtgcaaactgattatagttaacctatcaacttctctgtcaaagctctacctttttgataaataataaagaagctctggtgacttccaaaaagagtcctagactactagttatctagtaggattctaggtcaaagctgaattcacaatgtaatgtgactttagaatggcatgtcttcattgaacagactaggaccactaagaaagaacaaccgtccttcacattgctcagaataactaaaccaggaatgaggttttaatagccgacgttctttttctatcaatgccagtctggattgaggtaacttttaatcaaaagaagaactctaacatgcctagaatccatcccaaagaaaggaatgacgacctcatgcctcaaactgatacaccacccaccatcaatattcaattcttcccatcaggcgtcggagctgtgagaggcatatcccacctaaacaacaccttacacctacagcacgatgacccaattcataaaccccccaaggccccaactccccccatctccaggacgcgaacgcgcttgaccctactgccgcattacatcgaacacctagcgtgcgccccgcccgccacaactccacccacctatccgcacatgcggcgcgcgggcagccgagtaaatcgccccgcccccgcatccccgaacaaccgccatcgctgctggtttaagcacatttgatgcatcggtggtcctcgcgcctggcccgcgtgcgcgcgaaaagggaccgcgaccgaatctctctggcttctctagtaaagttggtggatgatccggagattaataaacatttaaacaattgggatcgaggtcggtggtaggatgggttgggtagccctggtaggagttgaccgatcgatcgatcgatccaataaacaactgtttgacttggggaaattaaaggagaggagaggaagagatcgtgcgtgcaaaatgtgatgcggcggagtccaaaactagtcgcctgggttggttagggcgactagtcccgataggaacagcaagcggtggagagaatggcgggtagggggtgaaacgatcaccttgtttgtggccgccgacgctgccggcggcgatgtcggcggccggatcggagaatcagccgtggtggcgtggtgttggtggacgactggtagacggtagtggcgggaaggcggagcagataatgaattgtgtttagggcaaatttgaattaagacaattgaatattattatccaattgtagtgtaaattaaggcaaattgaataatattattatcctacagtctgcaaattaaggcaaatttgaattcacctatccggttatcaaattgtactataaaagaatattgttaagacgaaatcggataggtgacactggtacttttataaatttgaattgatctattatcgttaaggtttctgtcaatatcttgctcccgattatttcttctctatctccggcgcgcatagtacaaaatgattgtcatagcggctgatggcatggatggccgtggagaagcagagtggcgcaagcgcatcgcagcgatgtgggggctcgagctcacctggcgaggcaacgatgtacggacttaagctcccaagggcgacatcgatgcggctttgagaggcagacaaagctcggtcacactgaaggacaatagtgatagtggttgctggagcgagctcctaatagcgatggcaatacaacttggagaggttaaggggagctcgatgacagtgagtagaggcgattgtggttgctaggacgtcagtgcatcccgttctgcctcgtcgtcctcttgccattgtcggatcccttgcctcctccaacaactcctggatctcctcctgtcacacctcttccacctgtcgctgtcaaatctcgtctttatcatgtctactctggtcgccattgttggatcccttcccgtccatctgtcgctggccacctcaagaggaagaagttacatgctttgacagctattgcacgtttcttattttagaatagtgaagtgacacaaatatactttcaattttgttagtgacatttttctaatacaatgtttcagtggcatgatcaaatttaccctcttgtttacgatgaagtctactaatcggacaaaaaaataatgaatgaacattcaattaaaggatatatgatagattatcttattctacattaatatttagagggtaacggagttaaaagttattttaaatactatcccaagaatgtatgtatttttttatggaaatgctaaataccgggataccgtttgctagcgttcaggacgggatcttctcccagcctcacacagctacagataagaatggtgtggagacaaccaggttccacggcagccattgcagtagagacagtctatttcacgcgaggttgcggcatggcgtctgtcgccgtaggttgtgggcgtcgccgtcgtgctgctcagctactcacgccaactgaggacggcgatggcgcgtggggcttggccgccgttgctgaatcgaagagaggtgccgtgttgaggagcagcgcgagctcgacatcggagctgatggatgtgggttgtcacgacgatcggggatagagctatcgtcgaagtggatagacgcggagcaaggaggacacagccgctggcgatgagctccgacatggcatggacggtggaggatgcggccatcagtgacgagcttcggcgtggggcctggatgacggagaggacacgaccgccgccactgagctccgacgtggcgtggacggtggaggatgcagccgccggcgacgagctccggcgtgagacgtggacgatgggaccaccggcgacaatgccttggtgcccggctcctgatacctcgcaagtatcacctaatacgtggtaagaatcgcttgatacttgacaggtataacctgatactttgcaagtatcacctgatacgtggtaggaatcgcctgataccttctaggtatcacatgatatctcgcaaatatcgcctgatactggttaggtatcaggacatgatacctcagaggtatcaggacctgataactaattggtatcattctgtcctaacgggattccgttgaatagcagccccgtttttaagaaatcatgaatcctacaaacttagcgaatataaacatgatataatctatgatatgtaagtggaaaagaacgaagaaatttgaataattttttttctcataaaagaatgaatttgaatagggttgacatcatgtcatcactcttaatgtctttttcccctatgatgcaagtttcacctattcgtgaattatcaagacataacaatgcgatatactaatcttcaggtcatgataatatattatttgactcacgaatggtgccaactccatggacggcataatgtatgaactagccagctaggtatatttagtttggcacacagtttcaaacccagccgcaacaaattctttcgttatcttctccatgcaacaaagaacaaaacagaaggaatcagctaacttaaaatacaatcaagcatggaggagaaaacgtgtgtcgccatcatctgacggtcgcaggttagcgatggaaatatggaattatctgaaaccttttcttcctgagccagaattctgtacgcaagtaataaaaaacttcaggcgattagcccccaaccaatgctctctcgcacttagctgatggaccacataagcattagcatatcaaagaaaagtgtttatctgtcccagaatggcaagagaacaaaaaaactgaaggaacttggcaacaaaaaggggcaaaatgcatccggtgagctttacagaactttatgcactgtaggttatagtctgatagagactttggtttaatctgtagagataacgtgctgcaaatacaagttaaaatactcttatacgaaaaatacaagctaaaatacagtctttctaaaagttctagcagaaattggtaagaaatagtcatgacttgttaagacaataataataaaatagttgaagaaattagataagagatagttgtaattagctgagatgaataaaataagtagaggaatggttatactgcggtacaaattttcaatctaaaaacagtttggagaaatgcttatattgcaaaggctgcaattatcgaaacgaggaggttgcttctgcaaacgtaacctgaaaaaaaaaatctcatattctcatttgttacgcacctaatcccgccaaataagtttgatgagaagattcagctcggtgaaatttcgctaattgcggaaacaaatcgccctgctggtcgttgcatctaatcgactgaccacaaccgtggaaagcaaccggattagttgcgaaatcaatgaatggtttgattcgtcaggcttttggactcccactgaggaaaaaaaaaggtcagtgcatgtactagaaaacaacgcatgcttttgctgcagtattcttcagcacatgtacatgttgaattcgttggaagctaaaccaccccacaagctattggttttcgggaggaaatttcttcagggtacgagcttgattagcagagctgaatcgtatacaccacgtcttggcatgctcttggacttccatgttaacataattcaatgttgccatgttggcataatttcaattaccacttttacctgaataatctcgtctgttactaggctagcagattcctgagcagagtattagctggtgtgttgttcgttaattgggtggtatgaaaatttttagttgtttcgacgtcgcatcatgctgatagacagttgttatacaaacagcgatactacggcttggttcagttcccaacttttttttcaaacttttaattttttcatcacataaaaacttttctacacacaaacttccaacttttttgttacattattttaattttagcgaacgaaacacaccctacagctcgtggaacagatcgtgtgatcgtgtcgcaaactaaactactggttagaagaagaaggccggtgtaagttgaaacttcagaccaatagcaatcagttgactgtaacaacacactgatatttcgagcgagcgagcgtgaggagaagtggtgaaattcgcctcttgttcccgtcgtccactcatctcgcgacgacatgctcgagtgcttctgttgatggaaatcgatggattcttcccagaactcacccgctgcctaattaattaaaaatctagctctgatgcttgatgattaccaccaattggtctctttgatctgatgctatttagagtccagatcacaccatgtcaccatgcagcatgattaatttgtttttgtgatcgagatgcagtcggcgagtcggttgtctggaatttggtggccgcgctttccttcagggatactccggcgccgacgtggcgtcgcctcggcgaaccaaaccccccgccgtccgccgaccagccgcatatcacatcggcgcgtcgccatcgcccgcgccgccgcgtccgcccgcggcgccgcgaagcgtcggcgccggcgcgcgaggatggcggtggcgcgacaagcgtgtgtgtacgtgggcgacgcgccgacgccgccgcccgcgcgcgcgccgtggcgtggcgtgacgtgtcgcgtgcgcaggggaaaggtacgtgggggaaagccaggtgaggcaaaccatgcctacttcggacgctgcgaatcaggaggaggaaaaagggagaaaagcgtcgcttgtttggcacgtatttgccggttcgtctcagctgctgcatttgtttgatttctctgtttttttcttccctcgtcgccattgacagaaaaaaagtgacgtcgacagaaaaaaaaaaactgatttaattgggctattttgcaaaaggtcttgagctactaaaatgattattattagtttattactacagtattttattttatggcatcgaatatttcgggtaggcaatattgagaacaagtgatattgatggaaatatatttgcctaaataaaagcttcatgaagtttaggcaactgtgacaaatccgaacttcttctaatttctaaaacgaataaaaatcaccaattaccttagaatagtttccaattccaattaccaaccgcagatatatatatatatatatatatatatatatatatatatatatatattaaaaaatccctttcatgtgaaaaatccctcaacgtcaaccgcgtgggacccaccagtcactttatgggaccccacacctaattggcgggaacacataacaaaaaagaaaagggaagaagaacaaacttgctaataacattttcccgcgattccaaaagttaggtacgaaatccacccggggggaatcgatccgacggcccagacacactcgggcccacacccccctcccgcgtgtgggaacccattcctttcttgtcgtcgcggtggccgttaccgttacgtgctccgtcttccctctccgtctcgcggaaccactttttgcagtttcccccctccacaagccggattattattcttttattattcctttccctcctctcgagtccgccggcttctctctctccgtcgcctgcctctccgtcacttccaaagaccaaacaaaactcgagtagaggagagagatagagagagaaggggaggggaaaaaattggaagccctagattttggcgggttggctacggcgaggtgcgggggaggggtcggggtcgggatcggcgggcggatccggtgggtggaggaggttgggcggcgagatctatgcggtggggaggggaggggaggaggaggaggaggggagcggggtgagaggggaggaggaggtggtggatggcggaggcggcgggttcgtcgtcgtcgtcgtcggcgtcggcggtggtggtggctgtggtgattgcggtggtggtggtggtgtgggttgtggtgcggcggaaggtgaggcgcgccgcggcgcggagggaggaggtgctgcggctcacgcggctggcgcaggaggagtcggagatggcggaggtggagtgcgcgcgcgcctactactcggagctgttcccgagcgtcgtgcacgcgacggagatggtggatgaggcggcgtggggggcgccgccggccgtggttccggctcaggcggaggcagaggcggagatggaggcccgggcccagccgcagccgcagccgccggtgggtgccaagggggtctgcgcggtgtgcttccggccgacgacgttcaggtgcaagcagtgcaaggctgtcaagtactggtgagttgtctgaattctgaaaccctcttctgagtccccctttgcatttcgtgaaatttcaccgggtgaaaggggaatcggaaagagagttctgcgattggtagtgcggatttctgtatttcgtagtaatttcggtgttcaaccttgaggagggctagtggttccagaaagcctggaatttgcgtctagttttggtttgcgcataacatgaccatcttgaataactgattggcaagtgagtttggtatggataaccctctatttagtcttttctttgtgcccatttgttgcatttgaagaatctaatgtggacatatggcattgctaacagaaacacagttttgaaagacattagcctgtgaatcgctcatctgtcatattcccaactaggatcctaatggctcaattctttctattacttttgttgatgatgatcttcttggaaactttactttttttagcctgacttaaagttgtccgtccattggctcggggcacatatattattgtcttttatttatgaatgaacttaggcacatgaccgggtttaagatgttaggatctcaatgtctaaaatgttctctagatgagaaaagtatcattttcacaaagcaatattatttgttgtgatggaatttactggtatcgttttcatacatgatgcttcctatgctcagatgctctacatcgaggcaacaaacatagatgatttatcaaaccatgttcaataaatagttgagactctgaaattcatagttattttttgcgggaaaagattcataccttttttttttgcggggagggaaaagattcatactgcttaacagtggtgattcttcacaatatttgtttcatgcgcataagcttatctctaatcatatcctttaaatttcactaaattgcaaatgtttggacaaaattatcacaaaacaacatatttacgccataataaactgtagatttagcatagaatatatcccgatactacagattgaagccattttgttgcaaaaatataagatttaaccccaattttatcacaaaactatatatttttaagatgtacacacatcaatcatgctaatctgaagggtattcagaaaattaaattccataatttcagaaaattaaattccataattttcattgacaaatttcatcacctgctacacattcatgagtatatttatgtgttaacccatgattatggattaaacgaatctgaagttttcgaggttgatagtcgtaataagaatttagcaaactacttatggaaccgttgattacttgagtttatcagtagattttttatggattagtttagttaatcatcctaacaaagatcattattggattacaacaactatttttattctgagttttatcctttgattctaaactcataatacttaacattgaggcttaatttactggatatgatatcaacattgataccttttcaaactcttaagttattatctttgttacattgtatacattgaaaattctgagctatagtgtaatgttgtgcatggcattagaatgtgctacttgttcaacttcaatgataccttcattttttttgcagttccttcaaatgccagatagcccactggagacagggtcataaaaatgaatgccgcccaccaagcactgatgctaatcatgatgatgtggctgaactttctgttgcaaaggaaaggaaaattgagcagacaagtgcttctgaagaaaacatagctgaaaccaacacggcagccaccgtgaagaatttaaatgataaaacaaaagatatgccctcagaagtacttgcttcggtggaggttcctgatgatgaccattctgtcagtgcggtcaaactccctcaaagttcttcacaagtagcttctcttggcagtagaaagacagaatcaaatatgaaacctacaactcctgttgaaaatggttcttacacaaaggacttagatgaggcgttggtgtgtagatttcaaccttctccaccaaagattagtggctctggaagtcttatcaacaaagagtccttaattgattccaagaagcaccaggattgctctcaaactagtaacagcaaaaaatatgcagataacaacaatgctcaagctgctctacctgttgcagtagaacctaaaacttccaggactgctcttcatgtggaagttggacactccaagacaaaagctgctggctcagacaacattggtgtgtcaaaaatggtgccatctgttttgactgttgataaagtttctcctgttcccggtggacgttctgttacacctaattcatcaaaaagggctgataatattgctgaaaggaattctaaaccatcagagaaatcaatttcaacagcaaatagcctggcaacatctctgaaaaaaattgtcaggcagcaaacagcaccaaaagttgtgaggcattatccatcagagccagtaagcaaaactgaactgctgtgtttatagttagtaggagttttctatctgctaatagttttatttttttcagacacattttccatatgagcttttcattaagctctatgaaaaggttgaattgcaaccgtttggtcttcataaccttggcaataggtaagttttggattatttctggatagttggaacacatatatgtgtttcttttttgcttatctcattattttagcatttctctaagatttataacttagctctccccatccttttgtggctatcaggctacatatcacagcttgcatcgaattttatgataatttgtggtgtttatgcaggaattagcttagtacagtgttctgtgttcaccctgtttcaccttgttttttcctctctcttgcagttgctatgcaaatgctgttcttcagtgcttaatgtttacccgaccacttacatcatatcttttgggagggcttcattcaaaaaattgtaatgttctattactgtgtttattacatcattgtttcccataaagcatttctttgagtaattatttaatatatcatactctctaggttccaaaaaggaatggtgcttcatgtgtgaatttgaaaaactcgttggggagggcagacaaggcaagattgctttgtcaccaactgggatactctctcatttgcctgacattggaagtagctttggtcctggtaaacaagaagatgctcatgaattccttaggtaagttattttttttaattgacagtttccagtttaagaagttaagaattagtttagcagaagttaggaacatttatgtgcctcaacgaggaatgcactgggggataagagcgggggtatcatatcacatattcatgcagaaaattaaagttaataggcctacttgaatatttgagtggtagccggagtgcttattaggttctgtggtctgtggtctgcatgaagaatctaatgagcaatgacaacctttttccctatcatctggattcggagttttggtggtggtttgcatcagtataatgttgtaatcctggtagaaacaacctaaacatattattttgggtatgaattggcattgccaatgtccttgttttgaattagcttagttaattgtgctcaaccagttcttttcaacaatagtgtctgatggaaccgcactacctgatctgttgtaggtacgccattgatgctatgcaatctgtatgcatgaaggaagccaggaaaagcggcactcatcggttacacgaagaaacaacacttatgcaattaatatttgggggctatctgcgatctaaggttttcttcacagttcacagaacaagtttaaatttctgttgtttgtactcaattacctgagatcagctgtgtaatgaagccccactcctattgactgcttttttccttcttctagataagatgcacaagatgtgatgctacttccgagcaacatgagcgtattttggatcttactgttgaaatagatggcgacatcagttcactggaaggagcacttgagcgatttacatctacagaagtcttggatggagataataaatataaatgcagcaggtttattacttagttgacctctatctttctctgccagctcttgctgttccttttgtgctcatatgcgttcatacagtgcacatcttttttgccactttccaaaatcctcaaaatgcttgtcactgagaccgtagtaagttaaggacctctattatagtgttgttgtaatttcaaaacgaattataggcacctcagacctgtagcctaagttcgtattcactttctgggatttagggatcgatttttttcccatgtcactaatcaggatttaagaggggaatgtgtaatccttag

SEQ ID NO: 5560 - DNA, 57841 bp, Oryza sativa
ccgaccccctctctaggtcgccacgtgcggtgggttaggtggctgcctccaggcactcacctacccgcatttatggcgacctgagtggttgcgctacgccgcatttaatgcggcgtgcagtgcactcaaccggtctgtgatcggtcgaatgaccgatggaacggcggctgtgtacccccaccctgtcagtgtgccaggcggcatacggcgtgctctgtcccatcacatcataatgagaggctttttagcctctcatcatagcaggagtcggtttatccactctggtcaaacaggagcctagaagtcttcatcccttaaatggcgactcacaggggcaccccccgtgtcaggcggcaagatttgacgggccccatcatcaagacaacgtgcaatagacaagacatgcatttaatgcaaagattgtaatacttctccactaagttaggttgttgggcccatgtggtaaccccttatggtataaaaggaggtccaggcctacttagggagggggtgttttttggacggatagagggaggatgagccattttagactctagagcagtctcttgcccctgatgatcaacaccaccttctactccaacaagaagatcttgtaacccccaactcaatgaacatagcacatgagtagggtgttacgcttcatagcggcccgaatctgtataaaccccttttgtccaatcgtctttgaggggcctacctaaccccctcaagatcacatgtaacgctccgcttttcgtgagtcgttaaaaactaactcggcaaaatcctaattgcgaaaattttcgttctttgtgtgagagtctaagttgtgccaaggatcccaatttaatcccgttgttccctctcatcgaaatcaaaatcctccccctcatccaaattcctcttccgattcaagtctctgaaatcaaaattctgaaattcaaatccttcctttgaatcctcgccaaatacttctacgaatccagaattattcaaatcccgcctcgaatcctttccttgactccaccctatgttcccgagaacaaatacccaagtattccttttgaaacttttccatgactcctccttgagtttcccttgatacatccctaaaccctcgagttcgaatatcaaattgaattcgaatccaaaccctaaatctctccaattctatccaaatcagttttctctgtaaaagtctactttacctccctgtatttttggatggaccgattttcctcccccggcccatctcccctccccagcccatctctctcctttgccatctccctcacgtgcgctgcacgagccgtcgccgagagaaggatctctctctctctctctctcgttttctcgctccctctctgtttctctctcgcgccgacaccgcttcccgccgtcgccgcccaaaacctccaccgccttcgcccattcccgcgcgcgcctcgcgaggtggccgaccggccggtcgccgccgacgccatgcgctgccgccttgcccccgctccatgccaaaccgaccgccgccgtcatcgtcgacgtcatccatgcccccccccccccccccgccactccacgccgcacccgtccaagagtgggagaagcagctgccctccctctcctcctcctcctcactctccctctcctcattatggcaagggaccaagcccctttttccccttctttttcccttttccgaccactaccggtgtcactgcctctgcgccgcttgaccgaccacgccaactcgctctccttgaccgcgccagcccgcgctcccgtggttcgatttccgccgctcgatccaccgccttcgccgcccaacgcatccacgccgtcgccgctttcgcactgcccacgaaaccgccgctgccgcccgtgaacaccagccgagctcccttgaccgccaatgtcggtttccctcctccaaaccgacctctcctcctcgcctataaagcccgcgccctcctctctcgtttcatctccgcctcgctcgaaacacccgcgcctttgttgccggccgccagctgctcgcccccgccccgccgtcgcgaccacctcgccacgactccctctgcgtcgccaacgttgctcctctctcgccggtgagctcctcgcccaaattcttgccattgcatcatcttggataagccccgagccgttcggttgctcgctcgtccccctaaacgtgccgccccgccgttgctctgcttcgccgccgccgtgcccgactgtgcgccgccatgggccccctcgccaatccctcgcgccaccaccgtccttgagctccctaggacctccccaaaccattccctagcgccgtcgccgcccggcacggcctcgccgccattgccgcccgctcccgaagaccgcctctcgtcgccagccaatctcggtgccgctccatccaatccgacgccggaaacggattccttgaaccccggagatgctcccacccctttgaatcgaaccctcgtcgtctcgtcgtgttttccccttttgctctccggtgattgccgccgccgtaatccaccgtcgtcggctcctctcgcgtcgattcctctcgccgccgcgcgtgcgtcgccggtgaccatcgggtcccgcgtccccgcgtgcgcatcgcggtcgcgtaccgtttcggctaggcccgagtccgcgcccccttgtcccttccctcacaagaccacatccccgatccgacgagcttggtcgccgccgccagccaccgtcgtacctcccctctcaaatccgtgccgttaaacggattctccctgacctcctctagctgccggcggtagccgctcgctccggttcaccgctgctcgccggaacgcctcgcgcgtcgtcggccgtccgatcccgggcgcctcctcctcctcctcctcccctttcgcccctgcccgcgtggccgaccacgtggcagccacctcagccccgggcccgcttgactgggtcaagtcgcgcccagtcagcctcctccctccgtcttccctcccgtgcgcgcggtccacggcaagccgtgcggctgcacgtgggcccgccgccatccgtccacccggcgcgccgcgcccgaaccgcgcgcacccgaaaccctagcgcccgcccccgcgtgcgccctccccaccgtgaacccaaccaccgccatgtgggtcccgcgcggtggaccgcgcccaccccgtcgggcctccctctctccccgcgcgccctaatgggccgtctccccatggccgcgctcggcccaatggccggccaagccttgtgaatctctcgagccgcgcctaagtcgcccgaggaagtctaaatccgatccctccttccttttcttttccaagggaattaataattccttttccttgtccagaaaatccatttagacctccaaaattcatatccctcgatccgtagctccgatcgcctccgttccacttccagtaattccgtaaaattgagacctatttaatggcactactaataggtctaaataggatctttcttttggtcttttgtttaggttttcgattgtttgcgtatagttgcggttatcggattttcgtcgatcgcgggttttctcgaagattcgtgaagcttcgtgaagaccttgagcaaggcaagtcaccctttgatcaattgctcctataattgaaaagtcattattattttatttgcaacttgcattattagaatcacacttaacttgcttggcctcggtttgcgtgccaaaccgacggacctacccagtagtcgcactaatttccgtaggtcgtactaccctgtttccttgtcgctccacccttgtggtacctcggtattcgtgttctctgagcgcgtataccaaatatcccacatacaccgttgtttgtcgaaaacttgggaaatgggtttgtgaagccttcaaaacccgacatgtggtgtcggtgtgtttgaaaataaaatgaattgtgaaaactcgcgatgcgggggttgtgcctatgtggcactgtcccgtattcgcatataaggaccgattcctgtaggaaactcatcgaacataatcaaagtgcaaccacaaggtggaatgggacaccctggctaagtaactagtcggttcagggaaacctcgcatgccaatagttgggaacgccggggcggggtcggacaaaccgggttcctggtaaggcaaggacgagaagcttgctcacttaccgatcaaggtggttggagttgatttgtgaatgcctaaaatggcctatacttacgtgaggatttgatccttctatgtggcatgaggtaaccctgggtcggcttgggaaaggctttgtcgcgaacctctgacaccggccagtgtctggagtaagttcgtgtcttgtgggtaaagtgtacccctctgcagaggttaactaactgttcgaacagccgtgcccacggtcatgggcggatgtgaggtggttcccgttgcgtagatttgtttgcctgtgctttgtgaaaagttgttgtggtgtgggaatcgtaaccagaatcagcctatgtggcagatggacgacctgagtggtcagaaacgaatctgtgtgattcgggatgtctgcgggcatcatagactaggcttcccgagtggaagcggattgttgtgctgctgggtagctggactctgggagtccgagaaaatgaaaaaggctctgggagccgattaatcaagtggaatggctctgggagccgagaagtaatgatctgacccgggaggtcggtacattgccaaatgagctgttgaaaaacatctcttaaagtcgaatcgagacgcaagtctcttttcggcccaaacttagaaagaaataaatcacttagtgatttcaaaatgtcttcaaataaaagatttgcaaaacaaccttgcctctcttccaagcttgcattaaacacctaagttcccgtgacttgctgagtacgaaagtactcacccttgctctatataaatatataaatatatatagttcctccgccctgaagagaagataaagtgaagtgaagattagggtttcgtcctggttcccagccgtcgcctgtggtgttgggtattagaccgttggttccgctgctgctgttgttggtgttcgcctcgtccgtgtcgtcggttgtattctcgggctgtctgagctgcaacctaagttaaggtaaataagtcctctatttattttaaagattgctatgattcatatttgtcaccgtgggtaccagcactatgtcctgggactggtaccgagatcgcggtttcgtaggaagcggttcgcgcagttttccctacgacacgctcctgtcaggtgccgttgtacggcggtatcagattggggtgtgacatcacataacttcgctcactgggtcctcaaatctcacccgctatcctcggctgaaaaaaaaaaagaggggcctcacagttctctggtggaggagttcaccctctgacaatgtcactttcaaagcaatggataatgcacaagtagctttcccatgcatgaaccagaacatgcatgtaggataagctagctaggtttaatccatatagatatagtacaagttcatagtcaatggcgtggacgtagtaattaattagtgtgtacatgagggatgtgatcaacttggtgacttgataagcacagtgtaagtgtaaattaatattctttttgatgacgttgtttgctcggactaatataattgccactggaattggattccatagagttgtttatgaaagaatgccttgccaagatacgagacagagatacagtggaaatatgaaacttgtctaagttggatagcgttctgatcagcctgcaagcaaaactattgtacgtacagttagctgatcaagaattatctcaaacttaattatgtcttcataacatctttcattgagatttcttgccggcaaagtatatatgtgacttataatgcatatagaagttcgttcagtgcagtttcttggaacgctagagaggatatatgacgagaacatttttttttcctgattcacaaaacagtctacaaatgatagttaatttttgtttaaagataaaggagatattttttattgcagtataagatatcgtctataaattatagttaaaaccaacttatgatgaaaatgaaattacatgttaaaaaataaaaaagaaacgttaaactatgttttctccctatacaagtcatttatatcgggcaaattgagtaaatgcccatgtacacaaattgagtaagccaagaacaaaaccattactacaaaacaatacttatagtgttagtttttccccctcatcaatgttggttttgaaactagcactaattattgagcacttatgagaggatcctcatgttaccggttcctaatccgagagtgatagggtgacaatttgaaaaacaaaagagctggtacgactctattgaagccgagccgatgcatcatcatcgagcatctttatccacaaaacaaaacaatcacgaatccaactaaagtagcagtcacaaaggcatcctaaaaattggtatggttgaatcaaacactttacagaacatagatccagttttttgcataatctctaagcatatacaaacatccatatcgaacttttttcggaacaagcacaagacacgcttgttaactagaaaaaaaaatcccattgagtgtcaactcgttttttcaccgtgatggcatcagatccatcatccctcgctcctccggcatgaactgtcactagctcacacgtcgttgcaatcagtgcttatttatttgaaaaactagccatgtggaaacacattaatactggtttttttaatgaaccagcacttatgtggcatcattaatgatggttattccatgcggatgacgcgcatgggccggcgggtggacaggaaaccgctatcaatgctgagttttccttgtttggtattgatagggtgttactccctccatcccataaaaattacatttctagctaatttagaacaaaacaataggattggaaaataaccataatgaccttatttaatgaacccattgcatgcacacattccatatatacaaatgattaaaagaaagtttgagagaattaacccatataattagcatactttaattacaagctgagagaacttaaggaaacttatctagatgaatcaatttgctagggcccaaatggctagatatataatttttatgggacaaagccttagagctagaaatgcaatttttttaggacggaggtagtacgattaagcagttttgtacttcctccgggctaataatacttatcgttttaggtaagggtgaggtcaaactttagaacttttgattatgaatcatttttaaaatatttgtctttcaaatatgatgactacatgtatagattagtcttagaaagtacttaataaaatcatatatttgttaacacttttatacatattataatggacaataatggttaaagttgtttttttaagaccgtgctcttatccaaaacaataagtattatcaaccgggagggagtagcagtgaacatggcttaacatgtgtcttttagagtctggaccctctgcttcgttgtgcaaaacatggacttatttctccacatgtactatatatgattagagaaatggaagtttttatttctgatatatacaaaaatggaacgaggaacatgtttcaaagtaacaaaccacccccaacacacacatgaagaccaattcgattcaatcagaagcagttcgaccatcacacataaccgagattttaatttaaagagattttacggcctagcagaacagtaaaatcactttaattttttttatcactccttaattcaatttaatttgagggctcgttttggcgccggcgccgctcgtcggagagctgctttgcgaacttggcaagctgatctctgttcgtgccttcgccggccacatccacgtaatggccggtctccaggtctactcgtgagacgttcttgtcgagaagcatttccccaatcttcaccaggttatccatgttttccttggagcagtcgtcgatcgagcccgcactgcccgtcaactgatcatactgcatttacactccaacagatcgatcatatatcgatacaacatcttgttaagttagagaaaaattttctaattgtcttctttatcgaagaaaagtcacaaattacgactaagaacaaggtgaaactagaccttaggctccttaatttgaaaagaaaactagagttcaggctacttttgaggtcctgtttttccccaaatagactcaaacgcagtgcaatatatggacattgtttaggtcctgtttaggctactttactcagttttgacgttccactttgatcattaattttttattagaatattgtgcaagtcttataaagaaaaaaatatacttatatgatttttacgttttcaaaatattttgagatactaatggtcaaagtacggtggtactacctctttatggatagtaaaaacttctcatctagcacaaataggtattttacctgtatgcgtaagtagttcttttcgcattgaagagcgctgaagagcacaccgaggtggatgtcaaccatgtcagcactagcagaagtaaacatgtcgatgatgggagctgagctacccttgatgagccagttgaagattccccacttggcagcgtccttggccttgtatttctgatcgtgattcgacccacagccgatggagatcaccatgaacttgccatactccgtcggcttcaccgggaagaagtcgcaatcttccttgtcctcgaggatgatatacttggacacttggctcattgcacacaatgtctacacatacagttccatgtctatatattattatattccaacagatatactccctccgtctctaaatatttgacaccgttaattttttagcacatgtttgactgttcgtcgtatttaaaaaaatttatgaaatatgtaaaactatatgtacacatataagtatatttaacaataaattgaatggtaggaaaagaattaataattacttaaattttttaataaaacgaacggtcaaacgtatttaaaaaagtcaatggtgtcaaatatttagaaacagagggagtattattaggactcttttgcagaatgggattttcacaggaaatagtttgattcccttaaaagtcctaaaaaaagaaacctgaggtttgcatcggcgacacgtggtgcttaccgggttgttggcggcgaccccaccgtcgacgaggttgaactccctcgtctggccattgtcgtctttggtctcgaaatagtgcgccgggaagaaggtcggtgcggcggaggtgctgatcgaaatgtccgacaggagagcattcttcagtggcttgtacttcaactgatcatcaccaaaccatccatatattagaaattccaaacatttcattatcctttatagtttatacccatgtgtgttgactataaggtttggtcccgattacttcttaaaatgggacacttttttctttatataaaacgtcggcaacagcctgatcgttcgaaaaaaagactatacacaaaaatagtttatctttggttaatcttcattcgccaaaaattctcttgttctgattaagccacctaattaaaactgtgcacatcatcgtcttagctctatttgtggctatatattccactggaaaagtggatattgacattgatgattgatatccactactagagcaaaattggtggtagctgcttcactgatggggggtagacgaaaattatgctcgtgtgtaggtgatgagcccggtcactgaaacatcatgggaagaaagaaaacgacgctgtacctcgaatttggagaagatggttggttgcaggttagcgatgtcgaaggtgggaataaccacgttcgtcagcgccttgtccagcctcgtgtcgccgagcttctctcggagcagcgaatggaggtacttgccgtcgtactttgggccactcaccatcctcagcgtgccggcgatcttggacaagacccagttcctgcgaattcaccggctcattcaccattgattagaatatatatataaataataatcaagttgttgcaatcttcagcaagcaaacgatgcatgttgtactaagaaatgtaattttatatgacaaattggtttgctatgtgtgcatgcatatgcatgggactaggttactacttctgtgggaagatgctgggcgagtgttcgatgtagaatttggccaattcgtcggcggcgaacagtggccggttgttctcgtttggagcagtgagcatcgccgtcaggaggccaccggtgctcgtgccggcgacgacgtcgaagtagtcagcgatcctagcatccggaccatccagtttctacacaaactcagacaagtcatcactaataattaagtcacagtgtaacaagaacaattcacaactttagttcaattatattgttcatcacttacttggagctctttctcaaggaaggcgaggatggtggccgggatgatccctctgacgccgccgccgtcgatgctcaggacggtgaccatcttgaccttttcaggagagctcgaacttgcaccttccggtgagctagcacttgccatcgttttgctactttgatagctcaaaatcaggctaatattgatgcaacgacttatggaacgaaagaaagaacaatgcaagattggcggtgattagcaggaaggcaagcaagcaatttggggttcttttataaagacatgcacgtttgcaacagaaggaagcaaggaacaaagattggccaggtcagctgcagagatacataggctaaccggcagttgccaactaagactaataaaaacttcatcaagaaaaaaaaattaagcctaataaacaacatcgtttaattagctttaattaatcatcagttcctttcaacggtttggtgccttgcttgaacttttcttgaaaagaatatctattaaaatgctcttagtttgagaagaaacttaacaagtgctgcgtcaactacaacttgtcatataatttcgcaatgcttgcagatcgcgtttaattaggataacatactgagacgtgcttaattatattttctctcgagcaataatggaaatgataatagcatgcatggaaccaatgtgggagaaaagaattaatgtagataaaaaggaataaaataagacaaattaactaacagcttcggttaattaagttgcatggtttgcagtcaccaatccaggaggaagaagcgaaaaacagaaaagaaaattaggggggggggaaaggaaaaggagataaggaaaaagaagaggagggggaaaaattatggttggtgtattttactatatttacgtggtttttagtagcaataagcatccacacatctgctccgagaggttaagagatttgcagattttgaggagaaaaaaggcggatatacagtatatattacatatttgacattcaaggaaaaaagaaaagcagatatatattgcatatttgggttctggttacaacaacgttcactctgaaaagttaagagatttgcacatgttgatagagagaagaaaaaggaggatacttattgtatatttgggttctggtcacaacaatggtactggttgtttgagccatgcattaaaagccacatccaattttgttttgatttcactatgccttggtttttagttaagctataggagtatctatgttaccttaaaagagagaatcccttatataccactagaatttgaccagtttttttatatgtcacttaaaattggtttctcccttatatgccactagttcaagtttttctacccttttatgccacacccaccactatagtgttagttgactgttagttaaagattagttttttttcgtaaatgaccaatatgccctctcaactaaaaaatgtgtaaacttcaaaaaaatcataactaatttattttaaatcctttttgagtgaataaaattttgtcagaaccagtgaaaaatgctctttatattaaaaatattgttagaaaactgcatgtttcatgcttacattgaaaatttatttgtgatggtaatggctaaaattgcatgtgatgcagaaaaaatcaattttcatatgttgtatccagtagctatattagtactaaaatacttattattggttgtatactaattctcaagggcaaatgcgtctttttacaatgaagttaatggtcaactgacggtggactgacggcaatggcataaaagggaggagaaacttgaaccggtggcataaaagggagaagccaatttgaagtggcatataaaggagccagttaatttaaagtgatatataagggattctctctactttaaaagcggagttgtcctccatctgccccatgtagagcagtagaggtcgtctgctccttctcgtgtggtaaccattgaagaatcctctgctttattatccataatccatccacccagccattactcaattatatgagcttgattcgtgtttattctcaattcatccaatctccaattatatgggtctgatccattgcaaagtacgggcatattactagtaattataaaactctaaacctaaaatttgtttctgtttgcttgttcatgaggctttgactgatatccatatatattggattttctcaaatcgtataagaaatcggagccatcttttcgctttgcaaacgaaaagtaatttgtgaataaaaattttatatatgtgttcttagcaatctaaaagcaaaggttggaaaataaaattcgatgaaaaaacctcaaaatcagctcatgagaaaattcaaattttagctgataattgtaagcataagcgaaaagatgaggcccagatttacatttccaatcagacggttccgttcatatacatatgtatatatgtatgtatgtatatatatatatatatatatatatatatatatatatatatatatatatatatatatatatctctatatataaattgctatgctcccctcacacacaaactaagttgtccagttgggggtggaaaattctattattttggttgaaatatagaacggcttgtcggaaggtatatatatacaaaggatgagataattaatgtttccaagtacttgcattgacatcgtcaggaagtcttagtgctcttaagaaacaaaatatatgcattacaatgtaaacatgtttacaacgaggaacagatgtaatactaccagctaagacctaagaagatgcaaacataaatccaccaatgttgtctctcttttcttaacgttatcttctcaaagtagaacgcgtgaaacaaaaaaaatacatacagctattatgattgataaataagatgctgtgagcttgtgtgttgtgatttgtgataatgatcatactaaaaaagctgtggatccgtgttgtttattgactacttcgaaccaggtgggaattaaccaaaaaaataatcgagattgttaacctggttgttgagtggaaggtaaagaaactaagctattgataaatatttaattagttattttcttttgtgtcgcacgcaatttgtgcttggagatgaagtcggtttgattgacatcaatttcagttttgcaagtctatattgatggaaatagcgggcacacttcccttccttcacttcatgaataacttcatgtactactgctgaaacaaaccatgatgacagggctgcgcaaacaaaatagtagcccggtgaccgaacaatagtacaagtcttaatcatattctgtgataaatttatacaggctaacagcaggtccagatatgatcatacgaacgccctccaaaattatcaatctatagtaacaacagaattagaacattacagaggctttggttcactcgcaaagacaaattcagttcagtaggcacattatagtacatcatcattttatgaatacatacaaggaaaaagaattagaaaacagacagtacaacaaccacggcacaactaataatcaacctgttagacaagatacctgtgttacaagtagccagtaagtatggaagactgacagcatagatgagcaaaaatctttgagggactcatgcttttcatctggcattgaaaatagcaatctgagtttaaggtcgaaccattatcatgttgcatccagaatgcccttaaaatggttagccaaggcatatgttaggatcatcttcatctgagtcaaactccacctgccatccaccattgcattttaatagttagtggatacagatgctggtataaatttggattgcacagtggagaggagaaatgagctatcctctatgaggcccttgggtcaaaggacattacctctactgatgccacatcactgtccgccacaaaaatatgaagtgcattatgtgacttagtgtaaaaaggcttagtaattgggaatcattcattattgttgatagcaaaagcaacttaaatctcatgacagcaatacaaagaataattagcctatatgagcaaagctattgttattctttctatattgagttgactactaagaataacatacaaaagaaagagccatacaaaaaaaaaatgtgactcacattttcatccctgtaccatcttccatggccatctcgtttccatcctgaagcagtgaatttgagttcttgctcctggcgtttttggaaatctgcttgctcctctgcaagcattttggttgcagttctgtcaccagcaaagatttttcctttcacagtatctccactccatttttccattggaacactaggagtaacttgggaatcacacagtgaagaatttgatgtcctctccagatcatgagatttcttgttggcgctgtcgatgataaatctgctggactgtgcttccaaaatagcttgtcttgtctgctgaatcaatggtttttctttcatatcactagacctaacaccataatgttgcttaccagaacttgaaacggaagcttctggagaaatagcaagtctcttgttgatctcttgttgtcttgataattctttctccctcagcctcgattctgctgcaatgtgccgtgaacctttattatgcatctgttcatttgttgtcatttagagatgaagaaaataatcaaagaacacgtggtcgcaattttcaacaatacaaaatgcaaaagagacggataacgaacatatctcggtctaacatatatatactccctaggatcattcaacacaaagtttcatgtacaacatgatgcacagagcgctttagaccgaaggaccaacttggccccaagctcttttcattggataagaaactggatctagagagccatatcactcgatgtttgaagcaaaaatagctgacacacactaaagtaacatggacaaatgaaccaaccatacacacagaatgctactgatccaatatgtattcatgacaatccaggaaatttcacaaataagcttcacggacaagatttttacattattctagacggcaacaactgacaacgattgtggcaaagaaattcaatacggacagaatagctccacatcacatgacaacacaatagcttcacaatgctaatctctttaatcaaaacatcaaacacaatacctcatcatacttaacttaagggaggtactactggcttaggacacctacttctctcataccaatccgaattctgaaccattcttatcaacatttgaaccaatctatcttgtgacagtttcctaatccatggttcattcagaccccaaataaaaatcgattggtcaggactagaaatttaacgagccggtcttcgtgctcacgcataggcaagaacaatgtacaccattaagcatctagaatccaagatgctagaatccaactacgtggttagggtaaaggaaggcgggggcacagaaggggatcgcttacggagagcatgaggggggagtcgaggacggggcggtgggggcagacgaggcaggcgaacttgccgttggagagcctcctgaacgaatcgggcgaggacgaggatggggacactgccgaggcggggagcatgaggtcgtcgaggcggcgcttccgctgccgcgcgtcgcgcgcccagctgtcgccgccgaacacgctcatctcggcgttcgcgtcgccgccgccgccgccgccgcagtcgccgccgggaaccaggaggaggggaactctgaccgggccggatttgcgctctacttgggctttaacaagagactctgagtacgatgggctacatcccgaagtggtctgatttggcccggcccatgacgcaacaatagtacggttaattgggctcttccttttgcacagattccattttctaatgggttagtgaagtagtactcctcgttttttaaaaaaaaaaacactttttataggagtgcactcctgccaactttgcttgccaaaattggcttgtttttttaattaaaattttttgttgttttacaccaaaattttgattgttttgcactagaaaattgcttaccaaaaattttgattatatcagtgattcagtgaaggagtaattgtttttggcacatggaagtgagcaaatttctaggtgattgtacaatgtgattacttggattatattcgacccgtgattttatttggaagttccatctatgttccctcattctccctagagagtttagcgaaaatttagaagaaactaccgttaaacataaggggaaaataacttgtacccccatcgtctcaaaagaatgttggttttaagcatttaagtttttcacaaaaaaaaagttgatttctactcctttttcttaaaatatagctacatttagctaattatccaagtacctagaaagtatctatattttttgaaacaaagagcgtaaccacttaattacccttgtcgaattattagatgagcgtatcccttcaatacatttacatccctcgcatcctgcgaccacgtcgtatcttactttttttttttggaataactcataccagacagcacaaattcatattgatagagcaggaaaaaatcataagattataaccctgggagatcgtactcagaaaaacgaagaaaaaaaaccaccacccatgcaccgacagcaccaatacacaaacccaggaaaatgctagcaccgaaccggccaccgctaagccaacaaagaaactacagctggaatcgcccaaaacccaaccctaacaaacgataccaaacttcactctatccacatctttagggttgagggagagagggtgaaagagaagaatggaaccgctctccccctagaccctctgacgtagccaacttgcataaactagggtgctggcacagaaggacatagtctagagcgagcttgcacccattgtatgggaggttttggcaaggggttgcttagacaacgactccagggagagaaacaacgaaagcaccgtcgccaccgtccatcgagttctcaaagagaaccgagactaagttttcacccggtagccccactagaggggatgagatggtacgacaacgccctcaagaggagaagcgagctcgaaaacgccaatgttgccgacctgaccaaaaccgggctaggttttcactcgccgcctatgattccacacctacacgccattgctccaccactggcggccagcctccgcgtgccgccacacgggcactctctttgcgcgctccatgctggactcctacgcactacactgccagccacgcatctaacgccatgttggcctatcgcccgcctgtcacgccaccttgccacacgcccgcccccccccccacctccacggcctgctcaccgcctcaccctcctcagaggcactgacccacgcctcctccgtgtgagcatgccacggcgtcaaatcggagcctccacgtgctccctttgcctgccgccttctctcctcctcgcgtcgccttcgcgctctcagccccgctgcccgctcatcctcctctaccctcgccgcctctccctccttaggaacgctggggctgcccacgccctatgcctcctccactcggtcgcaccgtgggctgcgccaccgtcgcagtggcctccgcctcctccgtcgtaagcgcaaacccctctggacggcgccatgatctcctctgtcggcaccgcgacctccaccgccagcatcgcgacctcctccacctgcacctcagcctcctccatgggtaccgcgaccgccaccgtcagagccatgacgtccttcgcttgtaccttggcttccttcccgatgcggcacggccagcgccgctccatctcgatctggccacgggagcgccactccatcccgatatgaatgcggggggccagatccgctgccgagggaggtggatccacctccggcatggctggatccgccacgccgaccattcggtcaccacctcccacgacccgctgctaccgagcagcccccggtgtccctgccgctgggcttcctcgtgggggagagcgccccaccgccgccatccatatggccccggctttgctgacgagccactcgggcagcggtgaggcgaaggggaggagggagggggcgatagccgctcactcgaattaaaattactaaacaatatgtttcgtgcgaaaacgttctatataaaagttgtcctaaaatatcaaatatatatatttgttaagtttgtaataattaaagcttaattaattactctctccattctaaattgatctgagtatttcataggtacaccaagaccaaaaaaagctaataactctctcatactatatttactctagcagcaaactcaatgcatgcaccatccccactattttctagccaatagcaaatcaatatattgcatatgggttataaatatatgtgtgcatggatgcatgcatcaatgtccatttactccaatgcacaaataacgaatagaactaataaatgaacacaaatatgtaggtcatttaggaataaacccaaaaaaactatatgtagatcaatttggaatggagggagtatgtgctactccctccggttctattttaattgacgttttggacaatgacacggtctacaagatatatctttgatcttacttttctattatagtatatataataaataaatgcatgtttatttttattatagtactttaaaagataaatctgtatatgttgttctagttcctttaaactaaatatttttaaaggtattgatgattaaagttataaaaatttgacctcaaacttgttcaaaacgtcaattaatatcgaaccggagggagtaatagctttctcatgtgcgtcagcttaattttcttcttcatttatggagtcgtaaatctatgtgtgtggacgtagcagttcatgttcatgctctgttccgagtcctgtgacacgaagatcgaaacaaaaacacaaatcgaggacgccaactaaaattgctgggcgcacccgcaaaccccactaccaccaccgggcccctcttcgtcctcctccgttccatctccttctcttctctttcccagcagaatcccagtcaaaatcccccgtgtcctccccccctacggcggcgaggcgaggcgacgcgacgccatggatcccgccgccgcgcggcgcaaggccgagcggtggataggcgtggcggagaagctcctgatggcgcgggacctcgaggggtgcaagcagttcgtctcccaggcgcgcgccgacgacccgaccgtccccggcgccgacgacctggccgccgccgcggacatcctgctctccgcgcagcggcggcgcctcgcgacgggggcgcccaacccgtacgccgtcctggggctcgactgcgccgaccccgcgtcccgcgaccccgacgtcgtccactccgcctaccgccgcctctccctcctcctcaaccgctcccaccccgaccgcccctgcttgcatgccttcgccgacgccgcccgcctcgtcgccgaggcgtgggcgttcctgttcgaccctgtccgcaaggcctccctcgactccagcctcgacgccgcagccgccgcggcggcacctcgcccgcctcccgctccctctccacagaagcagcagccgcagccgcagccgcggtcaccgcggccagcctcgccaccgcctgttcccgcggcaccggaggtggcctcggcggtgtcgacgccgccggcgcggccaaagcgcgggcggccgccacgcgccgctaaaccccaaccgacgccggagcggcagcaggaggcggaggtggaggcggcggcgacgttctggacggcctgcccgtcctgctgcaacctgcacgagtacacccgctcctacgaggcgcgcacgctgctctgccccagctgccgcaagccgttcttcgccgcggcaatggccacgccgccgcccatcgtgccgggcaccgacatgtactactgctcatggggcttcttcccgatgggattccccggtggccctgcgttcgctcgaccaaccagttcttcttcttcttcttcttcttcttcttcttcttcttcttcttcgccgacgaagcaagcaccggctgctctgggattctatccaatgggaccctactccctgccattgccagctcaaggcgacgctgccgagggcaatgcagcagttggttccggtgatggcacagtgacagcgccgtcgccgccgccgccgccgccggcggcagcgccattgccggtgaagcccaaacttgtaaagcttggggcaaggaagcgagggaggcccaaaagcagtaagaacaagcatgtggtgatcgagatcaattagaatgtttttttggcaaattttgctcttcgccaaactcatggttctgaatgtgcacgatagattctttgtttgctgatgagaggggcaaaaatggggtgaaaatgaagagagattggatcttctacaagaacagcaattttggtgatgaacaattttcctcttctttcagttggaaagttggttctcattagatggttagattctgtgtgttgtgccatgccacctcgagcgcaagatttgttgttgtaaattgtaagattatcagatgggttgttggtagtgccaaatgtacattactttaggatgatgcaacttaatctttatcttcaggagaaaaaaaacaccaccttagatgacaacctaatatttcatctacaatctcatatatggtctactaaatttatttttctagacatggtttgtcaaaccagttgttaataactaatattactcctaactcgattgttaaaaaaacatattaaaaattatttagtaattcccgcagcacttgggaatcaactagtttctatacagttcaaaccatatattgctcaataattataaagcttttacttccataaatataaatataagagattctaatgtttaaatttcattcacaaatatagaagatactatagtattatttctcccactcaatcactctataggctctaatcgacaacactgctcttcagctgtaaccagctatgctatagccgatgtatatattttctttaccatgcactgtagtggctgctgctgtgcagctacaatttagctacaccgaacatacccatatttattttctccctattttaccctaacaacccttccctcacccacccattaattaatgagggcgtcatagttattctctttattctcaagccctctttgattttctagcaaaaacatataaatttggagggtttcaatactacagaaaaaatttctatcaaggttttttatataaaggagtgaagcatatactctcttgctcttgaaattactatagaatgggtgatcttatagagattttataggaaaattagcaaaagctccatcctcttgaaaatttttctttgatctatatctcccatccgattattactttttatacggtctattcaaacagtcatttatatttctttttgtttcacaatactctattttggatttatattcctatcaaaatcgtgtttttttcaactgctccattttttcaattccaagtttgaaaagaactaaatctctttagtaaccctaggcatagctataagcttttgaattgaggtcctctggtgtgaagtcacatggacatgatcactgattatgtgggtcactggggatgaaaacggagcggatagtttctatccactccggagaaaaacaaatacatatacctttcggagcgaaaactctcaaatagttcatatacggatgcgaatgaatggtgctattcaaatgttcgctgaagagataaaagacataccccatttctttataactttacgacattcaatatacctttttagattttaatagttgcccatctcttaacacttgtccacactattaatattatttaaacctttaaatattttgtaaattatacaatatttcatataaaatggtctaattatatatgatgatatttgtttctattagaagttaaggtggtttccgtgttccgagaaaaaattgtttccatattcgtgtatgatcatattcgatcattttcctattcgagatatttcgtatttgtttctatatccgagctattcgcattcgttttcttaactagcaaaaaaactgaaaacaaatatggtatgagcattgtccatccgtatccactctgttttcataccacgtcggtggataaccgctattttctttttccattttctttttccctccgacatttggataaccgctagattcagcaagaaggagcccggatctagcgtcttcgttctttgtcggggcagctcctgcgtcccagagcccctgcaagcccgatatccctgaccacaacaacaacaacaaccataacaaatagtgtgtatgacgatatgggaggagaaaaagacatgtcggttactataggtgcatgtgaaggcggagaggaggaactatggtggctcatggagaaagagtagtgatggtggctcatggagaaagagtttgttgtcgatacaatcgctaaccgagtttgttattttttttaagtattgataatacatgggccaccagtcatcgtaaagaaagaaatactaatagctactctttccgtttcatattataaatcatttgaattttttcttattcaagtttgaccggtttataaaaatatatattaatattttttttaaaaacgtattattaaaatatattcaatgttagattctactccctccatactcacataggaagtcgtttaggacaacgacacggtttccaaaacataactttaacttcttgtttctaataaaatatttattaaaaagttatatatgtagagcctgtttggtacagctccaactcctaaattttgctcaacataactttaacttcttgtttctaataaaatatttattaaaaagtgatatatgtagagcctgtttggtacagctccaactcctaaattttgctcgaggagataggtctggagtggagttgtggagctgcctaaacccagctccacaactctagttcattttatgagagggctccacccagctctactgccagttttggtggagctgaaactgtttggctgagctccaactccaggaggggtggagctggagctggagctgtgccaaatagacccgtataatttgatgaaagtatttttcaagacaaatctattcatataatttttacattttcaaactcaagttcacaataacttgagagttatttatgatttatatttctaaggtttgacttaaacattatcctaaacgactttttttataagtactgaggggtatgaactagtttggcattttagatgctgttaattttttctataaatttgtataattttagatgcagcataatacgacgaaacagagggagtagttcgaaggtgtagtagtcgcgtgtcgcgaaatgtcccgtctcgttgtctcctctgctccttgcgccgccgccaaggcgagtcgcggctgagccgggagggggcggcgatctccatttggcgagcagagcaggggaggggattctggtgagcatccacatcctctttctgattcatctctctcccaccgggactactgttgtctggaatttgctttgcgttaaccctagcttctcttctagatctggaagaacctcttctcctccttaaacctctcaaaagtttgggggttcaactgaacccccccatgtccaaagttggatccgcccctgcttgtggacagtctctataacagtttttttttcttcttactctgtgctggtgcaggtctgaactgatcatcatggtgaaagaacatgcagagaaaggagatggcgttcaagaatgccaatcgtctcctgcgctttcagaagataacttgaggcacagtttccgattgggagatattacatgggttaagcacactggctcgtggtggccagcacaggtacgattgcatacatcttccgagctttaactttgaatgcacaaagtatcgttctttcataagatgatgagatattttcagtgaacggtgcattaggcaggctatattctaaatcgtaaaatattaatgttggctgggataatagattgacatttgtagatatatggaattggcatgaacttctttttgaagttcagatgatgcagaagctaagaagtggacttttgctgactgctactttgtccatgatcctagttttcccatgtgtatatttacactggttttgttttgtttttttttttcctctgaattcaaggtcgttgaaaattcatgtatcagcagcaagcctaagaagacggccaagcatcatgttccagttcgtttgtatggcacttgtgtacagtaagggatcttattaatgcgctatgccttcttttctttccatgatattctggtgacaaaagtttatttcttttactattttcagcatgtacgtagacccttggaagtctaacatggaattcaaaatggtatgcacaatatctatttataaggatactgatatattgtcattgctcccgtgccactcattgtagatttagaaagaaagtgcctctgacacagttgaccatgaattccataactcacagtcatcctccctttctcctttgatgttcccctcactttaaacctctcaagtaaaaaacttccaaattgaacaacttgactcccaactgcatttcaaactttgaaccataaaattcccaatattataaaccatggttcaaactttaaactatgaaaataaaacaaatttcaactgcaaataacaactttcaattaaacaacacaattgctttcaaatcaacactttgaatgcttcaggcatgacatcagatctaagggcagcggcagcacgtgctggatccgctagtagcagcatggcagtggagttaaaaaaatgtgccagatcaagtgtgagaatggagtgaatgggggagagaatgaagaagtgaaaggagattttcacatggtcgcaaataacttagctgcctctaaatcatagttggcctgttctaaatttctactccctctgacagatatccaaggcaaccatgatatcactaggtgctttcttggctggttgttggcttataagcaacagccagaatttgaattctagaacttaattttagagttgatttgggtttttgtaattgttttctatttttcagccttgtcttttggactgctaagaaagtaagaatagaaatataaaagtcttaccctaaaattatatttgattgcttcgtttattttcttcggcttaccaggttatcactgcagaatgataacataaaccagtttagaatggttataatacaactgcttgaaaaagctggtttgggctttcaaacttttaaaaaaatctgtgccatttatcttttctcttggaagaaaatgaatcatatcgatattcattttatatttcacatatgagctcatcgcatgcagatgctgaagcgagagaataaaagtgcaatggaagcattccatgaggccgttaagaaggtacgacagtcacctttgcataattgcatcacatatgttaagatgtaactatgtttagctgctgaaaacatcccataatgcaggagctgtcccacgttaattcaccttgcgattctactgaagaagctggcaacttgaaaggtgagtttctgtttttacctgaagatatatatcacatatacaagtttttttttactcagctttttagtggttatggataatgatttgatcattcgttcaatcccttattcgctctttattactagagaatttttgttcttctgccatccagaatttacccctcttgctactactgtcagttagactttgagtttgtaaaatgaccattccaaccctgcctcaaagctaaccgttgtagaccttctgtcagtgggagaaaatatctaggtggatgactggataactggatgacacagtgaggtttataaaactgatatatgggtcacattgtcagtaactcattgttgaggcatgttagtctttattggaatcgagaacatttgaacaagcagtagtggaaaacagaaaagagccatatggcgatactaacaatagatagagcagaatttggatgacagaagaaagaatagctattttactagtaaaaaataagaaattatatgtcaacaatgctctttttctgttaataaaatccttgcaatggtggtattaagaagtagtatggagcagcatcactttgaaggtaattgatatacatgatcttcaaagttcaaacatcacataatatcaaatattgctcaattggatatgacgaacataacatgcaaatgtactctttttctatgaaacaaaaggattttttttgcttggtgaaatgcaagcatgtataagtttaaaactgtcattaattttgatgatatcaagtgggttctacagacaacatgtcaatggcacattggtattatttcctgactcatgccatctatttagtattaatccatttgcccctaattttgcttctttactatgtacctaaatttattttcctgatggtgtgactgaattggacacagccaagacctcttccaagaaagtcagaaagcaaaagggcttaaaggaatcaccagcctctgagcatatgggagaggatacaaaagaccagcatagtgcagagcagcaccaagaacttggatatactgcaacaactggagttgccactcgtaaaggaagaagaacgcgagaaggtgcaagacaactcagtcctactgatggtgaagatcaagccagtggtaaaaaagcttctattgagggttcaagttataagacagaaaaacaagttggttctgtatatgatgaagaggcttgtaagatgacaacgacagagagatcagtgggtagaagggaaggactgagacgatctgcttgtacacccatgaaggcatatttagatccatcggaggatagaacatcacttttcagtgatacaagtgcaagtgaaggtgcaaatgaagtaaatagaacaccagagaattcaaatcagcatgaagatgattcaaccatagatggaactttggcttctcatgcagaaataagggttatggttagggatatactgttcagtgacattattgccaagcagcatgctgctgagatggcatatgtagatgaagtgatcaatggcatttgctgcgctagtgaattgaacataactggtgatcctactcctgttgcaaagggtggacgaggcatcaaacgaggtggtagtagggcagaggcggagtcaagtaacattacacagagatctagaaaagggagaatagatcaagcaagtagcaatggaaagaaaagagctaaggacacctcagaaaccatgaatcatgacaacagtcccaactctttgagagggcctttcgatagtactgtaagtagattcccttgcccacgcccatacttctaaaccttactatctcaaatttcaacactaatttgaccaaaatccaccagagcagggatgcagccatggaggaactggggcaagttagcgcgcgtcaaatcaggatcatgcagagtcttgctttgattgctccgtcaggatccccgtttggcaaaaatggactggttgcatcaaccagtttataattctgagttaattcgaatatccttgaaaggtattcgacagatattcgaaagctatcataactcatgaactcagcttcggttacacctaaccagttgctcgcttaggtcttttggagaaacccacaacgctacatggtcttctagaatgcaatgcgattgcctttatgtgtagtagaatcgactgaatttaattgcaatgtgagcacaacattgtatctgtaaggccacaaaatggtcccagtatactgccaactgaattcatacatgagtacactattattatgttagtactagtaccaagttaaggctcaattattctctttatcttaagatatcagaatgcgccaccgtttgaattgaggccccctattgcaatgttcgtagtgatttaaatagcaatgaaaaaactttaaaattaagttttaaaatttcaattttggcgatggttgatttcatacaaggggaactatggggcctgaaactttggtgccaataatgcattggcctactggtaaagttaaacagtgtatgtaacagcttgctacagcaaggttaccagtgttgaccattgcagaattgcaggttagagttaaacttgagcttggaggtgacgactttaaaccttggagcagtatttactcttgtctgccttggaggtgaccaacagaggactgatggatggactgaaaatcttctttctttgagaagttttaggtgccggtgaagaacgtcagagggactgtttcatcttcatgaagaacaatacgcatctgagagcctgtcggcattgacatgacgtcacgtctgcagatgattccttccctgaacgatcaagataaacaaggttccctgttggctgcatggcgattgtcagcccaggtctcctcccgagaacattccaagtgctcatcacctaacggcccgttgggttggagggagtttttaggagggattgagagtttagagggatgaggctattaactgtattgtttggttgggagacatgggaattttggtgggatagggatggggaattgaggaatgaactccctccttttcaatacctgggtagggggtgggaattgggagggaattcctcctttacttcgcctaaacaaatctcagccatccgttttcattaatgacctaatcttcaactaaactccctatcaatttccaccacctctatcaaacaagagactgggatgaaaaatcaaattcccatcttaatctcaccatcaattctctcgtgtaaactcctaatccccttccctcatgttgccaaacaagccgaagctctagaaaatgtatgcaaaattagggaaaaaaagtatggcataacccttaaagataaataaatgaacggagccatcacgatataagcgaaatgatatatttgcaaacgaaaagtaatttgtgaataaaatttttatatacgtgttcttagttatctaaaagcataggctgaaaaataaacttcaatgaaaaaacctcaaaattagctccaaatttaaggttgaaaatttaaattttggctgataaacataagcataagcgaaaatatgaggttagaaaatttgatccatattaagagaaaaaaaattatgtatagtgaagttttgatctcgtccacctttttcacaatgtgatgtgagaagagcttcatgcttaacaaaagagaatgaagaacaatgtgaatatatactagcagagctggatccagtgtgggtgccaccctacctcgctagatcaccattgatagaactagagagggaagggggaagaagagggagagaaggaagaggggaggggagggcactaaaggaggaggaaggagatgagtttctctctaattttattttggatccgtctttatacacgagcacatacatgaagatacatagtaacttctattggtagcatgttttacctatcaaggtctcgtttgaaatacatgcaactttttttttgacgtaatacctggaacctctttaatatcacacggcttaaactagctcttgtatgatccttcacaaatcagaactacaaaattaccgtgttccaaaggatgtcccaaagtatttcgaaatttgtagtaccaccacattaaattccaggaaaaaagctagattactcccaaagcacatttgttatgaatcacaaaacggggtgcgtttttatgagaaagatgtaagcctttgctgcctggacagggaagaagaaagaaagaaagggcaaaccaaaaaagtaaaaagtgagtgaaatggtctgcatacgcatcatgaagcttgacctgtcactgccttctctcctctgctttcgattgcgttttgtaaaccaaaggggtggtagtactgaagctgccgcgtcgcgaggggacacgccataaaggccacggttaacttgtcccttgtctcggtttaaccggagaggagagtgaggtcgccatggtgaaaaaaagctgcggcccatccggcatttctcctttttgtttgatattacaaggtagaatcacaggcgcacacaccactatacgcgcaacatcacactgacatcctataaatgtgtcccctaacacatgctataagatgtgaaaaccagctatatatttctgatcttactaaagttccgttgaaaaccaacatatacatgcttaatattcgtggagattttaacatagtagcagagtcatgtatcacttagtgcttccccggctccatccggcatttcactggagcgatgccggtgaaatggcaccagataaaaaggctcagctggagagagtttttttaccactgtttgggggtatgcaaagccctgtgccgcttgtcttcgacatcatgagtttccttcttactctctcagttttaaaatgtttgacaccgttgattttttaagcacatgtttgaccgtttgtcttattaaaaaaatttatgaaatatataaaaccatatgtgtacatgaaaatatatttaacaatgaatcaaatgatatgaaaagaataaataattaaaaagtcgacggtgtcaaatattttaaaacggagggattatatttgtgccagagaggcttcgaatgactacacacggccctgctgcatgaagcagtaggtatcgtcgtttgggtatcatgggcaaaaatagcggtagtgtgtgtaaaaaaaagtttgattcgtctttaattaggctgtgtttagattgatggtaaaaaattttaagtcacgtcaaatatacggacatacatttaaagtattaaacgtagtctaataacaaaataaattacagaatctatctgtaaactgcaagacgaatttattaagcctaattaatctatcattagcaaatatttattgtagcaccacattattaaattatggagcaattaggcttaaaagatttgtctcgcaatttacatgcaatctttgtaattaattttttagtctatatttaatacttcatgtaggtgttcaaacgttcgatgtaatagagtgaaaaattttagggtgggatctaaacagggccttagacttgttataaagttctgattgatggtagataaaaaataatttatgataattgtttgaatgcacgtacgaataaactaaatgatagaaagttgaaaaggttattttctaaaagttttcaaagaaatgctaatgaaatggagtattagaaagttgattaggagcttggaaagcatgccaacgataatccattatctgttactagttctaaagaataggccttaagtgggtgtagtggtctttattctttttctagtcgagtatttgacaatgcacaactgagtttatggacgatctaaaatatactgcttcagataaacttatgtatctacgttttccttcttccatcggtctacctcttcttttcttcatggccacttttgtagtctccggtaaggaacgattgtatgccgaaagcttctaaaccctggagcgatgagcatgttgcaatggcaacgtagtatagaatgggtgttctcatagcagcttggcacaatccaaccgatgtcaacatagatgagctcgcagtggttaatactacgggtccttcgaatcacaagaataaaaaaacagaaaaatagaaaaaaaatctaagaatctgacaggaatataagtgtaaagtagataattgcaaaccacagaaatctaataagagagatatattaaaatgaaaatttttcaaaatgttggagctctttctaagtttatttcaaattctataggcaatgaaccattccatacgaatttcataggatttggaaaaccccattcctttgtatctaaggagcaaaaaagaaaatttattgaatcctataaaattcaaagataccctacatggactagggacgaaaacagtcgaaaacgatatcattttcttgaaacgacattggtacggtcaggaaagtgagttgacacaaacaaattctatccaaatagcatgtctctaaatactaggtgttctaacagagggaaaatgatctaatagtataatgtggattgttttataaaattagtgacataccaatattactatactatgtagtaaaggccaaacttagacaaaaagtcatatttatattttatataacaaacattttattagataaatgaaattgtaccatacttctattgtgtgtaccatatccacatatttatttattgaaccgatgtacaggagtatactttgtgttaaaaaaatccaattttaaagattaatctagacacgtattgttagaatttgattttctttttatagagggagtaaggtttaaggggactgcctcattcatcttttttttttaacaaatgactgttgactgcccctatcgtgataaacatccatgagaaggacttaattaactacggtgcactgttgggataaaatccatggatcggccgacgcgcgcttttgaccgagggcagccgacaaataacgttcaaaggagggtccggtaaagaggagggcatccccagcaggaattctgatgaaaatccccattccccaaaggctgccatcccctgacacctccctccgatcatcccagcctccatgtccctcccctgtccccccccccccccccccttcttcctctttggttgcgtcttgcgtcgcccaacccaatccacccctaaagattaatttagagttaacataaagcttaatttagggcatgtttagatacactggtaaaattttcaccctatcacatcaaatatctggacgcatgtattgagcattaaatataaatgaaaaaaataactaattatatagtttgcgtgtaaattacgagacaaatcttttaagcctaattgcttcatgatttgacaatgtggtactacagtaaacatttactaatgatggattaattagacttaataaatttatctcgcggttttttggcggaatctgtaatttgttttgttattagactacgtttaatactttaaatgtatatccgtatatcttatgtgacaaccaaatctaaaaaattttctccaactaaacaaggcgatagcatctataatttgcttggaagcatatgtataattagttcttttatattcttatataagagctaacatttatcattttcattttttttctctcctccacctgagtatatatagttatcttatagcctacttcctctatctaaaataggattttggacggataggacatttcacatgaattctctaaaatatctcatccgtccaaaatttcttatattttaggaaggatggagtcctattaaacttaatcttacatactcttttcaacttggtaactgagtatatatgaagttgtttagatttacatcatttcaaaccataccatttttaagtacaattgccaaatatgagcatcaatttagtttattgccaaactttactaaatacataagaaatcttaccagaatttggaaagttatattttggatacaatctgaaccttctctttatttcaaaataaatatagctgtgcagttaaaatttaaactaaataactaagcccgagtttagtttcaaactttttcttcaaactttcaacttttccatcacatcaaaactttcccacacatataaatttataatttttccatcacatcgttttaatttcaacaaaatttctaattttgacgtgaactaaaaacagcctaaccttaaccttattttggttgtgtttagttcagcgcaaaatttagattttggttgaaattggagatgatgtgactgaaaaattatgtgtatatgacaggttgatgtgatggaaaaagactgaactttgtatcaaactttaaatctaaacacagcctttgaaacggaggcagcacacatcggtcgttcgatccgccaagtgaaacgcgccaaaacagccgtcgtcccgaccaaaagagtagcttcccgtgtcggcgccccccgcccccccgtatacatatacccctcccgccctctttcccgcctcctctcttttaaaccccacgacaaccacctcgcttgccattctggactgcgggtgagatcgatggtgacggacggggagtgctcggcggcggcggtgaggaagggtgggtcgccggcggtgcggagccacagcgaggcggagcggaagcggcggcagcgcatcaacgcccacctcgccacgctccgcaccctcgtcccctccgcctcccgggtacgtacgagatcgagacatccacgacgcccacgatggcgtgtgtgcgtgcgtgcgtgcgtctgacgaggttggtgtgcgtgcgtgcgtgcagatggacaaggcggcgctgctgggggaggtggtgcggcacgtgcgggagctgcggtgcagggcggacgacgccacggagggcgccgacgtcgtcgtccccggggaaggcgacgaggtcggcgtcgaggacgaggacgacgacgagggcgagcgcgacgaggggtgttatgtcgtcggcggcggcgacaggcggtggcggcggcgcgtcagggcgtgggtgtgctgcgccgacaggccggggctcatgtccgacctgggccgcgccgtgcgctccgtcagcgcgcgccccgtgcgcgccgaggtcgccaccgtcggcgggaggacgcgcagcgtcctggagctcgacgtagtcgtcgcctccgacgccgccgacaacgacagggccgtcgcgctctccgccctccgcgccgccctccgcaccgtgcttctcaaccgcgaggagctcctcgccgccgccgccgccgccgccaccgacggctacaagcggccacgcttctcgccgaggtgtagcagcctaacctaagcttcgctactactcgccgtacgtacgtacgcggcaaaacgaatctaagctaagctaggggaacaatgcgatgctgatacactactaccggtttcgtgtcacaactagcttggtgtttttttgtttgtttgtattccctccatctcaatatataagagatttcgaagtaatacgatatatcctctgtttcatattataagattttctagcattatccacgttctcatatatatatatatatatatatatatatatatatatatgaatgaatgaatgtggttaatatgttagaaagtcttataacctgaaacggagggagcagtattataaatctggacaaattttctttctagattcgtaatactaatatgtatcatattcttctaaaatctcttatattatgtaacggaggggtactgcgtgtcatttttccttgctgcttgcctgcatggtactagtaggctggtaattgtacttggcaaccagtatcgtcacgtagactttgtcaggtatactgttgcacggttgcagtgttgcgaagttgcaacagtggagatgtgtggcactggtgcactttttgtccaccagtacttcagtagtttcagtattggctctactgcagatcacatgaatcccttcgtgttttgccggcagtaggggccagtgtgctgtacttctacaagtctacaacacgacagggcttgctcctgctgctccggagttaatacatgcaggaaatgaaatagtagaagcaaaggtctaaatgcagggcttagttcacattcatttcaaaccatgtcattttctagtaaaattatcgaatatgttcatccatttagtttcttaacaaactctggtaaataaataagaaattaatcttgccaaaacttgcaatattaccaaattgcaaaaattttagcattgataaggtttattttagctacaatctgaacatgcccgcaatgttgcaactgcacgtgcaaagtcgtggtatctgatagaaattgaatgttgaggaatcattacagctccccctctaagtaatttttagaagcagagagacaatttcactctatattatctaggatcctgaaagcatttggatactccatcccaatttcaagattttcgagattttcccaaaataatcatctaacaaagtatctcttggtttatttgtgctaaaagtaaatgtgtatcatggaatgtcctgcatgcacgcgtgcaaccaatcaattaatttatattggtttaatccatgcaacatttaaagtgtgaattaattttcgttgaacacaaagtgacggagcaccttgatcaatgaggattaattccttggtcttgatgtcatttgcttagaggatgatcaaattgggatggagagaatattatttaggatctaaaagtgtttggtacagcatcaattctacaggataaaaatagcgagtaaggatctcgaagaatattatttaggatctaaaagtgtttggtacagcatcaattctacaggataaaaatagcgagtaaggatctcgaaagcgtttggtacagttccaacttcacgggacaaagaatatcggggtaggagatgtatcaaaatgtcattggaatggtttaagtggaagcccagaacattgctggcaccatttctcttcgtttctctatgtatgacgtttagcttgaagtctactgttaatcttccacatagcacccagttgaaccaaaccagaagagccccttaggaaatgcatggacttgccagacttgtgatgagcattgcagagagctcgaaaagttcagaatgaagaaaggcatatataccaagaaggcgagaacttatgactatcccacacctaacgagtgaacaatgtggccaaaatgatgctgggatgtctaaactcagaagttcagaacaaacccaactaccctgccagactgccacaccatcagttcaagccagaattttcctaacccccctgacgaacaacatctcgagataattggtgccaccaattccaccaaagttcagagccttttatattggatggtgaacaaccaaaccaaggccagggacttcaatagctaaagcacacagatcaactaccaataagaccattgctctggcttacctgatcacagattgctataagtagctccagcatcaactcctagcttcacagcctcacaagcatcacctcacatcaaaagaaacacagtagccttccagaacacacaaaaacaacagtcacttaccatggcttcttctggttgtcatcttctggttctgctcctggccttctcagccttccattgcagctacgcagctcgtcatcttttggacacagcagctgcagctgcagcaccagaggcagccccagctcagccctccatgccaacagttccaaccacgctgcctccgataccttccatacctgcagtccccaagctgacagtgcccccaatgccatctgttcctatcccaaaggttaccattcccccaacagccgctggcacaattccatctcttccaattccggccattccgaccaccataccaaccattcctacagttcctgttaccctgccaccaatgccctcaatcccaaccactattccatccattcccaccacaatcccgacgacgatccctaccattcccgggttccagatgccaccaatcccattcatgtcctcacctcccaaaaccactagcccctgaagttcttcaagaggatgagactgatattcatggttactagtcagggatttggttaggcatatgttgccatcatatcagtgtgtacatttatttgtgttctgttattggagttatactggcttgcattggtgtgattgtaaatgcagctaggcagttgtactatcatgtttgtgaataaatcatttcttggtttgcataacataccgcacaggatataagcttttttattgttctttacacgatcacatacagcgacagagaagaatgtgacacctactattacaaggctttcttctatttgacagaattttagcatggttttagcaatttaacatagtacatcaggaggaagcagacagacaggtgtgcttcttggtcctgtctctgcttaaaagtggcttgatataaactgtttgcataaattttctaagcataatctactgataaggaaaaagctttactaaatgtaagcagtgatttgtctcaattaattcttcagcaactcttcaagtcacacaagataatgaagatatacacatgtatcattgcaacaagataatcttctaacgatattgtaaagaaagaggaagaaacaatgcatgaagccataaattgcaagaaaagaattacgcatcaaaataacacagctgaatcaaaagatcagccaaattaatgtcaatttggtcataaagatcatggagaagttatcataacatctctttcaacatatcaatgctacaagagtataatactaagacgttattattggtaacttacaatagatggtagacaggatgagaaactaatatatatgtatgtttggaggatcaataatctcagtagaacatgattctgccgtttacattggggaactccaatctgaagttgctgctaagaactatcgtcgagtcaaaggctgaatatttcaggggtagtagtagtgcctataagttaaataaataataagccaaatatattaaagatcagatgacaaggaaaaaaaatatcaaaacagggaaaaaggtaaagaaaaatatttgtactatatgtgatatggaatatcttagtacttacactggttaacagaggctgcagtaggcacaacctgaacattgaatctgcatggtcacacttaaccctatgattccacttataggagtagttctattttcctgctgcaggctgaatttactgcattcccaagattctcaattttttcatattccaatttgaacatgaccataacagtaccatctttcccagtgtcatagtcctgtttgatatcttcagcttggtaatgttgcaactgtttcaaggttcaacgcagtcataattaggctgcagaaagaaggataaaaaagtctctgaaagaaatgcacattcagttgtactgttttttttacagaaaatggaaccgcttaagccactaatcatcacctgatgatagactgttcccaagagatcaaatggtacctccatacccacacgagcctaaagtgaagtcagaaattaaataataattataccaagtccatgcttcatacgtagttgcaatgaccaagaaaatgcttatgcaaaagaattagatattatcacctttggttttacaagacaagtaggagcatcttttaggcattcagaagcaaccccaccataagctctcaccagcccaccagttcctaattttatgcctccaaagtatctatacaatgtatagcatcataatatgatggaaagtatcaaatagtcacaaaccatctgtctagccaaaagttgtagttaatgtacacatatatctgtcagttagtgacagtattatctctgctcaagttgaggtacttaattcagtagaacactaaatagcaacaaaagggtgggtcacaattttaaaattacatgaaatggtttgcttaacaaatcggttacctgattaccaccaccatgaccatatcaatgccagatgaaataatggcagagtatattggctttccagcggtgcttgaaggttcaccatcatcattgtaacggaattgctctcccagctaaatagacatgtataaaagaccaatctttcatcaacaaacattactacatgagcatgaattgttgtacgattcaggtatatgtacaaaccttatacgcccagcaattatgggttgcacggggatcactgacctgttacaaaagagactcataaatttaatcgataatataccacacaaaaaaaattgtaaaaccaattttcacatggatgagttttctggaagccgaaggtaaatggaccaatattatgtgtacacatacaactgcaaacttaacctcacataaacaacttgtgaaacgctaaacgaaatacctgcaaatcctagatgaagtttatatcattcgaaatagcacgcattcaacttagctaatgagcgaacccttcagctaggtatggacactaaaactaaaggatgatggattagtactttacagtgcagactacactgaaaaactatcgagttcccctatagaacaattgtctgctctcccttcaaagaaaaaattggcgattgttggctgccacatagtcggacaagagttccctgtggctcaaggttaagacttaagacttgcccgatttggggcgtcggtgagggagatgataatagcgcgcgtggagggggacgcacctcgttgaggaaggacatggcggcgcgctcgtcggggacgggggcggcgatggcgatgaacttgctcttcttgatctcgcgctcgcagctcacgcgacccacgagcgtcgtgtacggggagggggagacggaggaggaggaggacgacgacgacatggcgcgcaggcgggcaggcgccaacgcggccaagctaccgccacaggaggagcagctgcggtggacggcggcggcggtggcggcggcgtctggtccggggagcaggagcgggagagagcggaggcgtggggcaatgcgcacggccgccatggatgggtggaaaccgtgggtgcgcgcaccggttccgtgtagccacggagatgctgctggtcgctctgacaggtgggcccagattgtcagagcggactcgccctatgacaggtggggctcacgtgaacagagggcgaaatactacactcgacaaacaaaccatctacataaatacacaaattatctcggcattatagagatcaacataatctttcaacaattgatcatctttattcatgtagaacggagatgaacacaaaaacaataaaacataaacttcttaagggtcaaccctctagaaaatgaagaggtccaacacaagcaaattcagttggaactgcagcacggacgacatggtagaatcagtttgggagtttaaacaggccccatccacatggtatggaaaccaccattgttgcgatagtggattcccctatacatacactctgggacacaagacaaaattattaactcttccaagaaagggaaacaaagagttcctccactcttcagtagccccagttgtcgttacggatttcatcatcgaacttctgcttgacctcaggatgctttgcaaagtattcatctgctgtcattgtgctgatatttttctgtatacgtgaacaagtatatgttaaagcaaatggaaaaatgctcttaataatggatgcatgcacaaccaatctctgacaaatggactgcaatatacaagtttcgccagagatcatcctcaccttcatctcctgcaattcagcaagctccttctctatcctctctgactccttcagagactccttttctgcttctttcagctcaacaagctgcatatgacgtgataaaagagaaaaggataaaaggtgcatcagtatctaaagggtacagaaggataacctgttgaagcaagatgagagaaagacgggcacatataacagaatgatagttccagacaagggtgatagacttatagttcctcaccagcgcatcaaactttggcttgtactgaggagtcacggtgtcaacgtacttggggatttcaatgcctgcatttatttcatgcttagtatcttcactacaagtaggcggaacaaactatataaaccagaagaattaagcaaaagtaatacttgcatggggtcaattgcaaattcaaagtgtaaggttgatgtgatcagcattttactaatattccaacaataaatttgccttttcccatccggaaaagggcatgtgaaataacacatactaccttctattgactaaatcacagagaagaacatgcatttctgagcatattacagtgccacaaaaagcattaacatttggatttacaaaacaacttgttcctttgaaataaaaaggtacagccaattagaatcattaacatggtaggtagtatgtgctaattgcatgtcagcaacatggtacgaagatatcgtattgattgacattagaaggaactgaaaacagcatatacatattactgatatgatctgaaagattcaaaggtctatacacaagagcgacaacaagaaaaggcataacaaggtcattgaccagaaaattagcacacgctaagagacaaccaagagaatcaacccacataatcatcaaacaacaatatcaactagaaagaacatatttgccacttcccacgccttatgaaatattgaaatatgttgatgtgattatagaatcatattccaataatagattagaaaaaaaaaatcaatattgtcaaacactatttctgagcattaagtttgtaacatcactgtagaacaatggtacaaagacacactaacgtttgtgcaaagaaaagcacactcaaatttaaccctacttccttgaaagacgggatatgtttgaagagtaaggccgtgtttagttccacgccaaaattggaagtttgaagaaattggaacgatgtgacgaaaaagttggaagtttgtgtgtgtaggaaagttcgatgtgacggaaaaattggaagtttgaagaaaaaagttggaatctaaacagggcctaaaatgcttactttcataagcttccttgtacatatctacaactttagacccaattccttttctgtagtactcccagtcaatcggttggggctcctgcagtgtcaaaagagagaaacttttagaaacataatacgggacctcagaaattaacagcattgagaaaacgcatgctgcaaatcaagagaaaatgcatgcatccaagagttctagattcttccaggcatttttcaaggtaaaagtaccaaaggaacatgacggcatcaatttgacaagacaaaggatcattttaattcaaaccatattaatcttattagccacaaagacaatacagatccttggtgatcgaacgtagtctgtagactataataaaaatccaaacgcgcaaacgcggtgaacggaataaagatgtccataattaacaacgttcttatgctgatgatcgtaagcaccaacgatgtgagaatgttggcataacgacgactacatttgtatgggttaacctatctccgatgtatattggtaaagtccaaatctaactgaatatcaacatgccaacaaaattattacaacgcacacgaatacagaatatacccaactaaatggatcgattccactaacatctcaccatgggatcttcgcattcaatacaagatcagaaggatcggatacgggaggatgccccccagatccggaaaccctaggtccgatccggcggcggcgggtgtggggtgggggggggggtggtgaatacctgagagaacttggtctggagctggtggttgacgtcctcgaaggtgcggcggagggtgttgaactccttgcgcgcctcgtcggagacgagcatcttggccatcccctcccagtcgatcgccttcccggccttcgcggccactccgccaccttcttcacgccgttcccgctcatcttcctccgccctcctctccctttcctctctacctcgacctctctctctcccccctcgttcgccgccgccgccgccgctgcagtgagctccgaccacacgggagagagaaatagggagatcgagccacgggatggggatttgcctggcctctctgccgctcgcgtggggtatactagttggcgactcctagtgggcctcgcaacgaattcccttgggccgtcggcccatttctacccactacgggccttcgtgggctgtaacacagaccacgtagggactatttgtcaacaaattttcttagacaattttgctatatatttatcgacaaatctccccccccccaaattttgacagatgtaattatagtacaatcataatgtaattactgtaacttacatataattacactgtaactataatgtaacttgtatgtaactttcaaaaacctctccataacatgttatttcagtaaaatagaggtcgtggaaacaaattctttcacatatgtgtgtgctgtgatttgttttcttcctcaccaaaataaatcttgtaatagatcttacatacaagttacactgtagttacatgcaagttacagtgtaattacactacgattatactgtaattacatctgtcaaatttttagcagaaaatttgtcgacaaatgtataggtggtcgtatgtaattatgatacaatttgtatataactttcaaaatcatatgataacacgctattttcatgaagcggagatcgcgacatcactcacgtacgtacgcttgatctttttttctttccaacttgcatgaatcttgtactccctccgtcccagaatataacaagttttaaggttagacacggttattaataaagtatgtagaagtgcggttattaataaagtatgtagaagtgagtggtggagggttgtgattggatgagtagtggaggtaggtagtaaaagtaaatggcggaggttgtgattggttaggaagagaatgttgttggagaagttgttataatttaggacaaatcgtgaatgttaaaagttgttatattttgagacggagggagtagtaaatctattgatttagaattatgtgaaagttttatatagtagccacaaatactttagttatatttgataatttcttagaaaaaatttatcgataaacataaagcaaaatcagcccgcataccgctgaacccgttctgaacatcacaattcacatgtggtagttttctcgaggagaaaccagtaaaaaaaaatcatcacatactcacagcgtgatgctgaagagatcactcgggattatcaactcttttccaccacggatcagagacaggtaaaaatgagtacatcggtgcatggagctgtgggctgtgggcggtcatactactccagcatggaagagataaagaagtgaagaagtactacgagataataaagagagatggatgtaactgacgagctaactgatgaactggtgtcgcggtacgcttggaaagcagagaaagcgagcggtgcatcggcttgagaaaagcagagaaagcgcggtagggagaggcgagaccaccgcaggttgctgtcctctcctctccaagtacaggcgaactggaactacgtgcagaaatcggagatgcagtcgccgtcgcagcaacgaaaccgccggtatacacgtacgtaccgatggtgatctgcgtcgtcgtcggagactagcgcttttgcccaggaatctgatcaacaaatttttttttaactatatcttacttattttcactatgtgcacacctctcaatataaaattagacactcatatcagcttaaactcgatgtaaagtagactaaattaagcaagtacatctctctatatttcgttatagctccacacctgctggtcctccaactccaaccaccatggcggcagaggagatggacgcggagcagcagcgttgtagcggcatgcaggtgagtggggacgagggtatcttggtggtgtactcacaggcgttggccggcctgcagagttggttgtgtacttgcgctggtgaatggtgatcaccggctaatggatgggaagaaagtctattcgtcccatgaaagagatgtactttagttctaaagaaaaaaagaatgcgtaattcatagaaagtctattcgtcccatgaaagagatgtactttttttcaatgtcatctaaatctttaaaatataagttcaaacttaattaatacaagtaaaaacaaatataacaaatctgacaaaaagaattcgtaattcatagacatttttttaaaaaaaaatttatataggtactagaattctccaaatctcgtgaaatgacattataaattaatctatcttaccttttttataagaaaaaaagatgattttttagactataagtaaaataaaacgagaagacattctctctagcgacaaaaatccataccatggatgaaaagcaactcagctagtactctgtgagctggagtgaataaagtgaaggccttcggtccctaagtttgttagtactaatcagttgtctgagatttgaagaattctactataggctttttgacctcaatatccaacagttgcatgaggagatggtcgaattaggtcatcatggtaaagggtaggattgacagggtgtgaggtgaggtggggtggatagtgtaggggtgtgtcgggagagttcgttgtgcaaatggcagagagctagtatatactttctccattccaaaatatatgggattttatacggatgtgatactttctaatataataaaaccgtccaaaatccattatattttgggacaaagaaagtacatagcaagcacctcggccaccaaggaaattagaaagacagtgaacggcgataacaaggctgagataacggcggtgtcgtctggatcatatgaaaggaaggagagcgatgagcagcagagaaatgagattgcatatatgatcataattataataaagaatataaatagctagcgagacttacgtcgtgttttaggcatattttcaaaattttctcgtcttcagtgagtactatttctaaactgataaatagtatgctccatgaaaaaaaattccatatcaaaatttcttttaaaaatcaaaaacaaacttattgccaccaaacatcacgtcctaacagcttacttctattttggattagttagcagtgttgctaaatgaatgtccgatggtaaaacactcataaaatctggttagcaaggttaaattatccacaccttggaataaaatctggttggtcgttggttatagagtttccattggtactttcgcggcctaataagtgttacactatgtttagttagccaacagtataaaagcccctaataaatgtaggattttatattgggttgcacagagcaatggcaattaaatcaatccacattactccctccatctacttttgatagtcatatttctaaatctgaaaattttatttgataggcatatttcaatccaacaacctatcatcttattgattttcttgaatttaatacgtgactctccattcttccacacatgattggctacatgggctttgagaaatataaatattaatgaatcgcttgtttatgaggaataactagtagcatatttaaatggatgataagtagaattacttatccttggtctatgtgtcaagatgaaatatgactatcaaaagtagatggagggagtactatatactactccctccatttcaaaatataagacataaccagccctaacccaaataccaagagaataattattatcatcttatagattagatcatcctaataaatacaatacatgcatccaatagaatattagagaacatgagagtggaggatttaaaaaagtaataatttagttagtggaaaaaaatttggtggaggaggggtgcagcgggcctgctgtgcagccctgatctggatgaacgacacgtggcccagctaccgatccaacgagagcgcgcgtagggcctccagcacaagtctcggctggctcccttcggctgagaatcgatcggctcccgtcccggctccctccgcgctcatgcttccctcgatgcgccagctcggctaaagtatatccctcccttatttctcgaagtctcgatgcgcctgctcatctaccgccgctgcccgcgtgttcccctctgcttctctcatagcagcgagcgccggcggcggcggcgagcggccgtgccgtgccgcgtatgtgtcgtctggacaacaagtctgattctgataggtacgtcatctctctagaaatcagaaccaccaccagcgtctgcagatccagattatttgctctcacctgaaactacagctgcaatctctgtttcgtttctgacaataattcagcagcagagcaatgttcaatacttatgtatatttattttccaatggtatctcccgggtgctttcctcccgctgaagaagcacaagacagcaaacaactgaacatatatataactcttgctgtaaactaatgtacgcatacatttcgaaatcacttccctaaaaatggaagaacatagttttgaaattgtttcctaaaccttggactagcggattaaattgctcattttcttgcaggttcttctcctggattggactgatggattagaatcagtaagatgcatattgtggattgagctcaaacctcatttttttatcatggtggttctgtattttctgtgcaaaatataaaggaggaaaatgctcagcctgaaaggactttaattgccacaagaggatggttttcaaaggactgtagtttaatatgcaggctttgtaatatgtactatgtaatctgcgaaatgttaacagtttgtaaggattgtagttgaaatcatacaagctgcaatgtaattgcaaggaaattcatccgtttgtaatctgtacaatttttgtaaatctgaaatacacatggcagttgataactaaagttatataattatattagcacaatataagaaatattatgattgtcatgatcatggtcatcctctacatataggtgaacatcatccatcatcaaacaatgctgattgaaaaacatgataattaaagaactagacgatattacctgcattatccgctcgccgccggctccaacatccccggtgatttcgacgtccatgggcgcaggtgattgaaatccatgtccttccatgccatgtgctagggcaggtgaaaacaacacgagatgagatgtcccggcagctgcagggtcctcctcctgcccttctcctgccatggaagctgatgcagctgcgttgcccgtggagacttgtcctgccatggctgctgcagtgctgcggttgccggcgatttttgccgtgatcttgaggcgcaggatgagacgtctcactccacgtccgcgtgatccaggggcacgcgataggagctttccaatttccacacccacgagccgatcgagcgcgtgcggtgatggcagacgaacaggcgcatcgagagaagcgtgaccgcggggaacaggatcctctgacgtagatctacgtcagagggacgtccgacgccgctacaccccttgatcggcatcggatggaggtgaataagcacggtagattaactggcttcttttctgctcacgctgacaaaatcgaacagtttactcgctcgcagggacgtcggccggcgcggagaacgacggcgtcatggcgacgttcagcgcctcgtcgtcgcgcgtgcaggtgcgtgtggccaggaacatcagtgcgtacgccgccctggagcgcatcgccaccgcctgcgccagccggagtgcgtgcctcgggggatggcgaaataaatcccggccggttgtggcccgccggagacgtagtcaacgtggccatgcagcacccatcccggcagcaaggccctccgtacgatcaccatgtcgttcaacttgcaggggctcatcgcaaatgccattcactagcacgctggcatgtatccaagctcaaagcacaaccatgatgtcgattctggcaagaagagtaagattcagcagtgctccgtctgagcgtgagctcgaggaggcagctagccatggcccatgcaaggttcggccagaagcgctgaccccagcgacaggaggtcggcgcaggcgaaccacacactcaacacggacggctccgccgcaggatgctgcgtgctgcgggcctgcggcaccgtcgacgaagaactcggcggcatatgacgagagaagcggccgccggccaggagcgagcctttccgttttcgtgggttgatttgtcagcgtgggccgaaaagaagctagttggtgtgctgtgcttgtttacctccgttcgataccgatccagcggcgtagcggcatcggacgtccctctgacgtagattgctctacgtcagaggatcctgttccgagaacggagggagccgggacaggagccgattgattctcagccgaagggagccagccgagacttgtgctagaggccctacgcgcgctctcgttggatcggtagctgggccacgtgtcgctcatccagattggggttgcacagcaggcccgctgcacccctcctccaaatttttttccttagttaatggcctatatgcatgcatgccttatattatggaacatcttaaaaaagtggttgtgccttatattatggaatggagggagtactactagaaccagaataggataataattctaaatttatatccatgtaattttggcccttttgtcaatcagaatcatggtcagaacaagcttgttttttctgtggattataattcaaaacgattttaaaattaaaagtttggtgttcaacaataactttggatgaattttatatgtcctcataaccatcataaaaatgagttgggaaatgaagtgaccataataccccgaaattaatctaattaaaatataaaaattgaaaatacttttgccgatactttgttacgtcgtatgtatttgagtcgatttttaaattcgttcgcatttgaaaatatataaggagtcgtataaaatatccttttaaaaaaatcacatactaaattgggacgagagtcggactcctaattgcttcagaatttttttcaagccataagaaagcaacatatagaatatgaccatcatccgaataagagttccgaattagataacaatactatcaaaataaaattctcatatatacttttcaaaaaaaaaatctaacaataatacgattaaaatagtcttcaccctttgcaacgcacgagcaatttttttagtctaaaattcaaaatcagttccaaattagttttcagctgtccaagcaacaaatagtagaaaatataaacacattccaaattttcgatctcaccagacattgagtcgtcaacccttcgtgaggtaaacagcaaagttaaaaaccctaatgacttttactagtgagccaacatcaattaactagatatattttgatactctatgcaactttgcaagaagatcaaagggattgccttggccttgcatgtcatcacgcaagcactgcatcactagcttcgatttagctattggtacggcggccgtggccgtggtgcgctcgccgccgccgccgccgccgccggcggccatacctcttcatgctggcacgctgacgcgtacacaggttgagtcgtcgtcgtcgtcgtcgccgtcgccagagctatgccgcgcggatgcagcggtgtcaagtgatggtgctccggtggctccgttcggcgccgcccgcggtgttcgtcagcgtcggcgccgctgccggagacgggcgccggcgcgtcgtcgtattccgcggggaggcggtggaacgtggggctggcgaacgcggcggcgacgacgacgacggtggtggcggcgacgagcgggcccgccacggcgcctccgaagatctggccgtgtggccccgcgagagatatcgagaggccgccgagcgcggcgcgtggcgccgccgcggccatggcgggcgggaggaacgtcgccgatatggagaggatctcgtaccggccgtggaacacgaccacggcggcggcggcgccgccgccgatctccgccgcggcgccggaaggcaacgggtggcggagcgagacgttggcgacggcgcccgtcccggcgagcacgcagatcccgaggccacggcggcgcgcgtaccccgcgagcgcgccggcgacgtccccgccgcccgggatctccagcacgtgcgaccgcatcgccgccgccgccgccggctcggccgccgccgcctcacgcgtgacgaccaccggcggcttcggcttgttcttggaccccggcggccgccccctcctcctcttacccaccaccaccaccgcagcaacaccctcgccgccgccgcccgccgtcgtctcctccgccgcgccaccaccaccatcacggctgtccacctcgtcagagaagcactccagctgctgcttcttctcgcccatggcgccgccgccgacgacgagcttgccatcgccttctcctcctcccagctgactcctcctctccatacctccctcacaagcagcagctagctactccagcttggagtgtgagtgcaacaatagctaagctaggaggagggtccctggctgctttaccctaccgggagagatttcttgccgggagagggagcacggtgaggtgtaagtgtaagtgaagcaaagctggagagaggagagacaggaggacaggattagccactggatccggagagaaaaggacatggagctcattacctagctaataatgccatactccggagcctcaggtagctgcagtttatttccaatctctcctgctgctgaaatagtatagattttcattgacattttaaaaatctgtagctgtaaaatttagaaaataaattgactagaaacccaaagttgataacctagttttttcatattcttactagaattctagagctcctccaacaaagatggataataagattaagtgggtacgcaaaacaagaaagttattagcatataatcaattaaatttttattattataaacttgaaaactggatttatttgatattttagagtaacttctatatagaaaacttttatacaaaatataccgtttagcatttttaaaagcatgttaatagaatcacatcttacctgtgatgccataagtagggcccttccattttcctttgatctcctttcatctttacccctttcaccgtctcctcctcctcctccaactgacatgatgcatggccggtgtgtgtacgctatccagcatccacccaccggccggccgccgcaccctttgacggcacggcagcgacacacacgcacagccgcgaatccgccgccacctctcacgctagctttttcatgtgccgacgccgcgacgcgagcgagagatctgaacatatgcatgctagtacaactgcgcgttttgaatgttgtagtagctagaactgtcaattatgtggaggatattttggagggcactctaaaaccgatcgagctatattggttgataagattgacagggacgtttgcaatttggacgaccaatatataatcaagcacgtgatataaacactttggctggctaacgtgataggcccaagcgatggacctgatatgatccatccacctgtagctggcttatccaatcttggtcctactccatctcttatttgtgggtttatgcgttcaacatttgactgttcatcttatttaaaaaattataaacaaaatcacacataaaatattattcatatttatcatctaatgataaaaaaatattgatcataaaaaaatttaaataaaatgggcgactaaatattaaacatagaaaccgacaaataaatttatcttgagacagacggtgtacttggcccgtggaataggatggagttaatgttgttcgctttttaagggaaagaatccaaagctagccgcactctgctatcaatcggtctctatccgttatcgacccgtacgtatctctggaacgcgacgtacaacatgtcaagggtgtagtagtacttgcagtcttgaataattcattcacatgttcgtacctagcacgccgacacatcaagtaaaaacagaatttgaggaagtgctggttcctgatgcctacttcctccgttgtaaagttcatatttaatccttgaagtacaaattaagatagagcaaaaacgaccaaaatactcttcattgatggagaaaatagtattgatgattgagtatgtaagggtattgaagtaatattttttttatttgtggataaccttattttggaacaaacagtataatctaaaaatgaacttatttatgaacgaagagagtacttctataggcaaaacaaaatcaatatgtgaatagaagcgttaaaataaattccctctagttatataattcttatcattttgaacattaaggttgactatcagtaatgtccaaaaatatagtttaaaggcactagaacaacgtatacatattagtcttcgaaagcactttaataaaattgattatttatttatttattatatttatattataaaattatattcaaagggtgtgttctaaagtgagttttcagacggatgattagtcgcacgtaaacaagaaacatgattagtatatgattaattgagtaaaaacttaaaaaatagatttatttgttttctgaaagcaatttctagataaaaagttttcacacgtaacatgccatttaatagattgaaaaacatgctaatgaagatcgagaaactaagtttagggtgcccaaatggagtttagaacgcacccaaaagatatgttttgcataatgtacgtgtcattgtttagaatgatataaactatagaaccggagggagtaatcaacttatggatgaactgatatgtgtgcatgtatgctctcaatataatgcttcagcttagtagtcagaccacatgcaattatatgtgcgtggctttgaaattaagtagggtggaattagctgcaaagtggttgctcctccagtacgtcctcctgttgtcttggttagaattcgtggtggctttggtggatcagatagagacgctacaatctacatcgacagctctggttttgacctggcaggcacaggcacagcacgtatggacggagacggaatatggtatggtatcatccatgcgcatccccttcggagaagaaattggttgctgagccctatttcttttccaacaaacggaatgatagctgaatacttcgtgtttcttttttttaaaaaaaacattcttatatataacacttttaaaaaaactattttaattttattttttaactataatatttaatttattcggttgtacccttaaataattatcgtaagtcgctcagctatttagctacctagccaaacaccctaaactttacacaagaatctgtatttccatgtcatagcaatatagcatacacagcatccgtgagaccatgatacgctcgttaattgctgcacttgtcaatcaccccaccaggcttgctagctagcagagcagatgaaaccaggtttgcccatccgctgatcgaattgaaggcagcagatcaaacctcttgggatgcagatccaagatgaataaacaagatgcgtgcactgactgaaattttcagccattatctacaaactgagccattttttcctttttcattgcagtggggtaataatacatcctacattattatacctctacaacccaaaccctccacatgtcaataaaatgtttgggccgtcctttccctagccgatctcctcaataaaacactattggcttctccaggatcatgctcagtcccatctaacctcctcctatattgttctgttaacttactactaaattgatgtttactttggttagtatacaaggaagaactttcatcgccctgattccaaccctccctggcaccctgaagcctgtgctcgtcaggcctatactgatccacctcttgacccgatgaactggtacccaagctagactttgatcgggaataagtcatacggccgttttccccatgtccgaacatagagccatcaaagtatgaaacttgatcaccaaatatgaggcgttccatatcctcactggtagagtttctagtgctttcactgctgtcggtgctatgtgaccctgtgtcggaactggtgaaaattgatgaactctcacttggactaggagattctgctggcgaatatggtccatgtccaaactcgtcatatgtatggggcaaatcatctgtcatgtgatctgcgtacatctgaccaccttggtgtatgggacctcctccatgccaccgtcctgaatttacccttgccttgtccttctttacacgtgctggatcttgagccatcagcgctggccttacagagcttggagctcttggtgaacacctgaaatggttgacaaaggatttatatatgtcctgataaagatccaggcaagcacagacaagtaattgccagtgtctgctattcatgagaacttctcttttttccgctccttgaaacaagtggcaaaaagaaaaataacaaaaaggatcttctctctaatgaaacaagagaatctaccttgcatagagcagcatgtatgcgcacttcgacatgacattttccagagatacaggtttgacctgaacaaagcaatttaccctccagttagaacaaaacaatggtgcagtgccttttgaagtcgcgtattctgttcagtatgctttcactaacacatagattatcctcagtaagtagtactctcatagctaaagattattcattacttaaaataggaaaacaaggctccggaagatccaggaatgaacataatcggctttactaaatagtgttttaccagtgataaaacattgggcaggtataggcaaaaacatggtgaaagagcttgtttacctgactgtcatctgttttgtaccacttcccatgcgtgtccttcacatagcatacataatgaccagaaaaggcggcattcataatatcatgatggacaaccactgcatacaggctgtaaacaggggaagtgtcatcagcttttgggctcatatagcgctgcaagttcaaggtctctggaaatctgatggctttgttgatctttccaaactttccagactgtatagatacagaagaaaagtattagtcaaacactaaatacaatttcaatgcttgttggacttattcaaaactaggataaatgaaacaatgaactcttgaataagtaaacaagttccttcagtgttgctattataagaaaagcaaaaaaaaaggtcttattgtagatgatacctgatatcttttcagcgcaatagtcaggacatttggtgcttccgatattgtcagcttctttttagcgcgctcatgcgatttgcatctgacattacatagtagagttaggagtatcagcattagggactaggcacaaaagcagtcaagttacacagaagtgattaaatatgtagttattacagctctaacacgatacatttattatagaactagattaacaggacacgtcttatgacatccaccttcctattatttcacagaagcaaagcaattttaacaagcaacagagcgttccaccaattctttttcaaaagtccctcgagaagatatctcgttttcaagactaaaatatatgcaacttttgcatggatatacatgacaatttctgggaaatcaattttccatctcaacaatttgccagatctgaaggcactactcatgttgttgtagaaagcttggatacgg

SEQ ID NO: 5561 - DNA, 1242 bp, Oryza sativa
aacaggacggcatcaggctaaaaggcatgctgaagctcctatctatgttttattttgtttgctgtaagaactacatgtcatttcagccatttctggtaatagaagtggggaaggcctacctccctttctccaaaaaaaaaaaagatgttatagaaaggatatatttacccaaaacagcctcttctgtgactttagcgtgctgcctcaccaattcctctttagcattaattgtcaaaaatgcagcagcaagtttatcattcaaactcttcaagttctcctttacatcttcatctctgacatttgaagatgactgtggctctgatgattgaccatgccgtggagaagaatcatttagtttaaatcccaatgctaacttctcattcgagggttttgtgactccaatctcttgggtcccatcatccctaacccttgaaggcattccaggtgattggccaagatgtggtgaagcattgtttgagacaggcctcagaacctcctggtttaacatgagcaaacaaaattcgaacactcaggataaatcatttattatcattcagaaaaagaaataaaacagcatccagatttagcaaaagatgccatatatgtataaattatattacaagtattaactatttatgtccatatttagtgctattaggcagctcatttaccttcatacaagaaaacacaaacaggttgacaaaaaggtacatcaatatagactgttgcagaacttaatagttagaaccttgaaaaatatgcatagatttcaagagcatcttacaggagattgggcgaattgaatttaattgtctttagttggcagatactattcagaataaattttaaggaatgaattttctcataattagaagaactctcttggagttaactgaacagggtacttaactcccttaaatactaccagcatcattttgtctgttcaaagctttttctttgcttgcacggaaaagggcattacaaatattatgaaacatcggcacatcgctacaacattttcattaatagaagtcgagattcagcttcatactcaacctcaacatgacagattttatacggtttgagctactgttatgagcacgatagtctgtactcggtaggtactaggtagcaacatgctgctcaatctctagtaccataatacatcaagtcaatatcaatgcattcatcagacattatcatctgaaccactatgctccattagaatcaggccaaactata

SEQ ID NO: 5562 - DNA, 4372 bp, Oryza sativa
acgtgtactattgatgtagagtagtattttgtacggagtaccttatactactgagtatttccacggtaataatgtgactgtattttttgtaggtgttcgtacttgtacatttgattcaggatttggtacattagaaatggatctaattagctcccgtatttatcatcacaactcacaagtatgcatgcatggattttttttccctttttatggtaaggatttataatggtttgttcaaggtatttttactatttttttttaggattcaacttattagatttattttatatgttactcgaacattgttgataatgtactttctgtgaggattttttgggaggattcaacttattctaatgactgactttgtagtactcgaacattgttgataatttactttctgtgtttagtatgcgtagatcttgaatgtcttttttattttaagaaaacctataaataatatggcatcataaacattaaaactttatatggttataggacaaagaagttagagagataagcctctataggacgtggccactactttttatagggtaaagagaaagatatagccaccactcatgaaatattttttctagatgttggaccttggacgacacgggggcggaaaaataaaccgaatgagttagcctaaccatggataaggcgtcacgtaagcatcacatgctacatacgctcacctcctccccttctcaatttatctcgcactcccacttatactttttttttctctcacacaatctctccatatccttaagtaaacctaaggtttcccacacgctttcctttcctcttgcctccaaccgtgcaatgatcagtgtgaaataaacatgtatgatcatatcctatctacttttgaccataaaccaaacaagccaaaccattgtttcgttggtataaaattacaccggctttcattagtactcactccatcccaaaatataataagctagaatcaaaagggatatttcctagtatctgtccagattcgtagtactagaaaatatcttatattttaggacggaaggagtaactatgttagactaaccgatcacaaatcaataggagtcgaatgtgataggaaaacataattctattttgttctttaattttctttctcttccataaatacttttttaaaacacatataagatctattcatcgatatattagacgaaactaccataaatgtatactagagttgcacgataacagatatgcagcagtggtccaataacattattctgaaatctaacttcccaacaaggccagtacccatgctatgtgatctcccggcaatgatggcctcatggacgagaggaagtggtacacaccacactagcttagggtgtgtttggttggagggatatctctggatgggagatggcgatccagtttttgagtgtgtttggttggtgggcgagggaggatagggcggcccaaagagggaatattccacgaagatgctggatgagtgtatccggccaaattgaccggatgaggatatccaccttagctaatcttgataattagttcttgattagcaataattaaagtatattgttgttaattagtaattaacttgtcaaaattagtgttgattagatatatactctattttattgttaattagtataaactatagctatattaatgataattaacctattttattattaattaatatgttgttttcattcaatccattcccattcacccaaccaaacaagaaactggatggccatatccatctaaccaaacaaaaaactggaccaccatatccctccaaatatagatggtcatatcctatctagccttgaccacgaaccaaacacacccttatctaagctaggtagcacgttgttctcactttaagctcactcaatcatgctcctgttcttgatttgagagtgtgtccaagccataagcacgtgtcaacaacctactcaaacacaagattttgtgccctaatccttgccgctatctgctaatctatgtgttccatgtacagtcgtacagagcacatacccaaagtgtgagatggcattacaacctaatcattgtgtggttagcagctgcattattttgttaatttgacgtgctaactaccaacatgctatgctgctggtatatatatgctataatcaatatattccctgatattattatcatcccttaatgaatagtagtagctagtacccctgttatttattatatggattagagcatatgcatgcgtattaattaataaaatgtaatgtggaaaatgaagaacaaattaaaatgcaatcatgctgctaatccaagcattgcctttcaagatacaagaaaggcagaaaaggcaaaagaagcacgagactacactctaagccaaagctgctgttgccgatcgaggaggttaagaaactaactagccaactgaatgaaaaagctcaccaaaaaatccaacacaaccaacatgcaagatgcaaccataacttagcttgagccacacaccatgcatatcttcttttttattatttttctcactcacccaatcatgtcttaattatcaatcaatcacacagttggttaggggccactctaatcttactggggacactgtaatgatcactggaaagttaagtcatgtttgacacttcagaagttaatactattgttttaactttctcatagctactagtgtagcttaaaggttgagtttacttgaacaatagtacaagaatcggattacagatcatcttgccttgttagaataaagagacacatacagttgcacttgtcagtacagtgacactggacaatggaaaaatggaatgcatctcctcgtcagtacggccatgttcatcacaataactctctagcttgaacttaaagccagataggagagaaggatctatttacttctgtccttcaaaatgagtttacatatctgtttatctgtaaacaagtacataaatatgaactaggaacatcctaatgtttatacatttcacagtactagtgaaatttgctgatatgcgtgcaaattgaggaaacaaaaaccaacataggcagattcttcagcccggcgtcagagagtttcagtgcatctgatgcaactttggttgctctccaatgtgtcatttctttggcatgatgcataattagctccaggaactggaaaaaatacaggtttgaaaaaattaccagtaattcatggggaaatcacactttagctcgtttcaggtaaaccatcactgctgcaccgctgagagcgaccacaccagccatcagcccaacacgaacaggcgacaaccgactcctgcgtgcagctgccagctgctgtgatggctttgtcacctctgtgctggattcagacaggtcgatatgcaacttcagaacctgacaatgagatattcatagtagtgagatagatggaagcaagaaaagttggagagctctacgagttgctacatagagtaaactatagtaccaagagtccaagaacaacagataccttcaaaccggacgatttggcatggagcacggcaccagcaagatcggcatcagttgtcagtagcacccggtcaccttcatcgtcttcgtactacatagaacaaacaagattaagtggggaagtgcttgaaatattggctgtcctctagtaagtgccttagtggtgcagtgcaaagacaataattacaggtttagaggacataaatacatgcatataagctcatagcaatagcttcgctctcgaagtagagtacattaaggcagcgaatatttcgtctctttgttacacatgattatgaaagcactagaaatattcttatgacaaatactcagttgtaccaggagttgcattatgccctcttcgtcagtaatacttaatctttgttttatagaagacgctagctcgtttaagctctctgagcctgcagcaagagaaaagaagttaagaacagttatgtttgaatgatatgagaacaatcaacatacttgtgcaaactatcaggagagcaattaccacaagtgaatctatgcacgcgtcccttttggtcttgaagcttaaaggcaaacgaatttccaataacaggggggtaaatgctactctttccatctccagtttctgatgccaagagcaatgatacttcactgggaaatgtagaagagaattgtattaggggagagcaagtgagcgaaacattcaacaaatgaaaaccatcaacagacctacggctatcgcattcctcatcaggagactccaaagcaagagtagaatcccaaaacctctgcattactgtatttgccacatcatttacagtgtcatttcctccttcaacctacaaattgagaatgcattcag

SEQ ID NO: 5563 - DNA, 2787 bp, Oryza sativa
cagcaagcaagcaacatttggaaaacgtgaaaaaaattgcaaggcttgaagcagaatgccgcagattacatcatctaactcgcaaagcaacattaattaatgattctaggcctctggcaaacaatacttgtgtggagtcacttactgatagccaatctgacagtgctgaacgcatggctgctgttgataatgaactgcggaattccgactcatgggcatctgctctggtagctgagtttgatcagttcaagaatggaaatgctgatgagaaaaatcttgtgaacaatcctgttgtgattgatctaatggatgatttccttgagatggagaggttagctgcattgcctgaatcagatcgcacaagctctaccttcgatatggaaacagattctgataaagctgtgaccagaaacagctcctctaaacttgaaactgaagagttgaggaatcaggtggctgatttgcatgcacaggttgagaagattgaaagtgagaaaaaggagcttgagatggcactaatggaggcaagaaatcaacttgacatctcctgcaatgcactagtggcagcaaagaacaggctagttgaaatgcaaatggagttggacttggcaaatgactccaagcatgatgctttgagggattttgagggattgaactcagagaagaaggctttggagtttcaactggagtctaaatctgtacgagtggaggagttacttcaggtggtggcttcattggaagaaaacacagataaaaaggaattggagtcacaattagaactgctgtctgcggaagccaaagagcttcgtctgactgtaacatcattattagagaagattgaagctgaaaggtctcttttgtgcagcatcaagcagaagcagtggctgcatgtaatgcgaaagaatcgttggaggaacagctatattcagcaaacactgaagtagagagattgcatgtcattgtcaaagaactggaggatgaggtagaaaaagagaagatgaggcaggaagaactcgtggcagaattagaaatgaagatggaaacagctgtcgaggctattaaagaatcattggaggcacaactatgtgcagcaaacactgaagtagagagactgaatagcatagttcaggcactagagaacgatatagaaaaagagaaggcgctgcataaagaactgacagcacagttagaggtgaagtttgaagaagagaaagctcgttctgttcagactgttaaggaatcaatggaggcacagctatgctcatcaaacaccgaagtactaaaactgcgtgacattgttaaagcactagaaaatgaggtagaaaaggagaaggcactgcatgaagatctttcagcacagttggaggcgaagatcgaagcagagagaactttttctgtggaggctattaaagaatcatttcagtcagaactccagtcagtgaactcagaagttgtggagctgcgcggtatggtgactgcacttgagcatgaggtggtaaaggagaaaacattttctgcagagctccaaatgcagctagaagctctggaggcaataaaaagggtgttggagtctgagattgagtctgcacatcaggataacagaaagctcaatgataaggtgaagtcttttgaagcaaaactgaaaaaacaggtgtcttcagcggtggacttcacagccaaggaagaagccatgcagtcagagagaagggccatgaagcaacaacttgaagcagcaaagatggaagttggaaagctgacaaacaaggtgagcttgctccaaggggaggtgttacaggagagattgttatcagaagagttcgaacaagaataccacaagctggaggctcggctgtcaagggatagccgggacgcgaagctctggcgactcgcaaattcaaatgggggtctgaaggccaagcaggtatatatatactgaagtcttgtaatttacatcacaccatttacccttggcttaacacactcgcctggtatttatcaagaaatggatccaactataaatcgttgtgtttgtcacaggagaaggaacttgcaaatgctgctgggaagctcgcagaatgccagaagaccatagcttctctcggccgtcagttgaaatcattgaccgacatcgacaatacgattgtggagcctgagagactggaacccagagaaatcagagaaatgccgctcgattttagaaatagtgatgctgactttgcagtatttgcagatgagttatatgattttgatcttccaaaggtcaacagcagctgcttttcgccgttaccgtcgatccagccctcttcgccaccttcagaaatgtcagtatttgcagggggcctgtcttcacttagtagtttcagaagcaaaagaagaaagtaaagagctggtgaaaacaaactgtccagatgctactaacagttcatggatgctctcatctgtaggtagatcagtgtacatttacagaaactgattgtagattctgtgtgctgaattccgttccagcaagctcagtttttttttcacagccttcttgatgagatttttactgtatcagtgttggctgttttggtgccagaaaaaatgggaagaaaaatgtaaactcagtatcagtgtgagactgcagaagtgcagatacattgtggtgtatttgtgttgtgcggcttatacttgctgtgtaattgatgatctccatattaccaatcatacttattctgcctgattgaacgaaatgtccaaattcagtctcttacaaatttctctgggataataattgcatgtgttata

SEQ ID NO: 5564 - DNA, 4990 bp, Oryza sativa
tatcctgcctctcattttcttaaaagctaaaaaggagatttgtttataacactagaaagagaatggctacgactaaagaatgtaacaaccgcgacgtaggtccgaaaagaacatagcaactaaactgtcctattgaggtagaaagaactctagttatacaaaacaaagtcatcagacatgggatagaacctgatcatcagagtagtgctcagaatgtgacgacacagacacggtgttctcggcgcctcccgggctcttgtctgacggcttgcgcctccagagccaactcgttcgatccataaccatcaactgttcaacagatcagagctgaaacccctgatttcttaattaccaccgtatgctgcttttcattgatcagcagctcgcccagttgcaggttgctggtctggatcaaacaacatgcagtagaaaattagcaccgagaatgataacatttgattgtgaaagacgcaacatcctcaacacactacctactataaagaaagaagaatgccgtgacaattcacaagcacacaacctttttgcattgactagtagcccacagcacatgctgcaagactgtcacttatttcttttttcagcacaacttggcaaaagttaaatcagactagcattcttactgacactaaatccaatcagaaacaaacagtgccgagaaaacaaagagatcaaaacattgcaagagaagaacaatgcatcattgtaccaaaaaaacagtggaggtaagatggaatttatcaccattgatacccaatcaaaccctgttgttttactagcatgcttttgcagtagcagcaaataaaacagtaaaaaaaaagtaagtgttttttcacagagagaatgtcagagtgcaaaataacagtagccaccgactactcgcaattccccaagagaacccaagaaaccagggtgaaaatccccgaaaaagattgcagcttgacgccgaaattcctctcgaagcccccaaatcaagaggtattcccactaaatccggcggaagaaagagtaacaaaaacagaaagaacaaaaaaatattcagaggaagcgaagaagaaattccatgagggaatccaagaacgaagcgagagggagcaaaaaacaagcagaggtagagcaggaagcgaggagggatggcgggcattaatacctcctcgaattcaacgactacacggagaagacgggaatgcctcgcatcgcatcgcaagaactccgtgaagaacacacacactctctcaatctcaacaccacatttcttcttgcttcccaataactctctctctctctctctctctctctctctctctctctctctatctctatcctcttgagctgagctgggggggagagggggggaaaagcgcggggtcacagctcacgcgggcagatcggagcaggaggcgagctcaaaagcggaggggaaagaaaggcgcggggtccaggccatggccgccaccaccacctgcagctttcaccatgtgaggccagtacagctatctccctcctctcgcttctgcactcaactctccctctcccccgagcagaataaatgcatcggggaaagtgataaatgcaacacagcatccaaagctcaaaaagaaaagaaaagaaagaaagaagaagaaaaaaaaacagagagatttcacgacgaacaccgccatcgacgaggtcgaagaagaagaagaagagctcacctgcatcatccgccattggcgacccgcattaccttcctccttcccgcgcgtgcagctcgaatcggggaagaaaagctcgcagctttctcggatactactactactacttctctctctcctacccccactctcggagtataatagtgcagtgttcgatgcaaccaccgggggattaagattaggattagtagcagtggcggttgatgatgattctgtgtttcgctgctgctgctgctgctgccgactttggcggattgattgcgagattccagcgacgggtttttagctaattaattaattaattaattaatcagaggggattaagagtaggtacaatagcacactattagccagctataaatatattttaatgagataaaaaataagagagaagagcagcgggctacagatatatagccagctgcagcacggactccaagacatcgtgtgtatgatatgtgggaccacatatattaatagtgtagtaagcaaatattatatgaattaactattacattgcttagggcagtcccaacccataacactagacatagtttccataaactccacatcatcaagaaactagtacggagtactagacactactcttccaatgcaaacaccactattccatacttcaatttaatgctacttatctcacatgatgtcttagatgttgtgaagaaaccatgtctcatgcaagacatggtttccttctctttcctcatttattcacttgccacatcattttttatcctaggtggcaacttatttaatgctatagacacaatcctagtcattgggttgggaatacccttagagcatgtataatagcaggctattagccagctataaacatattttaatgagataaacgatgagagagaggagtagcgggttacagatatgtagccagctgcagcacggagcccaagacacactgtgtatatgacaggtgggaccatatattaatagtatagtaaacaactattgtatgaattggctattagattggctatagatgaattggagctagtagtgggctgtactattagacttgctcttatagatgaattgaagatagtagtgggttatactattaaccttgctctaatcgctgtgttaagagcatgcccaacagtcacccaatatttgattcccaaaaaatctgaattaggaattccaaaataagaattgggcccaacaatcaccccctcctccaagagaggcccaaaaattaattccctatcatttgttagtttgccacataagcaaggtgggcctagttcggtaccgatcgatcgtctccctccccgcaccagcgccgagacttctccctccccgcaccttctccctcccacaccagcgccgccatctgtgtaaatcgcatcatcaccagccaaccagtgtcctgagtgctgcggtttctacaaaaacggaataccaaggatatgccatagctattcgtgtcatcaaggaggtaatccctagcaaatcctattgatctcttgtgccctagtcaatatctgtctctatttggttatgtggatatctattgttggaaaatattaagtttgatctaataattaattttatagattgattattgttgtattcctgccatcggttctctccattgcacttcatccctgtggtaaacgctccaaccctgtggcaataaaaaagagaagatgagtcgtcgaagtaccctcctccaaatgctattggatgaggagtctttatcggatggcgacgaagaatttatttctttggcggttgatatagtgcacgatgagttcgacgatgatgaagttccaaagcgtggtggatctgttataggtcatgcagtaattaatcgggaaagattggctggacatcggagattatataatgattatttttctgaagaacctacgtacctcgatgttcagtttagacgcaggtttgtagcagtgctttgttttgacaatatttgtttgcaaaattgatattaaaaataattaatatcgttaattactatgcaggtttagaatgagacgacctctgtttttacgcataatgaatgctatagaagcacatgatgaatattttgtgcagaagagaaatgcggctggtgtgcttggactgtcatgtttgcaaaaggtaacagcagtgtcacgtatgttatgttatggaatagcggcagatgcagttgatgagtatgttcgtattggaggtagtaccgttattgagagttttaacaggtttgtggtggctattgatgaagtttttggagaggagtatttaagaacaccaaacgagaacgacatagctagattacttgctcagggggaagaaagagggttcccaggaatgttgggttctttagattgtatgcattggcagtggaagaactgcccgactgcatggcaaggccagtataaagggaaagagggagttcctactatagttttagaagctgttgcctcacgtgaccgatggttttggcatgcgttcttcggttcacctggatctcacaatgatattaatgtccttcaacgctcaccgctgtttgcaaagctagctgaagggcaggctcctaaagttaattatagtattaacgggcacgactacactatggggtactatcttgcagatggtatttatccttcatgggcaacacttgtgaagagcattaagctgccacaaggaaataagagaaaatattttagcaaagcacaagaagccgctaggaaggatgttgaacaagcatttggagtgcttcaagctcggtttgctatagtccgtggaccagctcgtttttggaaagcacttactctgaatcagataatgagagcttgtataatcatgaataacatgattgtggaggacgagcgcgatggtgattttgatctagtttatgatgagatgggagaacaggtgggtggttcccatgaacgtacgaccaactttaatgattttattagtcagtacgaaaaaattcaagacaaggaagttcacaaccaactaagggaagacctcatcgaacatttgtggaatcatcatgcagaccgatattaattttacattatatattcttatagataatgtcatagattgtaataattggagattcacagcttgtttttaaattagtacatattgagcttatagtaattatttattgacaatgtgatttattgttgaattcgatacagtacaatagactgaaaaggacagcagtgcatatcctttttcaggactggatatatatacaggatatacaccacaagggtgta

SEQ ID NO: 5565 - DNA, 15865 bp, Oryza sativa
gtcaggaggacacagaagctgccggtgacgcggcctccccgtaccaagcaagctccgcccacagcgcccgcgcccgggcctccgccgccgccgccgcagccggcgtcgccgaagacgaagacgaaggcgaaggcgaagaagccgaagaggaagagaagctgcgtgcactgcggctcgacggagacgccgcagtggcgggaggggccgacggggcgcggcacgctgtgcaacgcgtgcggcgtgcggtacaggcaagggaggctgctgccggagtaccgccccaaggggagccccaccttctcgccgtccgtgcacgccgccaaccaccgccaggtgctcgagctccgccgccagcagcggcagagcaccaacccctccactccaccgccgccgccggtgtccgccgccgagccaatccccgacgagcaaaaagaagaggtggtaagcgtgccagtcgccgccgccgcgcccgccaccgacggcggcgcggcgagctcgctggacgcgctgctgctcgacgggccgtcggcgccgctcatcgtggacggcgacgatttcttggttagttaggtagccagaaaaaaaaaagaggaataatttcagctgagaatgagatgaggaataccaatttttcgtttgatttttcaggaaaaacagttttaccacctgacattgtgaatactcgtcgatcctggggaaaatctttgcgtgaaatttagctagttttgctgcccagatgaactagttctggtgcttggtagctgatgaagttgaaaccggttttaatggatcaagggggatggatgttcaatgccaaagtatgctgcacttggtcccatttttagttaaactcaacttgtcatgatagttcattggttctaaaccacatttaggagatattatcctctttgttatagatttattggtcagtatttccaatgaaaactagatagcttcttacctctgttagttttaagtgattttttcccgtcgcgctctgcggtttctcgtatcctgtggacctccagcatggtgagcgaagttgtccccatgttttatttcgttgagcatgaaatttaatacacctttttatatggtatgtgatcgtcgttatgttttgccgccataatactggtggaattaaagcatataaaagtaagtggcatcatcttgttttgctcactacaatggaattaaagtgggtaaaagcggaaggtgaaagtaggtcgaggtaaggttgcaaggagcaactttgctcactacaatggagacccatggggcgcgaaaaaatgctgaaaaccagaaagaggaaggtatttgaattttcccaatttacgtacatttaagtcggcgtacgacaaaactacagatttagaaatgatttataaaaagctatatatttcaaaagtttttgtcaagacaacaatgttaggacaaaacatccacgcgtgcttttgtgataaacacttagttctgtgatactataccttaatatattataccgttcttttgatatgatggtattgtaaaatttcgccaatcatggattactttttttttcatctagacatcgacgtgtgatgtcttataacttgaaagttgaacttttgtaataaatttttgttgggaactcttgagctaaaggctgggatctaattccattattcaaagtagcttaaatatatcattttgggatattttacaccattatgatttagatctgtattttggtttgttcaagtatgcttgatgtaacatatcatagtactacaaaattgaataggtgccttttcatatttatggtattaggatataccactctcgtactagattaacttattttgaaacagatgaagatggagtatatatatttgtgtccttctgagcactatttaggtaagttgaatgcctcaatgtcataaaattcaaatcccaaggatgaatatgagcatatactatgtttagattcactactatgtctaaatttctccctggatctgatttttcatgggagggaggaaatacatgtcaattgccctggttgctctttttatccgaaatcaggatttgcgacgcaaggcattcaagagacaaatcgggactgtgcaagtgcgtggactttacattcttcagatagggcaagatgattgcagctagattctccaaactgaggcggcctatccaatttgtggattgtcccaaactgaggcggcctacccaatttgtagagattgcccaatcgcacaaaagcaatctgccaggcttgtcagatgaggaaactgctgtactaggaaccttttggaacttgcagtaggaactactcgtaaaagtagaaagatattattggttgagacgagagagcgatggagaagttttatattctctcatctcaaaaaaaaaaagtggctgtattctgaaacaaaatttatcgtaagaaattgctgtattttaagacaattgaaataaatatccttccagtgacacgctgaatttctacaagttgtatgtcaacaacatggtgatagaaggaatgtacgaaaactgtaccagactgaaaacaaccatgtgcgaatttaccttgcagaaatcaggaatcacaactcaatgacgaataaaaagaatagaggattgagtgaacaaaagagtctcatgctcccattgcattacgaattatttgcttattcaccagattacatcactgtctagccagacccaaaaaaactgtgcataaataagattcagaccgccgccagcaccaccatagcgaaaaagaatggcaccacaagggcaaacatcccttggatacagatgtttttttgttcatgacccaacagaagaacagaaactaagacagaataaacccctagagctcagcttgtagtttcaggaatatgaaacaagaacccactaagggtttgcgtgttgaaacatgcctaatccgcacgagattggccagcgcgggatgacaggatgatgccgacgatgagcccatagagagcaagcgcttcggcaaaaatgaggatgaggatcatacccacgaacagctttggttgctgggcgttcgccctgaagacaaagaatatgattagaagtcaaatattataagtagtaaaatcatcattgctattgcatacatgccaacaacttcacatatcaagccacaaactactacaaaagtaaaacatgtttattctagataagactttgaggctaacgcagttcttaatatcctcagtacaaaatatcaagccacaaacaagttgaagaaaacttttgtgttgacttttagaaaaatttaaagcctcaaataactccacttatagttacacgctactctaaagaaggggtttctttgacaagaatatctaaacaattttaggtgagaatgttctcacgtgctgatgtgcggaacctctcttcaggtaatcaatcgtaaacatacaaataataaattcaagccttgtccagtgttcaaaactttgaatatgtttagaagaatagagttaacaaattacaaagcaacaaaaatgtacagaaaagatgccatatgaactatagaatttattacaaacaggtatgaaacaaaagttgaaatagtggtataaatcagcacatcataattcacaattccactgaacactgtattagtcataattcacaattccactgaacactgtattagtcataattcacgattgcacaatttcactgaacactgtattagtcagtcacacagagaaaataaaaggataacatattgtgctactggacccctaacctcaaaagaagaatctagggaataagtgagcctcttttagtcagatttgtatgaattaggaaaggtttctaaaataccaaatctaatattcatgatgtatatttaaatagctgtatgaatactatggaacatttcatatcttttggtccatggtggataaatacatagaatgatcctattataagcatcagaaactttgggtcgataaagaatgatccatggtgtcaatgtcatcagccctgtgaagatgttaacaccgaagggatttaatccacagtttgacagcatggtcctaaaacagctatagcacagtaaagcctgtgcaatttaatagattgaagccatgattaaacacacattcaagcttagcatttgacagtgatagcagaaagtctgctagttaacacacactttttaacacacaaaagtgtgaatttgatatatcaatgtaataggcaaagcataagacagaagctcccagaaatgcatagtttgtcatatacaacgtgttccctaaaataaaatgcatagtttgtcatatacgacgtgttcgctaaaatgataaaatctaaaacatatacaattaggtacttgacggcctaaaagattgttttcgcatattcacataaacaagtatacacttgcaaatgtaatacttcactaatagtttggtgcacttttcatctcctgatctaatcacatgcagatagattgacaataggcaaattaactatactaacaactagcaaaacaaagttaatgataatcacaaataataaatcagcgtgtatgatagcaaagtgccttatacctgactccggcgtcaccaacgatgccaatggccattccggcagcgagaccggcgagaccacaggcgaggccagatgagaggtgcgcgtagccgtcgaagaggtagtagggcttggccttggggttgatccccgtgctgatgatgactgcgatgatgaggccgtagatacccagcacaccagccatgaccacgggcacgatggacttcatcacgagctccgggcgcatcacccccatcgacgccaccccgacgccgctcttcgccgtcccgtacgccgcccccatgcctgcaaaaaccacacccataagcgagatctcgatctcgtcagaaaccgcatcgcggatccgatcgcttcacagatcggatcgggatcgggatcaaagcgcgtggatcacggcggatcgaggagggagggagagagtacatgagaagacgagggcggagcggcgccgaggagccgaagaagggggcggtctcatcgccgctgaacaccgacgacatcttcgcctctcctcctgctctaccgccgctgctgctgctgcgatccttcacccgccgacgaggtcgagctctctctctctctccttctccggtggccgcgagcagcaggaatggatcgatcggtggtgggattggggctctcgcgatccgatctgaggagaggagaggagaggagtgcttcgatttggggattgaggaggaggaagacggaggtgggagaagaggaaaaacgagaggcgcacgcggcggcgtggctgggtttggacggttttgccctcgtgaggcaggtagaggcaaggctggtggtttgtcttgggttagtaagggcatcactgtcttttttctttttcttttttttttgccccatgtcacaaagagataaaaagttctttttggctagctactactagttcgagataataaaatcctttgttaggccatcttccattttcaatgtgcatgagtttaaaatagtaagacctcacttatgctatgtacaacagtaattaaaaacgtgtttttttatttttaacaaaaataagttgctcgttattctttcaacgatccaactttaccgattttacgttggtgcaagaaaatttttataatggtacatatgagatagaatgttaacctcaattgttggactaattttgaattttaactgttttgtagggtatctatagttcatttcccatatttgacgtgcaaattgttgcatttttttttaaaaaatgcatacttagtgcatatgtcaaaagttgttgtcttttggccttgtgttatttataaatctaaatctaaatgaagttctactaggttcagttataagtttataataatgttgctttcaagttgcaccaacatattattaccttccttctcaatttaagatagcaattggtttcagatgttataagatggaccatatatctgtagacaattttgcccctctgaaagagacgtatttgctggtgcctgggcatcaggggcagtatcgtcaactcacaaaatgatttattggggttactcgtcgccacgtccgtggtttgccccctgcgcccacgtgtatgcgcggccaccgcgctgacaatccgattgggtccatgggacccacatggcagaggccccacatgcagctgatgcagcagaaatgctactaaaatttcacacatatatatttttgcccttttttttggcaccatcatacagaaactatttgtcatataatgcatacattttcacttaatttttgttccgctaatcaaacagtttctgcaattgatctaattttgctctcgtccttctggtcatgtagctacattgttctccctgacacaaatggaagaacagcttccgtgctaacttaaaatggattctcttcaatgttggagacttgatcgaagcaatgatctgaattttctgaattctgacatacatacagcctacggatttaatctttcttgaggagatcgtagaacacttcaggcttcttgtagtgcttcttgcacgcctcctgcaaaaataccaaattccagagtaatgataaacacaactcacatttttcaggtgtctgttcaaaacaaatgcaaatactaatttcagcttgaaaggaaaaaggctgttaattttcacttgcctgcattgcaaatgctatgtggagcagagtcgcctcggaccacggcctgccgatgaactggaggccgatgggcagcccggctttgtcatacccaacctgacagattgatcacaacgttgtagattcagatatgtaggtttgttcatgctgatagaagctgtaaaacaagttcagttatttgctaccatgacggtgatggccggcaaaccaaggaagtttcctgcaattgagtaccggaccaacgcggctttgatccaaaatgcatggggaacacggttaggataaattgtactaggtgtgaaattattgagtatttttctcctgaaagtttggttcattacctccatttatgtagtccagttctccgctttttagcgcgtcgtcttgcagcttgtaggcagtcacactgcagaaagatttaaataaggtaggatgaacacactctagtgaaaacaaaaaagtacacagagttttgaatcatgcatattatggcataatgcttttctgaattcagaaacggtcactgtagcttatcatgacaatgtcgcgagtgccaaaattgctttccagatttgatgagtgagaaatgtttcatgccaagtgattcatgtgaggttatctgaacagaatgggtagaggagaaagatgaaaatacccggtcattggtgagacgatcacgtctgccgtcttgaatatctccttgtggaagtacatctgacgattcctgcaaacatggataggctagcagttcagtactaatataaacactggatcactaaattgtcatgtttacaaggtattctgttctgatgatagcttcatctgacaaatgtgaactcaccggagccgttgcgaattcaggtaggctctactgctgaaggaaccatacacgccaagtgcgacccttacatcccaaccgatttcagatctcttcctgacataattcacacaagttatggtcagatcatccacaggtttattgcatcaaagccatacaaataacattattctgataactcacagcttgtcaagatatttagcaagtgatgcagtgcattctgaaccaattgtcacatagtgcgcaaggcgcatctcttcgatctccggtatggttacatccagagtcttgcagcgagaaaaaaagaatcacaagaacaaattaatgagttcttcttctgccaaaccaattgagctatcatagaattcttgacaaaattgctagtactaaatttctaaatgccaattcaattagtacttttggccacagtaatcttccttacctcccaaccatagtgcgcatgcagcatctgaagagatttgtcgcagcagcttctgatgtcctctgaactgtcattgaaccactgtttccatcgcacaattaccacaatgttcagagttaattcgtaccaaatttatttgcccacttcactcgtgcaataatctcactgacctttgcatattttgcaagcttgatgttcttgatggagagtgaagacttcagcaagggcagattcaactcaggctgtagaatcaaaggaaccaactaagtcagcaattctgtatagattaatcagtactcaccaaaactgtaattagcaaggtcaattacccgcaagtaggatggctgagactgatcaacaattgctgagtatctggaatcaaagaaccaaaaacaccacaacatttcaactcaactcctttgagagcacgcaatgtagtacaatgtacatcaatcagcacatgtacaactagttaatcgcaataattaaagatggatttgtgaaaaaaaatactacatcatgtttttttttaaatatatgacgccgttgactttttacaaacatttgtccattcatttttattcaaaatttttgtgcaagtataaaataatttaagtcatgattaaaaaacatttaatgataaattaaggtacagtaaaataatagataattatatattttttttaataaaataaatgttaaaacatatcgcaaaaatcgcgtcatatattaaaaaacggagagacagtaattaattaagaggtgtagtgtgtcactgacgcgacggcggcgtcctcgaccgtcccagcgaggatcccgggcatcccgaccgtccagttcagcggcagaactccggcgttcgacagccgccccgccgtcggcttgaacccgaccacgccgcacagcgccgccggcattcgcacggaccctgcaaaaccgcggcggcggcggcggcggcggtcagcgcatgtgcaagtcatcgaagagatcgagaccgagcgtgggagtacgacggtttgtttacctccgccgtcgacgccgagggcgacggggcagaggccggcgcagacggcggcggcggagccgctggacgagccgccggagacgcggccggggttgtgggggttcctggtggagccgtggtgcgggttgatgccgctggtccccgcgccgagctcgtgcatgttggtcttgccggcgagcaccgcgccgcacgcgcgcagctgcgccaccaccgccgcgtccgccgcgcacgcccgcgcccgccccagccaccgcgtcccgcctgcatcaccgtccgatcttcatctcaccgtccagtttaatcagagcatatatattactcgctctctttgttcatattataagtttgcttttattttttaaaaagttaaactttttgaaagaatttgtaaaaatatatagtacgaagtaacatttatagcatcaaattaattttattaaatttaacattaaatatattctaatagttttctttagttcaaaaatattgctatattcttttgtcaaaacttaagaagtttgaaacggaagtagtaattagtactaattgttttttaataatggaatgaatttcacccttgcttcaagaaagctatagccaattattacaaaatccgttcaacaaagagcatgaaaaattcagaaaataactatacacaaagtaatgaccaccgacactaaacaaagacaaatattattgaaatctatttataaatctttaccagtagttgtcaaatatctgcataacactttaggtttttgcatgcaggatgcataagtttattgtccatgtcacgctattgtagttaattactgtgattaattagttaattactcacctgtggttgggtagggcaaacagtcgatctcgtccttgacagcgaccagtatcccgtccatggcagacagaggtgtccctgcgattaatgtcgaaattaacagatcatcagtaaatataattatcacaagattaacgcacaattaagctatatgtcatgtcctgtctgtctgtctggcaccattctactgcactgcattgtgatgcaaatagctcttcttttgtcacaatttatgtagtggagtatcatactagttcataactgtccatttctaatcagattttgcatctgaatgtgatcaccgacaagcctaagaactaaccttgctagccataataactctggaagaacactgattgatctgcaaaccaatcgtatgcaaagttaacagctaactaatcggtgagacggccaggcaatgaatgcttgtcttcttagccgtctttacagttggatcaaaacatcaaatacagccagctccaagcctcccctgtcaggctgtcactgttcccttaatctcttccatcataatctccctgtaaatgtaaatgatctgaaccataccataatgtgacatatgtgatgctaattaccaacattaacatatctccattgataatgtcgttgccctttttcttgttcagagaacaataaatgtaaccagctccagcagcattaatttctgcagctccctttcctttctgtcttcctgtcttccttccattgtggatcaaccattgtgatgttttttttttcaagatgtcaaaacagaagaaaaaaaactgaagaaattgtttggagtgttgcttgtgtatgtagctgtagttgtactgcctcctggttgttaccaagtgggtacaaaaaagtttggttggctggctagaggtcaagacagaaaggtggtggtgagttggtttgagagggacaagttcaggccattcctgtgtgctgctgcttctgctgatgataattgcaacttccatgcattgctcttgcttcagatactgttactgccaactgtaacttacatgtcagtgtaaaagaatgttctttttttttacctctctggtatctcagggtggattcttcagcctgcctgatgatgtcttcagggctgtagctgatgaagaaggccatgttgaggcctgggcctgagcactccttcactgcagccaagaacctctttgcaacctgcaacaatgtagctgttcttgatcatttcttgcaatttctagtattttatcatgtgttgctacaattgccaattactaactactagtactcttcagtaatgtattcagacatgataattcagttactagtcaaggaaagagacatgtaaccatattattaggcctaataagtttagctactaatattttaaattgagaacattgtagctatccatgcaaagattgattacaaaacctgaacaggagtgacctcccctgagctgtacgccctgttgaaatccctgatcgtccagcgtttcgggctcgacggcggcgagccggcgagggtcgattcgaggctcgcagggaggcagctgacggcttcctggacacgctccggcggcgacaggtccggcttcgtcaggcacacattctgctctggaatgtctgcaggagatggatggatcaaacagtgtgtgtggttgttttcatcagattaactgaagaagattttgtttgtcagagcaggaaatttctcgcagagttcagagaagttcagagaaacaaccttcccagctgtgtgtggaagtgaacagtggaggctctgggatttcagcatcttggacaagctgcagatgatgaacagtagttggtgagatcacaaagacagcagaaagctgtgtcaaatcagagaattattcctgtctgcctgacactgctcaacgaaagctcagaacgcaactaacacactaagtaccagttgctgatgttctgctactactagttgagatgatgaaaaaaaagagcatttctttttgggtgaaactcctcaatagttctcgctgaaacctagtagtaacagttttgcatgcaagatcattgccagaatcaaaaggagtttttttttctctgaaaaaaagagcaaacttttgaggagaatttgagcagtgttgcaccttgttgatgagattatccttcttgaggatgtaaagcaccattgagccgatgatcggcatctcaagaatccacacgaagatcttcaccagcagccctgctacccgaggagctgaagaacaagaagaagaaaccaaaaaaagaagaaaattcagactcaacttcaagaacagagaattcagaatttccaagaaccgaactccagaatcaagaactagctggatgcaagggaggatcgaacctttgacgttagggctgatgtagaactcgtcgctgtccgggccgagattgacctcggcggccggcttgtacaccttggcggccatggatggcaacttgggaagcaaaggagactctcctctgcacaacgactgctgctaagctcctcccttcctgtctgattactgacaagaattggtgccttttatacgacgacaagacccaagatgaacggcaaaaacgaggagaaaagagaaaaaaaaaaggtaattgatttcttggtgaagaattaattaatcagagagcaatggacaaaggcatagattgtgacagagagagagagagaaagagagagagaggtagtggcttggattatgtatgataaacatacatacataaagtgtttggtgtgtgtgtctgtcagtgtgcagcaagagagaggaagagagaatcactgaacttttcaggttccaaaaaaaaacaggaaagaatcagtgaagtttcttgctgcaaatttggcggggattttggaggagaaatggttgcttcaatgcttggtttggcttgtgccaaagagaagctagatctgaattgtgtattactcctacatcagtattaggtactcatcaatgttagtaccatcaaatttaatagagcccaaattgttggaggcctagtttaatctttaattttttaaaacatcatttaagtatgagtatattactagtctgttcttgtgtacaagctaggacgatgtgtaatcaatcttaccatcaaatttgtcaaaattatgggtggctagtttaatctttatatttacacatcaattaagtacgagtatagtaccagtctattcttttgtacaagtaagttaggacaagatgtaaaatgtaaataaagatgagcattggcttcatcctaagctctttacactccaaagatgttatatgtttataatgtttataaacggagaggtttaaatttttttaaatgaaaataagtcagaatttgaccaagaaaattataggtgaaaatagtgtaaaatcagctacatgtacgcaaaattacaccggctttactgttatcgtttggtaatattacgcttaatttatacgctaagtttcttggtcaatttctatcggctttggtccatctcaaaagatgatgcccaatagtttttcaggttcatgttactgtcaaaccgaaccttctattttggttctggagaataatttttatgtcaactatattcaagataagcaaaaaagaaggcattaaaggaacatctctgtgctacggttgcattacgtcgattcatatcgcatcaaattaatacaacttctttcaaataaaaggatgattaattgagtcaacgtagagattaggatgagatgttgagtgtgtgacctaaattcattagccacttgacaggatttattacgtttagtgtcaccatctcttgattttggaatctgtccattactaaatgtttttttaatgctaaacaagagaaacaggtgaagcttaaaattcctaggaaacccagatgaacaattgtgaatatcttgacatgaggaaaggcctttttttttatcaatggaagtaattattttatttgaggtgaaacaccattaaagaagaccctaggtcattatccaccttcaacatgtccctaaagtaagaagtttaacaacctctctcccaccaaactcattcacaagttgtaaaagaaaaaacaataaaaacctatatgctgcacccatattctacatgaatcagcaaccaataaatgttgctggttttctagacgtgtagcatacagaaaatataggcatgaaattatgcaaaggagatcgatcttctggaagctcacataaaattaaaaagaaaaaagaaaaactgagcaaaagggatgcacggatggaagctaggaaaaggaagatttgggaaaaaaaatcagcaaccaactattccagcaattgattgggctcacttgcatcgcatgctcaattaattcctctctttcacatcctatccttccaaagatggttaacctaaaaccattcaattagtacctcttctctcaggcattaacttgcctactatgattaaaccctattgtatgctcacccaaaatggaggctggtttatgcttgtactgctatactttttgttgatttgagctatccttaattcattattgaccattgattgcagacagatccaacccttgctacgacaagagtaattcttgccttcttggatgcattgatgcatggaagctgcggtgtggtgctcactcattttggcaatgatttgtgattctccatctggttccaaatatatgacttctagatgcagttgaatttaaaaaataacataaataactttgtttccatttgtttatactacattgaaaatataaatagtacaatttatttagcaagggaaaacaagaaaacaataaaaaatatatccaaaaaaatcctaaaacatctcatatttaaaaaagagatgagaggatcagagtacaacttacatttaaaattagaggaagtgtggggtggcacttcagcacaggctgaatgctactggagccaaatttgcatcatgctacagactgctacttataccggccggtagaactacgtccttctcaaaattaatgtttgtccatttttcccattatgtgtacttccagtatttatcaatgtagagaaaattttaatagaagcgtctaatatttcagtcttaaagaaaaggacatatttccacctcatacacgttttcttgaaaagttcaacacttaaatctcatgcaataaaagatgcaactatttaggcaaatgtggtatactatcaattaataggtacatttatgaacattccctacaattttttttgtcttaattagattctagtgcttagtgggcatggtgccgactcctttcgttacttataaaccttatctattatatttttaaaacaacttgaaaggaggcactatatttgctgcggaggctagaaatttccacattaatcggagaaaaagaaaagaagagtccaacttaaaatacaatttaaaaataattgaaattcggaattaaaaataagcactattgaaaggagagtccttataagaacccaatacgagattaattaatattcggtataaaaaataaaataaaatccaaaattagaaaaaaaaggaaaagaagagtttgagtagaaataaaatttaaaaataactaaaactttgaattaaaattaagcaatagtgaaagaagagtccatatagaaacccaatacgagattactaaaattcggaataaaaaaataaaaagtcaaaattagaaaaaagaaaagaaaggaagagttcgagtagaaatacaatttaaaattaactaaaattcggaattaaatataagcaatattgaaataagagtacgtataagaacccaatacgagattaactaaaattcggaataaaaaataaaataaaatccaaaattagacaaattaaaaagaaagttcaagtatgaatgcaattttgaaacaactgaaattaaaaatacaaaataaaaatattaaaaggacacaatacgatattagttaaaattcgaaacaaaaaatagaataaattctgaaag

SEQ ID NO: 5566 - DNA, 30457 bp, Oryza sativa
cacccttaaggtatcagcaaactgacctgagagtgttaagaagcgaacttgcttctgaggtgagtggggattgaccttcacacattgtgcatcctggaacacgtcgagtctccccagctggtgaatgttttaaacattccacatcaatgaagaaacataagcaaataaacagtggttaaacaacaataccaagaaatgatgtgtaagaggcttgaagggcaacaagggaaatccaacaaggagcccatgtactatgtagaagcagacatcaagaataaacagaccatgttcgctataaagtaataggagtacagatctaaagtacatcatatttggataaactgaacacagtttcaaaggaccaacataatttgtaatgtaggtttcacaccaattctgcatctcaggtgcttgcctgtaatctgtatgtgctagccattctttatgacacatcaggtgaagccagaatttttcactcatccagaccaacagaccccaatggcttgtaaatatacccccacaccatcttgaaagtcgaaaccgtgttcatttgggactgatgtttcagggatcgaaccagacaacgattctgcatgttattcggactttgactcctttctgatacatatcatcaaacacaggtgcgcatgttgcaatcccatcccctacaactggaaatttatgatgacatggttcccaatcacccatcactactagcaaccgaagatgtgattcagatgcgattgcattttttttatgcgtattacatatttcgtatcagtagttcgacacacagcctacagcactggtgcactacgagtctacgactacaagcagcatccccaaatccagaagttaacgcaggcgatacagaaattcagaaatgaagccagaacagaaaagggcatctaggtttacagttacaggagggaatggatgcatcatgtaatcatgtatgggcgagagagagagagagagagagagagagagagagagagagagagagagaggagagagaccgagacagcacgcgcgtaccgagtccgcggcggctgcggcgccatcgaagttggggatgcggtggtggacggggcgcgggtcgcgcgcgacgccctccgcctccagcgcgtcccacacccgcttccgtatcgcccacttccacgccttggggtccgccgcctccgcccccgccaccgccgccgcggacgccatcccggcccgcgcctctgcgtcgaggcggagccgctcggcctcgaaccccgccgcgtcgaacgaggccgacgaagacgaagccgcgcccctcgcagctgcgcacgtcacggcgcggccgcgacgagaggctgccgccgccgcagccaacgaccgagacagcgacagcggcggcggcgacgccggcaggagaggcatggccactcgcgtgtggacgccgtgaaggtgagcacgtgtgctaatcgagcaccttacccacaatctcctttggacactgacaggtgggaccaataacaaggcgagtacgctcacagctgacatgtgggaccactagctcagagagaaagcgtgaagtgcaacgagagcatcgagctgatgcaacactccaccaaaacaaatttcaaatttgattcaaccaattggtagctgaaagatgcaaggcaggcgaaaaaacataactatcgagttcaaaattcataaatctcaacagtttgatcatccgcagcaccagcagctcagagtagcaaagcatttaaactgggtactcaaaatatctgccacaaaactcaggacaagtacagaaactgggaaagctatcaggtgaggttcgattgaattctgatggcctaggccttgagcttgccgaagaacctctgcttctcgtcggtggtctggaagcgaccgtgcccgaacttggacgaggtgtcgatgaacttgagcttgatctcctccagggcgagccgcgaggtctgcttcagcagcgactggcggagggtgacgactctcttcttcggaccgacgcagcaacccttgatcatgaggtagtcgcccttcaccacaccgtagtgcgggaagccgcccatcggggtgatgtccttctcagtcctgcaagggagaaaggtcagatgtcatcacaaccttagaatggaatgcacataacattactcaaggccttcaaacgttctaaagatgtatacctgtcgaactcggtgcaggccgcatgagactcctgaccagacttgccaatcttgtaaaccttcttgttcatctcagtgcggtggtggtatccgttctgaccagcacgggcaacagtgtaggacaccctggctggatgccaggcaccaatacaagcaaccttgcggagacccctgtgggtcttgcgaggaaggcgggtgacaccccaacgagtgacgacaccttcataacccttacccttagtgacaccaatgatgtcaatcatctcgtccttctggaagactgcatcaacagggatttccttctcaaagaacttgtagccatagtccaccttgtcggcgatagtgccaccgttgatctggatctccatgaggtgagccttcttctgcttcaagcccttcatctttctgatctgaattttgacaagaaatggtcagcaaaacatgataactcttcagaattcagaagagtacaagaggcaatggcaatctcacctgagtgtgggcaataacacgaacaatagatgcgtacttcttcatcttctcaagttgcatctggatttctttcttgccagcatcactgtcatacttaagggcatacttagtgaaagccttcttcttgcttttgcaccagttcttgtagaaccttctccgcacctcctcgctaaggtgctgggcccagacagagttgagagagcgaagtccacgaggtgtcttgacataggccacgagtccaacaatgacaagcggaggggtctcgatgatggtaacagcctcgcaggtttccttcttgtggagctctgcacattgtcaacatatggtgttaatatgttcaaggcatacctccaatgaacacgaatgcaagatgcagagcaacttactggagccaggcttctcgacctcacgcacaatgtgtgtcattccagccttgtagccaacgaaggaagtaaggtggcagggctttgatacgtcatccttggggaaggacttcactgcaaaaacataggatctagtgtcagcgtacaactgaatagtaactaaattctccaagttccacagaagcaatatatatcccattgggttatgcctatgtcctgaaattttaagttgggttacatccatgtacagacattttaaagacaggtgcattcttaactatttatgtaccacatcaataaaacaaaaaatctatgagcatgtgtcaatctaggtatgttagcagcatatataccaaaaggattagaaaataaagcgctatatttaggaacacatagccaaacgaacatccaaatgattgcgaaaatactctaataagaaacacctgtatctacctaacagaaaacatacgaaccatatcacgcgtacacacttagatagctgaatctattagctgcacaatatggattactacatcatgccgcactagattatgattcgcagagcataacgaaatccctcgtcagatcaatacggacagtgaaactcgcaatcaactcgctgggcataaacgaaatccgtcttcagatcaatacggacagtgaaactcgcaattcatgcatcaccaatcaagcgtgtggaaggcaaaggattcacgtacccttgccgcggtggcgggaggagcgcttcctcgggaggaagccgagggatccatgcctcgggtgctcgaacttcctgtgcgacatcttcctcctccttacctgcaaacgaaacccacacaagccatgagatccgcaaccaagaaaatgcccgtaaaatcaccaatcgcaagccacagcgatcaaactacagcaccagcgacgagaattcgatctcccagctagctcactaacaactaatggcggattgcggacacggagcggaggcaaaatctgaatcgaagcggggattggaggatgaggaggggaggagcttacctgaggagagtgacggcgacggcggcggcggcgcgagctgagtgcagaggcgagggaggtaaaccctaggggtggtatttataggcggctaccgaatggagggtttcgctgggtcgggcggaaatgtaggaatgggcttgaatgctagggctttgtgtggaggtcgcagactgggcctcacactaggtaaagcgaatgggcttttggactggatcgcttggacacgaccacaccaacttgcttacggcccaaatacgtctctttctgagtgttttgtattatgacagtggaatattgtgtactttatctgttcacaaatataaacattttatgttttttaaatttgttcacagatataaagatttttagaatagtaattgcttcatcaatcacctcacgttttaatttctttccatcttactctcagtaatccttctaatcccaaacatacttcattttatgatacatgtcaaagcctttttatcctcaagtctaatatctgctaaaaaaaactaaaattgtttatattctgttggaataaataggttaggccaaatttaatttaattaaaatcttaagatcccataagtattgttagagacaataatactaccttgaaaatttatgtggaataacctcaacttaaatagagtgatattggagaatccatgttgaccggttgaggtgatggttggactgccacacgcgcgcgcgccgagtcggcctcggccgtgggcgtggcgaggcgaggcggcctgccgagccaagcctcttgttgctcttccgttttgtaacagacgaaaataaagtcaccattaacaaatgaaattcattgtgtgttgtaacctacacaacaaatgagagattcattgtgttgtaacctccacaacaaatagagatttatttgttgtaacctctacaacaaatagattcattgtgtggtaaccttcacaacaaatgagatttatttgtgtggtaatggagatctctctatataaataacgcaaaggaaaaggctctcaaagattgagtcttcctcctgctgatgttccttggcgatattctccttttgttcctgcgttgtctctctgtttccccggttctgtccatcccgcacgtacggtagatcggaacgagcaggtgcctccgaaacttcatccgcttgagaacctgcacgggtaggcgggcgattaagtttttggggagcgctacgtgcgactgcttttgttcgtctccctctgcatcatcctcgccaacatgacgaacaccggcgacaacagtaacactggagacaaggagaaggaggctcccgttaacaccaacggaggcaatactgcctcaaactccagcggagagccattctcggggtataacgatttactattaccgtttgttcttcgtttcctactactgtcagtcgcaatgttattgcgttgccttgtctatgttgatgcttattttatattaagcacactcatattgtacacatttagcactgccactagatcttctcaaattgcaaatgtcatgttgaaaggaccttgatgtcgcctagagggggagtgaataggcggttttaaaaaataaatgtggaagctaagacaaaacagggtcggattgtctgatatcaggtcggatagtcctatgtgatcagatagtctgaactgagatcagactatctgacctgcacaacaacaatacaaacaagaaacaacctaaaagctctagatccaatccacaagcaaggaggtgagctcaaccaacaacagtaaaagcatggcacaaagcaatgcaacaagaaggtaaatatagtgagaatatcaccgaggtttacgcgatgatgtatttcccggagttcaaatccttgaggggattctagtctccgttgaggggctcgcaaagagacgggtctttttcaaccctatcctcgtgagattgcacaaatgcactcctccttccactaaggatatctctttccttgcggaggcgagatccggccttcacaaacttctcttggccaaccacatgtagatcggtggcccaagaacaacacctagccatctaggagtcctcaacctccaagagtaataaacaccacacaactcttggacaaatcctagtgctcaagatcaagagaaacacacactaggctcccaaactccaaatccacacacaaagatctaagtcacaaaaaacaagagagatttcagatagagagggagagagctcaaagatccaaagcatttagcacaaagcttaacccaaaacaagatttgaatgaaatgtattttgggagaccctagaaaagggttggtggggggtttatatagatcccccaaaatgtgaccgttggaggggaatctttcagcccacgtcggatagtccgatacaagatcggatagtccaatattttaaacctccaaggcaatgagaaacagagaatgaagttccatgaaatttcggacttaccgagacatcggactatctgatgttaaattggagtatctgatattttagaagtaaaaacttcgtcctcaaacaaagactcaagttccatgaaatttcggagtctctgtatcatcggactatctgatctaacatcggatactccgacacctagaaaaactcactcgaaaggatttttcaaacaaagacagagagtgaagttctgtgaaaaatcggatagttcgatacatcggatagtctgatttcaaatcggatagtctgatgttgctcaagtaaaaatgcaataactttttactccgaactccgatttcgaagatcttggactctatagaaagctagtttcgtgggctatcaaacccaacataaaaaatggtccaaaaccttcaagagtatataaaaaacttgcaaagaaacccggtgtaagtgttgtgacaagtgaaacaactcgggattgaaattttggcttaggtttttcaactcacacaaagatgaagcattttgagcactaatattcaaccaattatatgcatgtggtatccctcttaatagtacggcatcctaaactcaaatttaaaaggcaaagttataccaataggagtgccttcacaccatattgtttcttcacttggagggttaccaacgtcaaggtcatttgatcatcgaaaagatctcatcttcttgatctttgacatttcatcttccatttctcaaatgattgatgtggataatccatggcttcaaatggcctcgcacggttcatcacgacacagtcttcactcgcccttcaccaccggtttcggttcgtcggcgccaagccccttgcttgcccttcaccaccgcatggtctattgcagctgagtgtcgcttgcgcttcaccgtcttgccataagtagtcacttcatacccgcatcttcaatatcttctctttaattctcatccatcaataagtccatttcctagcttcttcatcggactaatcacttgcttatacactcaataagtgcattagtcccttaatcgtttgtcatcaataaatcaaaacccactaggggcataaatgctctttcacatgtgttttgtcttaatattttagattaaaatatgtcgaattatgaccaaatttccaacatattcatggactgtgtgggagtacatctctatacattgttaaaggcatactcactctgtcgaaaattaaatcaaattttatcatcccgagccaagtttagtgatgatatagaaatatttaagtgggcttcattaatagaaaattctaattgatgggttgataggtatgtgatattgataggataaacttcttgatttacggagtgaggataagtaaatggataaaaatcgacttattttgaaacaaaatatgaactcttgtaggatcgagatgtcgactagaggggggagggtgaataggtgatttaaaactaaatgacacctaatcaaaactaacctaagttgctaggcttggtgagggtcaactctaactaagcaactaagttatgttttgcaaacctagggtgatagtggctcaattatatctctaggaaagtaaatcacactcctatgtcaatgtttagcaatcctagggtgatatgatctcaagtttgtctctagaaatataaattgcacaaatgtaaatgcgacaatcaaatgagacaaggagacaagagatttttcaccgaggttcggaaactcgtcggtttcctactccccgttgaggcgagcccaactccaccgctcaaccacgaagccaccgcacgcccccttcgtctaggggtgggcaaggcgggagccggcccacggagaggactacccaagcctcgatcactcggggtagttcttccttcactccgaaggtggtgaactccaaaccactcacaaaccggcaccgggcctcctccataatcttctcggagaggtcaccaggcaacttctccacaagccgtctaggaggcggcaacctccaagagtaacaagcaatgacctggcgtggagatgatcaatcaagtgccacactagctctacaaatggaagcaaatgcacttgactcttggctaatcaaccctctaacacactagatggatgaacacaaagctcaagtgagtgtgagagaggtgcaaggggtgtatgcaattgaattgggtgccaagagagtccccttgctgctggtgggggagtatttatactctcacccaccaaaactagccgttgggggcgaaatcccccaactttgtgctctgccggtctgaccggaggtatgtggccgatcagaccgtgctactctgcagcggctagaaaactagccgttgaagtgctgtcattgggccccatcggcctggccggtcagaccgacatggggtgggcggtcagaccggcctcggcttggtcagactatggctccgtcggctctgtatcgaatacggctccgaacagcatcatctcggcctccagggggccggtctgaccgcacatgtgccaccggtcagaccagcccacacctgccggtcagaccgcccgcttggggccggtcagaccggccagggcacgccggtcagaccgccactatgtggccggtctgaccgcccctggtcaggccgaacccagtgcaaacagggaacaacaatatatagcaagtgtgtgttgtgaaatgtgagcagaagtctaaatgcataatgacctaatgtggcaattaaaatcatctctttgctaggtcattacccctcttaatagtacggcgaaactaaaaataaactagcacaattttgatcgccctacacctcgatcaattctaaattaaagcgctagttttaccatcttctttccctttgctttgcgccgtcaattttaatccatcgataatcatccatgcgcagatatgatgtggacctaacttaaaatatatagctcaaagacaatggttagtccaaaattagcgcttgtcattaattaccaaaattaacaacgggggcctagatgcttaacctccttcgtcaaggggtgggcaaggtgggagccggcccacgaagtggactacccaagcctcgatcactaggggtagttcttctttcactttgaaggtggtgaactccaaaccactcacaattggcgcggggccttctccacaatctccttggagaggtcaccgggcaacacctccacaagccttctaggaggcggcaacctccaatagtaacaagcgatgatccgactcgaagatgatcaagtgccacactagctctcacaatgaagcaatgcacttgactcttggctaatcaactctcaaacacaacaaatggatgaacacaagcactagagagtgtgagagtagttgcaaggggtgtatgcaaataaagcaagtgccaagagaatccccttgttgttggtgggtgtcagggttacgggttaggcataccctttacccttcgatatacgttacatatcgatatggcatacccacgcgcatgcggatatttcctgtatattctaaggaaacctttcacggaatatacagacgggaagaatcctactcgggcagaactgggtcgttggcgtatcgtatagggtctgatacctccaagttctacgtggagacctctagatctgcgatataaaagggaccccccggggagggtttaggacatcgaatctcagagccaacacaacctacacagcctacgaagccggagcctacgaggagccaagtcgtcgagggctagttgaaacaactcgactacaatctcgctggatccgacaagttcccttgttccctttgtaacctatgttttctaccatataatcccacatcaactggattagggttattacctatcaaggggcctgaaccagtataattcttatcttttgtttgcttgatgtcgtactacgtagatccttgtaccaacgtaccccaataccctctatatccggtctacgggtatcacccgtcgacagtgggggatagcccatcccacaaaaactagccgttggggtcaaaatccccaactctgtgccttgccggtcagaccaccattgggtggctggtcagaccggcctacattgtaaaggctagaaaactagcagttatagtgcattaaatgcactgacagcggggggggggggggaggcagtcagaccgccatagggcggtcggtcagactaccaggggctcggtctgaccggctgtggctctagatcaccaacccatacgagaccaaccggctaggaggggcctggtcagaccggccaacaccctccagtcagaccgaccctggtcaaacaatgcaattcaatttaaaagcgaaccaagtctaaatggaaatgacctaatctggcattttgatcatctctttgtttaggtcattacccctcttgatagtatggcaaagctttaaacaaatctggcaaatttgcatgcccaaactcctcgatcaattaaaataaaacacgctagtttcatcgtctttgttccttttgctttgcatcatcgattttaatcctcggtgatcattcatggcttgcacattatgtggtcctatctcaaaatgtataactcaagataatagttagtccacaattaacacttatcattaattatcaaaatcaacgatgggggtgttgatgcgaaaaacacacactggcctgggagatttgcttaactccagtgcaggtcctaaattttgctctcgggttcaaaggcgtgccagttaatttgatcctgcaatcaacaagaaagaaagacaagaaaaccaaggttaaatccatacacgatagccgatcggctggggccgatgacatatcgttcaaactctgagtcgatgttattggcaatagatcggcgatgaagaataaagtaatataaggttaaatatattcgatcagctgtagatattaacaatatataatcatcttcttgaaatatatttaggctaagtaattgggatagattgaacagcaagtcgagatagtataaatcacttatgctcaaaagtactttaagatgaagattatatatgcgtttatagcatagccgatcaaaaagacctaacatgtgtcggctaatactccaataccactctatattaagatattaaaacaaacaagatatatcagacaacgaccataatatactttaatgcaataagatcttaatataaagggcatatttagcatgtcaatcaagcatacaaggaataaagtagctaaatcaagtaatcataaaacaagtaatcatataaaggctgaaaccccgattgctatctccattagtaatcataaaacaagctagatattgcagttatgaatattacttaatagatcaaactcaaccgatgcaacattaagcataggaataaatacaagatctaagcaagatgatgaaaacatcagaaagatggtatatatgctatataatttagactaataacgaaatctaactctatcggctactctccagtgataaatactagccaatcataggttaaatcgtgaaactaataaagattatgaagcatatatatgataactcgacgattcacataaacaagattatagtatcatgaagatggaagcactaatcctgagaacgcaagccgccatgacaagtttacctcttgttgaagatcgaaatcgatgcagcacaacctgaaagcaagaactcgtcgaaacaatgaaagtagaaaaatggtggtgatgcgtcgaaagtgttattgagttgttgttgtaaattacatgggttcgggttatatttatacccgagataaataaacggtccttgccggacacgactcttatctctaacaaactctaagatacgaacaagactttacggcagactcttgccgaaacatatctctaaagaacctatttaaaatatcctaattaatagatacagttgcctatctgtgagcttatctccatcgaggcaatcctcatgaagcacgttggttgatcccgaagacgatcctacgaccatcttcaacgaaatcggctacatcggctgtatcggctatcctctgtcatatccatcttagctgatacagtcttcagccgatgctctcgcagctgatgcgcactctgttcttcgaatacaattctccaccgaatccactttgattccgttcttgaacctgattcatgattaccaaatttggtcattaacagggggcctagatggttcaatctcctcctttttggtaattgatgacagacaccacagatacatataataaccatgaatcacatagatacaaatgtgcaaaacagagagacggattaacgcatgattaattaagtattagcttaaaaaataaaaaatagattaatatagattaatatgatctttttacaacaatttttgtatataaaatgtttgcaaaaagtacatcatttagtagttcgagaaacgtgcttgcgggaaataaaggaatggagattgggaaccttgagttctatatagaaggaattagaaaatatatgtgaattttaatctaaggggcttaattacaaccaaatcatactctaaccttacaggagcccttttttttttgcgtgattacaggagcttaaacatgcatctacacggacgcgccaccgtccggccgtgtcaggatgccggcactgtagactagcgcccaaagatgcgtcatgaactcgccgcctgcgccgagcatctcgacgtggatgtccacgttgtccgatggcgcgaggaacagtatgaactcaacccagaactcggccagcatctgccacagccgctcctcgttgtccatagccatcctgagctggccgccgagcagcgccgccttctcgatgatggtggagctgacttgtctctcggacgcgggcaccgcatctctccttgtcttggatctcctgtagcctcgcgagcacggagctcgtcgtcctacatccgtcgaagtggtcccgcgcttgctgcaccgtcgtgtcgaagatctgctgggcgatgtagctcgggtccgggagcatctctggcacgaatgccaccaagtaggcgcagtagttgaacagcctcctcgccacgagcctgttatggtggtcgtcgtcgcggcggctacggccacggccactcgcccagtcgcagcgcgtggtgacgacgtgccacacaaggatctggtcagtgaggtttgggaaagtgcacgcccaccccagccgagacgacaggccgtgccttcgcaaggtggagatgccattggtgagccgcccagagctagacttgaaggagaggagcacggctccgctgacctcccgtgtcaggtgcttggtccgtcccctcttctggccctgcctccgtggctccaccaggcacagcgtcagccacgacagcaggttccacacccacggtcggtggttgaacccctcgaggagcacatattcgccgagattgtcctcccagtaattcatcttgggcggcgcgatgtactccttccaccagaggtggcggcggcgcctgttgtaccagggccgctcgtcgcgcacgcagccgtacacggtcttgatgtacatcatccagttgctgttgaagacgataaccgcctggaaaagctcgagcgaagatgagatctttcgccttctgcgacccagccgctgcgtgaatgtacccgtagagccgtagcttcagcagtttgtacagcgtgaacgcgaggcatatgtccctggccaaatccttctccaactcggagtacccgacctgatcgtcgatccacgggtagacccagtcaatggtgacgaccgacttgctggagctgatctgcgccaggatgtcgccgtcccggctcatgggcgccacggtggcctccccgtggaagatgtacttgtaccctttcatcgtcctggggttagccggttggtctcccgcggcgagggactcctcgatttccatgtaccgcgcgatcacctccactcccatgcgccgccgcgaggccacatcgttgctccgcccaacgaggaattcggcgaccatcgccgccgccttgaacacgctgaggctccagaacgcccaggtgaccacccgatagctcatgttgtggcctctcgtcgtgttgacgatgagccagagcacgaagatggtctggaggagatgctgccgcaccacgttcttcctctggtcgaattcgggggtaatataattaagcctccatctccttggatcgattcactggtgttttttgtggtgcgatcgatcgatgtgtaatgggggtgaactaactcgtaacaggaaagtacgtagtaaggattttgctagctcggctcatttgttctctctccaattaaaaggtgagagacggatcgaggaggaacttgaggattgttgctcatgcatttttgttctagtgcgagaatgaagtggtctccaagtaaaatgtgagagacgaaagaacaatcaaagtgttgcgcgaagccgaagaatagaatgcattcacgagctagggcaacctaaagttcttttctctcgatcggactatatgtttttgcgtgccttgagccgttcatcctcgtcgcctccaatcctccatggctgacggtcaccgggcccaatcccagagagtgggccagccctaacgaagactatatgggccatgatggtgactgttcttctatcctatctaaataggaataagttcaccggaggtcccttaacttaatagcgagattttttttgaagtcctttaaccacaaaaccagaaatgtgtacccctaaactccctcaaaccgttcaccggagttccctcggcagtatttttgcccggttttactgacgtggcatcctagtcagcaaaaaaaaatttaaaaaaaatacgtagggctcacatgtcagctgcacatatttttttcttctattttcttctccttctctcctcttctccttcaggctacgggcggaggctgcgggcggagcagccacgcgccgtggccgcggtcgtcgtcggctctccaccgtcgtcgttgctgtgagcgaggctacgcggcgcggccgtccggcggcggagcggaggcagcggagcggaggctgcgggcggagcagccgcgcgccgtggccgccgtcgtcgtcggctctccaccgtcgtcgtcgccgtgggcgaggcctagagttacatgcatatatgcattcattcatgaatatatacatatatattcgatcgatcgatcttgtcactttcaacccgtgcagcctgcaaatcaatcacaagctgcttttgctttggtctttttctctctactgcatgcatgtatccctcacttgagaacccatagctagcatgcatgcgttcacgggcttttggcctttcctctctcgcgcgcggagggacgccattgccgcctacaagctcgcgagtgaagctcggctggctctctctcctctccggcaagaagggcgccaaggccgccctgcccgacgacgacgattacaagccccccgcgccgctgctcccacccggggacggcaacgacgacgaggagcccatcaacctcgtcgcatcatcggcgaagatgaggccggcgggagagggggtggtgcgccccatcggcgaagaggtcgccgccgaccgcctgccaccgctccgcagccacacttgtccccccgccgctcgccgaccaggcccctcgctccgtcgtaattgcccgccgccctccgcccaccgctgctccgcctaccgcgctcgtggaggtcaaccaacacgacgaagacgccggcggtgaagagctggagcatgacgagcgccgccgctccgctgccactctcgcccgctgccctgcccaccgctcccgccgtcccagccgcctctctcccactctcccgccaccgctggcgcgctcgctccacgccgcccgcctcctctcccctcccccgcttcttccccgcgcgccgctgtgcccgcatcgccgcctgttgccacgccctcatctacccggccgcctcactgaaaaagagatgagaaaagagaatgtgcagctgacatatgggccccacgtactttttaatatattttttctgactaggatgccacgtcagtaaaaccggacaaaaatactgccgagggacctccggtgaacggtttaagggagtttaggggtacacatttctggttttgtggtcaagggacctcaaaaaatctcgctgttaagttgagggacctctggtgaacttattccatctaaatatggcccataatcccgttttgctgtccctcacctttacgttgagtttgataaatttgtattcctactaaaccgcacaaaccatctaaattagatcccatagtaatatgaatgagtggttcgccgacgtggcatctagtcagcaaatgaataaataaaaaacatgtgtggtccacgtgtaagtggccaaccaaattaaatttgaaaatatactgttcattctttttcttttagaaataaaaaacatgtgtggtccacgtgtaagtggccaaccaaattaaatttgaaaatatactgttcattctttttcttttagaaatattgggttgcattctaaagaaaagaaatattcgggttgtaaatttttttttacaaataaatcgtcgatcttgcacaatcattgatgaaaatgatgagtgcgtacgtcacggatggtatcgtgtggggaaagtacaagaccgtctcgcgggacggaagagcgagaccgaacggttcggtctcattgattgaaacatcggcaccgtctcgctgatgcaacggtcccccatcattaggcccctcgcctcgctccccccgtcgccgagctgctcagctagctgcctgacctgatttggaaggagagaccgggagcacgtgaaaggagaggagaacagagagagggagaagatgggaggagagtgagggttgacatgtggggctcacttccgtttttgatacgtaagcgctagatcagtgaaaccggtcatttatactgtggaaggatttaatttaacccgattttataagtaggtatggctgttaaggatgtctaagacgtaaagatgaggaatgacaagtgaacttattccaaacggtgatacggttgtccagtttgggccgaggaatccaggcccaacaaggacaagagaagattggtttggtggggccccctcggcggttgagggctgctgataaaactcaacctatacttcagggacattaaatggacttgttctttaggccgcggaaggcaggcccagtgaaagaggaaggagaagatttggtttggtggggccagcacaaacgccggccgcaaacgaatccatcatctcgcaccacgcaacgccaactctccacgcgccgccgcccacgccgacgcgaggagcactcgccgcccgccaccgcgctctccctctccccccaattccatccctccacgccacgatcgccttccgcaaggtaaccgccctcccctcgccgccgcggctcggagcttgcatgcatgcacgcatcatcatcatcggctcatcgcagatgtagggtagggacggtggtaagtgcagcgccagcttgtgtggcgaaacctagagagagaacactgttacctgcagttccaactacccgttggattaactatccctctctgtcccataatactgttcatttttttggcctcttctgtttgtcccaaaataagtttattttgatttttgagtgatcattgcatcggagtttataaaaatagagaataaatgtattgagagtaagataaagttagcaataattgcattgtgattcgataaattatgggtattttagattttttggttttgtattttggtacgtgtgggatgaatgaaaaatgggatggaggtagtagcttttgtcaaattctcttcttttgggggcattgcatcgcgtcctacatgctttgatacattgccaaagcaatcacctagtcaatttttattttgtaatgagtcaatcagtaagtggagtggttgcacaattacgatgggccgcccaaagaacgaaccttgcagtttgtttgtttgtttgttgcatatatggattttcctttacatattgcaattctaacctaaaagttcactatacaatgggcccaaaggaggagccttgcaggctgcagcctgtttgttgcacgtggaatttgtttgcatattgcaatctgacctacttgaaatttcagttatttatttatgattctgttcctttaccttgtgagattcatatctttactatgcaggtttcttcttcagtgcacatgtgaaactgtacttcacctcccatatataattcagtgcagagagcattcttgaataagtatgaacccttattttgttggtcttctcgtcccaattgcggtatctcttctcctacggaagaggagaatggttgggaagatgagggcactgccagttgatgtgggtggagagcccgggtatgcaatccgcaactatcgattcaagcaaccggttgaaactcactgggaaggtgtcaccacgctcgccgagttgtttgagcagtcctgcaaggattatgtcaacatgccgctcctcggcaccaggaagctcatctccagggaacaggaatcatcactagatgggaggtcctttgagaagcttcatcttggagagtatgactggaagtgctacgctgaggtattcaagagtgtttgcaacttcgcatctggactaattcggctaggccatcagaagactgatcgtgttgctattttcgccgagacgcgggctgagtggcaaattgctctgcaggtaggcccctgtttcttcttctgtaattgtttcatatgctaatcttgtgtgttctatttctgtggagatgtgaagaaggaatgcaatggataaatacatagagcaaaattcctacgtagtgaaacatgcatagatagaaatgagtgttccagacaaggtttgtcctaagaaaccctgcaattgcaggtgttctgctctgctaatatgcttatctaaatagcggacaaccaacagtattcaactagtaacatcgtggcaaaaaaagtattgaagtagtaatacagaatgatagtgcagttctttatttaacgtaatcatgtaaattgagtaacggggtattcagatttgtcaatgggtggcacaacatttgattattatggtatgtgtgtaactgacagtggtaggttcgtaggtgtgacagcagcagacacaggaatggtatgggttaccgagcgtatatgtacatgctgtcataccgtgaaaagtatagtgcctcatgaagatactagtcattggaaatattgcacatgctgcatgcttatataaatcttaattggtttgtttaacatacatccaccctgactctgtttcctatttttcccccctattgctctctaatgttgagatcaaccttgttcctgttccattgagatctgaacttgagtttctctaagttactgttcttctatttgcaaggcatgcttcaggcaaaatattacagttgtcacaatctacgcctccttgggagaggaagcactgtgccactcactaaatgaggtaagtagacagtacagtcacttgtgtctcaccttgtctgtactgtagtctctgtcactaaatgagctaatttgcccttatgttctccagacagaggttactactgttgtatgtggtcagaaagaactgaaaaaaatgattgatataagtgggcagcttgacacagtaaagcgagttatctatatcaatgaggaaggaatctcagctgaagtttctttagctcaaaaaagcactagctggataattgagccgtttgaggatgtaggtagattgggagatacagcacctgttgatgcaaacatgcctctcccatctgacgtagcagtgataatgtatacaagcggtagcaccggattgcctaaggtttgcccaagcccacctgtttttccagtgttctcattttggaatatctttatgctacaaatttgccttttacttccaggactcatgttggcaattacttcatgatacacataccatgtgaaatatcagttaactgtattttctgcaaataaactaacatatactaaaaatgttttatagggagtaatgatgacccatcggaacgtcctggctacactttcagcagttatgaccattgtgcctgaaattggtaaaaaggatgtatacctggcctacctgccacttgcacacattcttgagttggcagctgaggtgactctaaaatagcatctatttacatcatcggttacttaagattaataactcactgtatggatttttttttcaggcactcatagctgctgttggggcttccataggatatggatcacccttgaccctgactgatacatcaaacaaaataaaaaagggaacactgggtgatgcttctgcactcaagccaacactgatgaccgctgtacctgctatacttgatcgtgttcgtgatggtgtgagaaagaaggtactgcactttaagctgtttcgtccaatgttcttcatctctttcttaatttactgattgttatttttcatattgggatggctttaggtggatacaaagggtggtgtagcaaagcagttatttgatgttgcctataatcgtcgacttgccgcagtcaatggaagttggctgggtgcatggggattagagaaactcttgtgggatatgcttgtcttcaaaaaggtgcgagcagttttgggaggaaaaattcgctttgtactttcaggtggagcacctctatcaggagatacccagagatttatcaatatatgccttgggtaagattatgaataccatcatcccatgttgttagttgccatccttgtttaatgaactatgtttaaacacaatgaaatcataaatttaaacacaatgaagaatgaactatgcttatttgtttcaacatgcatagagacctgggaattaacaagtttatgcaatttcagggttccaatagggcaagggtatggtcttactgagacatgtgctggaggaacattttctgagtatgatgacccatctgttggtcgcgttggtgctccactaccttgttcgtacattaaggtaagttttgtttttcttacccatattctaatttcagatgaattcgtttttggtagaaaccactgtgagttgaagtcttgaagatcgtccatatatgaaagaatatgttcactgttttggtttttgtgatcactgacaagctcatgctttgatatttgtaacacgctgatcttttttcagtaatctgattgatctccatattattctagtcactattatctgttggcatcacaccgatgcttgacatttttgtaattatattatccagctgattgactggtcagaaggtggatacttaacaagtgactccccaatgcctcgaggagagattgtcattggtggtcccaatgtaactaaaggctatttcaagaatgaagctaaaacaaatgaagtctataaggtatgttgtcttgttaccaatatgttcgatgactacttcacggctcatagtaataaccttctatccacaataatttacataacctttgtacctcatttatcttgtgaaggatgacgaaaaaggtatgcgatggttctattctggtgacatcgggcgcttccacccagatggctgccttgaaatcattgaccgtaaaaaggatattgtgaagcttcaacatggtgaatatgtgtctctcgggaaggtcagcaatagtcatgttctgttcagactagtagttgttagcccttcttaactgattggaccatcacaggtggaggctgctctgattgtgagcccatatgtggagaacatcatgatccatgctgatcctttccacagttactgtgttgcacttgtggtagctgcacacaatgagctggaaaactgggcttcgcagcagggagttacatacaccgatttcgtagatttgtgccagaagccagaggctgttaaagaagtgcttggatctctatcaaaggtttgtattctccactcacctcgtccatcaataatgtagggtgcatccttggatgaactctagacctggccctttgcggcatactaatttgaacgtaagctgaaaatttgcaaaccacgtccacttttagaatgaaaaattcaactctaatgacataaacttgctatttcaggctgcgaagcaagcgcgactggagaagtttgagatcccggccaagatcaagctgatatctgagccatggaccccggagtctggccttgtcactgctgccctcaagctcaagagggaagtgctcaggaagacatatgaggatgatcttgctaaactatacgcctgatgatcaatgctgaattgctgattaagcctactcgacgttttgacacaaccagctaccgtaggacagagctcttgtgagcaaactgaagatgctgataccggcaggaggtagcctgaaattttggagctgtggttgtttgatcttttggagctagcacaattatgtgtagcctcatttcacacttacttctgtgtctctgccatattctcttgtgaatttacattgttcaaaggaaaaaaaaaaggcattctacatattatggggctattatgatcacgaagataattactccctccagccaagaagacaagtcgttttgtagttgtacatgttcgagttaaactttttaaactttaaatatcttttttttaaaaaaaatatatttagattgaatgtattatgtattagaaaaaaaataaacatcatgcttgtagatttgcctcaaaacattttaaggctattatagttttgtgggtttttcatatattttaccatataaattagcggtcaagcctaatgtaatccgtatgccatcgctccggagcagccatgcgtagcacatagaaaattcaaacctcctttggaatggaggaatgtttaaggaattttggagaaattgaacaaaaaaaatcctataaagttcctaattgccaaatgaacctgaatttgccatccctccacagtagccaaccgtagcatatcaaaagattcagtccacctttctaaaataataataataaaaagattcaatccaggtgttctgagaaggaatcaggtaataacagtcatgttgtaccttatcccttttcaaaaacttattactgaacatatcccttttcatgtggcatacccctttgatttcctctcaatgagattaggactccaaatatgccatttaattaatagggatggaatggatcagatagggatggttgataaatatattgtatttttaacatatttctaagtagattttaactttgtggatatggaacagattactttgaattttgtaaatactatggaatcagagtggactcaacttataaatgaaccaataggcacgtacatataagtacaaaagtgataacaagcaatgatctgacatcaagcaaggatccaattagactctctggctcgcgagaaatctatatgatagaagcgacaaaacattagatatactatagaagcgacaaatggaatattggatatgctatgatggtgtacaatctattctatggtatatagaaaaattggattaacttggtcggacaatccacatccgacaaaatgaataccatattcggatcttaatatatccgttactacctgccgaatttttaaaaaggcagtcttattgaatcagaaaccgaatgaatcagaaactatccaatccgttttcattcataatggtgtgtaaatttttttcgatatatattccatgcatggttgtattactgaagaattccttgttcatgttcatatgagaacaaatgcgatgactagacaacttgcactcaccgaatctggctacttcaggagaggatgtcgagaagcaaaggcgtgccgaggttgtaggtttttctttttgattgttgtatgttctcctctgtgctcttgtatctcttttggctatgtatatcctttgtgcatatagatattagattaatgaaaatccactattaaaaaatgagaacaaatgcagctgtggcaagaaatttgcaatgtactactccctccgtctaaaaaaacttaacctaggaggctaggactatgaatctggactacccttatccagatttgttgtcctaggagtagtccctcctaggttgagtttttttagatgaagggaatatatgacaaagaattgaatccaactaattgtaccaactttaatacaagagacaactacaacggccaaaataaaactgaaaaaaagctttcttttcccatttttgcatcactcgagacggaaaagagagagagagagagagcaaactaaggtggtaaactattaacatatttcctaatttattaggaaagtacaacgcccttttcactttctttttccaaattgagacacgggagcagaacagttctagctgtccatcaacctgctgctctctcctataaatacattatagagaaattcatacttaaaaatcgctggtctgtgtgtgtttagtgtggaagcgcttaaagtgtaaagacatttttatgttaaaaaaaaaagagaaagggttgtcgttgtatctggctatctatatttgtacacatatcattacttaatgtgaagtcatgtgacatccctttaatttcctcccaatgatactgggactctccgaatgtgccatacaattgtttgggatgaaacggatgtgatgaggatggatgatcaatataacgtatttttaagtggattttactttgcggatatgggacaattactttggattttgaaacagtatgaagtcaaagtggactcaacttataaatgaaccaatatgtgcacatgcatataatacaacagtggtaacaaacaacaacctgacatcgagtaagggatccaattagactactaggttcgtgggaaatctatatgctagctagaagcgacaaaagaaacaatagacatgttagaagcgacaaatggaaccgtggatatgctatgatagtgtatgatccaatctatggtataaaagaacttggataacttgatcggataatccgcatacgacaaaaataaataccatatccgaatcatcatccatccgttgtaacctgtcgaaagaggcttttcaaatcctcactcggccacatctatccgaatctaaatcggattgaaccaaaaattatgccatccgatttcatgtatagtgacgcgtaaacttattcgatatatatttcatgtgattatattgatgaaatattctaaatttatgttcatacgacaacaaatgcagtcatggtaagatttagacaaataaactttataacatataacatagaagtaaactccacctaattctaccaactttaataatacaagagacaactatagcgggaacaaaaacctaagggaaaaaaaaagttccttctcccatttttgcgtcactcgagaaggagaaaaaagaggaagaaagaaagagagcaaacatctttgcgacattaccttttactgaagcacccctctttccctctcctgctggcatggctgtccgctagccacggccaacggcccacagctggctcgctcgctcgccgtccatgatatttttcctttttttttttttcatattactcccgatgatcatcctgtcccaaaccgcaccttattatcaaatgagtaaattttgtacaacttcatcatgtaagttatataaaaccgtgaacattttgacatgtaataaataacctttattacgatattaaagttttacaaaaccacaccattaaccgatttagcatactcctatatcaattttcttttgaaaaatattcatatagatgtaatatttatataatggataaagaacgtataaatttgatgtgtaattatagaacttgaatatacggtagactaaagtaaaaaaaatgatcaatggcatgttcgataaactttatgaccataatgtatggggttatgtgccgcgcgccaaaacagttatggttttgtgcaatttaggggttgtttagatgctatactaacattatcaccatttcccatactttcgtgccacactttagctaagttatggccaataaaaagtaggccacactttaattagctagcaaaataagagtgtattcttatactaatagttcatctcattttacatattctatcaatcttccctctttctctaaaacacaaccttagtatctccaaatgaatctaaaatcaccaatgttaataaacagaggggagggaccttttatctatatgatgtggtatgtacggatatgctataagaaaagtaagagtacactcgttgtatcttgctatctacatttgcacatatcaaaactttaccataccatattagacatctccaatcatccaaatatcttactaaagttatgtgacatatccctttgatttcctcccaatgagattggtacgaataaaatggatagaataagaatggatgataaatattataccattgaagtggattttaactttacggatatggaacggattacttcggattttgagaaacactatacagtcaaagtggacttaacttagagatggaccaatatgtgcaaatgtacaaagtacaacagtggtaacaaacaacaacctgatatcgagcaggttagactcccaggcttgcaaaaagtctgaatggtagaagcgacaaatgaacacaggatatgctatagaagcgacaaacataatagtggatatgctatgagcgtgtacgatccaaatcattgatatgatatatagaagattttgattaacttggtcggataatccgtacccgacaaaaaagaataccatatatgaatctttattggtacgtactaaccgtcggattcttgaaaagacattactggatccttgcttggtcattcttgtccgaattcggaatgaactgaatcggaaactatcccgttcgttttttatgtacagtgatatgtaaacttattcgatattcgtttcatacgtgatcgtattaattaagaaattgaaatttacgttcatactgcaacaaatacagttgtggaagagacttatagacttgtatactttatagcacaaaattaaattccacctaattctaccaactttaatactacaagagacaactacaacgggaacaaaaactgaaaaaaaaaggggctttatttttcctgtgtttgcgtcactccagacaccagaaaatgaagagagaaagagagccaaaatcttgcatcgtcatcttcagctgacactctttccctccccagctgaccctcccagccgagcagccacaggccacagccgtccatggtactggtagtcatctttttcccctttccatattactcccgatgatcatcatcccgtcgccaaccatattttatttataagaaatattatactctcctcaatctcttcttaatctcttgaaaaaaaaaatctagaatcactttcgttctgaaatggagggagtaactgtttaaccttatctttatagtgtgatatgtacagatatattatttaaaaatttaagagtatcctcgtaacttcgttctatcttgctacctacatttgcacatgtcattacttgacttataccatatcaggcatcccctatcatcaaaatatctcactgaagttatctgacatatggcatatccctttgattttctccccaagagataaggactctccaaatatgccacataattggtagggatgaaatggatgggatgaggatggatgatgaatattataccatatttttaagtggattttaactttgcaaatatggaatgaattacttcagactttgaaaacactaaggagtccgagtggactcaacttagaaatggaccaatacgcacatatgtataaagtatgagagtggtaacaagcagcaacctaacgtcaaacaaggtagttagttagactcacgggctcgcaaaaagtctatgagatagaagcgacaaatagaacactagatatactatagaagcgacaaactaaatagtggatatgctatgatggtgtatgatccaaccaatggtatatcaaaagttttggattaacttggtcggataatctgcatccgacaaaatgaataccacaacctaatcttcatccgtacgttactatctattggatcttaatttaaaagttaaaaaggcattaccgaaattctcatttgactactcttgtctgaatctaaaatggattgaaccggaacattttcatgccatcagagataaacttattcaatgtacgttacgtacacagtagttccgcatacatataaagtacaacggtacggtggtaacaagcaacaacctgacataaagcaagggtccaattagactcctagattcgtgagaagcctattgaatagaaatgataaatggaacactggatatactatagaagtgacaaatgaaacaataatatatgctatgatggtgcatgatccagtctataatataaagaaaacttggattaacttggtcgaataatccgcatccgacaaaatgaatatcgtgaccaaattttcatccttccgttactatctgcggatctttaaaaaaccgttaccaggtcctcattcggtcactcgtccgaatccgagacagaattaatcaaaaactatccatttcatttcatttcctacatatgggcacgtaaacttattcgatatacattccatgcatggaagtatcacatacatataaactacaatggtggcaaacaaacgacaaccaagcatcaaacaagggatccaattttacttctagacacacgggaagtctataggatagaaacgacaataccgaatatactgtagaaacgacaaatggaacactaatatgctaatgatggtacatgaatcgaatctatgaaagctagaaaacttggattaacttggtcggataatccacatccgacaaaatgaataccgtgaccgaatcttcattcgtccgttacaatccgtcggacctttaaaaagccgttaccagatcctcactcggtcactcttatccgaatccgagacggactgaatcataaactatccattccatctccatacgtattgacacgtaaacttcctcgatagacattccacacatgttgttcatgttaaccaaggaacccaagttcgcattcacatatgaacaaatgcagttgaggcaaagagatttggacaattatactttatgacacaaaattgaatccacctcatttctaccaaccttaaatacaagagacaaatacaacagaaacagaaaggaaaaaaagaaaaaaaaagcttcttttccccattttaacgtcactagagacgccccaaataagaagacccacatcctgcgtcggcatctctcacggaagaaggaaaaaaaaaaaaaagctcccctctttccctctcctgctgacgcgccccgtcgccgccgctcgcttgccgcgcgcggccaaagcaagcaagctcgccgccggccatccatggcggcggtggagggcggaataggagaggtacaagtatccgtcaatctcttggcttcttgtttttcttttctttttcttttatgggtttgatttttgttgcaaaacgagagggagttgtctaaagatagcatttcgttgccgagcagccgcccggattagccagggaaaggcgcctacggctccggcgatctgtggcggcgaccggcgacatggacggcgacggcgacgttggcggcggcggcggcggtggtggtggtggtggtgttaggtacgtcctcgcgctcccggccatggcgtcgctggccgtcctcatcgcccacctcgacgccgccgtgcccgtgccccgtaggcctcgcagctacctcccccgcgccgtgcccatggcgtggtgggccttccgg

SEQ ID NO: 5567 - DNA, 6143 bp, Oryza sativa
cctgtccattgccgcaccatctggctgttgtgccgtgccaccagcctggccgccccgcgctgcgccgcctggctgctgagccgtgccgccgcctggcctccctgtacggtgccgctacctggcaaccacctagccgctgtgccgcaccgtcgcctagacggcccgcactgtgcatcggcgcctccccgcctgcgcttggtacctctgcccggccgagctcctcctccgctcggcctcgccccgccgcaccagcattgccgctgtgccgttcccggcaaagtcaatggaaaggggaaaataaggaaagagaaggagaaaaagaaggaaagagaaggggcaatccgggtatttagaaaaatatctcacctatttggcctggaaataataaaataatacaacctatgtcctacggccaattatacgtttttttaagtgtccatcagccgtgtcacgtttttgcggtctcccagccaattacacttttttacgtgtcctatagcaaattttgccaaaaaaaagcatgcttgtctgttcaagaaagtggacaaaagaggaggaaaaaagaactgattgagcagctattgatggaaactgatagaaaggaaagtcagctgagaaggatgtatttgagcaagaatggaggaagagatataaattagaggataaaatggaggtctatgaacaagaggagagattttggtagagggatgtggagaacaatgtatcttgaagggcgattctaattctaataactcatttttcatggattggaaaataggggaaggaagagtcacattttctcactacaaaagggttataagctactaacagaatcccagagcatacaggacacctatgggtactatggccttatttggcaaattggcagggagaagagactgcaaatgcacttgaaagagggagtgtgggctaatggagggggtttgacagaggaggatgctaagtttactacaaacttgacaacagtagagctataagtgcagataaactaactagctaactgatttacctaatggcacacgtagacccttttttaataaaaccaaaagaaaaggaatgccttcagcatctgttcttatgatgacactataacattgtaggccattccacatttctctacacaatgatcataagtcactgcatttctgaataactttaccacaaccttcatacctgcaacactctgacacctcaattaaactggagaaaacataaactgaaacgcatggtaatatacagaaacatgtggatccttttaagcatgagcatattcaggggggcttctggtctcaagttcaattgggagtccaagaacaggtatcggaacaggatctttcctgtaaccttcttcttcgcagcacaatttccacctgaactgcctcactagttagtgcatggttaccaatatctcggtcctcgcaaactcgtttccagggcacattcttgggcctcccccaaatggcacgaagcaataaggtgggattgaagtgtggttgtcaaatctagtagggtcaaacttgaccgggtcattgaaaaaatttccatccaaatgtgtgatacgttgagcagtgaagacctagcatcgcaagatgtatgtgagagtaataaaaagaaatttaggagttgggtacattgttcagatcgaaacatcactgcgacactaacggcataattggaatggaaaagatatccaatcgaaaaataaattggttaatataaaaatacttacttgccagcctttcggaatgtgatagccatggtattcgatgtctttgacagctgttcggaagcttccaaatattgggggaacagtccgcagcgtctccaatgccaccttccatgtgtacttcatccttgagacatcatcccaggttaaaggttcattaggccctttcctcctagctatctcctcttgttctgtggttcatgataggtgcaaatgataccgtgctactcagaagattaaaacaccaaaatataggcacacgatacaatatagagtactaggtgctcaccctcggttatcttgccaaggatgtctggatcattagctaggtaccggagcaagaaggtgataagaacagccgaattcccataaccggcagtcaggagtacgattgcattgtccacaatgtcctccactgtgagcgagtgtgtgccttcagagcgcaaaacaagcatgtatgtgaagaaatcatcagctgaactggaatggccttgctgcaatgctgcttccctttcgcgagcaatttgcctgaggaccttcctgatcctccggctcgctctcaggcccttgatgaacttggtgaagggtatattcactggcagagatagcaaagcctgcacaagtgtctcaaagtcggtggcaagggcttctctgatgggacctatcccttgtccaaagacgactgagcagatgatgtcaaaggtgagcctcttcgccaagggtgcagcctataatcaccaaagtagctcacaaacatgtccatactacaaaaagttgtttttactatacataaaggtctaacaattcaaacaacagtaacacaatgttcataccttgacagttttatgaccaacccagttcaggtcaatgtgcctcctgacctcctcatccatcttacgcatatacttcgtcaccatctctagcctcagatagccctgtagagcactgcggactcgctttagctcctcacctgagagtgtcagaatggaccgcccaaggatggtgttgatcgcctttgtctgggtgaaaatgaggtcctggttgctgaatacaaagtgattggccgccgggccagccataagcactgttggtgagccaaaaagtgacatcttgaacacaggaccatacttcttgatcctgtcctggtaccactggtaatcagtattactgcggagggcacgaagaagggagatgctctggccaatcaatgggaagccaagagaacctggagggagattataggatgagtacttgcgcctgatgacaaagcggaggagggtgggtatgagcaaggcaagcagcagagcaaaaggcatggaggaatccattgatggagtatgttgttatgcactatgaaggttggctgatcagcttgtggatttgtctacatgtatgtatataggcaaaccagagttgttttctttctgcatgatagacaagggagtatgattgaacaaatttgatattttctttagaactcaataaatggcctagttggcaaagctgaatatatcactttctcaaaagtcatacaacaaacaagcaaagattacaaattgagataagggaacaacccctcattgtcaccagagtaatgagtctgattcatgataacttacaatattagtttataagtaaacaattctatcaccccacatgataggagcagcttagcacgacataggtgaattactggaaataaatggaagccagctcaaagaatcacatttatgctagccaatagaatttctggatttatgctagtcaaataattgcatttcctcctcaaatgaaagacacaaaaacgaattccctaaaaaaactaaaaagggaagtacatagacaagcaaataatgagaagaactgattcctttggatctaatattagctcgaggaaagatgctacatacaacagaattaaattttgcaaagcaagcaaagcaaaccattgaaaagatctggttacaacaatttggtcatccctaacgaaacgatccatgtcctatcctatgtaataagaaattttgaacaatattctagatttaattcttctgcataactgcaggactctcaatcgacaagtatagttttagccttggcacaggccatgtatgcaggaaacatcctttttttttggcatattattatgcagaatatctgccaagaaaaacaggtagacatttcaaaaattagaagcaaattacatacttagtggtcagaaaaggttaactccagttctatatatgtgcctgtgcacaaaatgacacatttactgtagccgcaattcttctgaaaatggcatggccctgcaatatagattacagaacagtacttaagaaataagcagatgattcctcccaaatatagcatggccgtttatttaataacgttggcaaaatcaatgcattatcaggatatacacgacaatgacctcgagggcaacttagatcctaaaaaactgggcaaaaagggaaaggaaaacgacaggtcggataacatattctgaaaatccactatggtcaacttccaagaacaaaaaaaatgtatacagacagatagacttcgaagggatagactctatccaatatagatttggagatcacatcacgaatgcagatttgatttaataatatagtttgtccaccgatcgaaatcggcaataatcaggccaggagatcattattctcctataccgactttaggcagtgatcattttacactaatccacaccaccagacctgactgaaacccacccaaattccatctgtgccatcacagattcacagctcgttcagccccccatcaacaaatcgaacaacatctcaccaatcaattgcaaagctagaaatcaagaatcccaggacacctaagagctagtgaccaaacctcttagcgcgctgcctgcttgttggggggcgtcttgcaagtaggatgcaggaggggaagcttgcccactggcgcaccgccaccggccgacggtgcgcgccgccgacggggagccccgcgcaaagctgcgcagctgacggctgccgaatgcggaagatcgagccggagaatgtgggagaccagcctaggcccatgcccggatgaccagccttccagcccaacctccttagagcaggaacaatagcaggctaatgctattagccaactataaatatattttaatgagacaatagcaggctattagctagctagaaatatattttaatgagataaaagatgtgagagaaaagcagtgagctacagatttacagatttatagctagctgtagcacggactccaatacacaatgtgtgtatgacaggtgggaccatatattaatagtatagtaagcaactattatatgagttgactattagattggttatagttgaattggagctagttgtgggctatactattaaacttgctcttagggcatccacattgtaagccacgggtaagagtggtctcatgtgggccatactacctaaggctacacataaagcaactctacccccaatggaagataatctcaaatggattcttaaaatctgagggtactgtgtaaagatactacaacccacaatgcatgccctaatccacaaatccacaggagttgttttcctcttctacccttttttatattttcttcggccacagcacagtgctactacttcctcctctttctcgtcaccactcaccccaccgacgccccctccgactccgtcccggtgtgccctcttgtacgtcgccgctggtggccgacggcgagcggagcgcggggtggccgacagcgagcgagctaccgccgctctctctccctctctctttcaatgtgcggggcaaccgacgatagcgcaagtgtcgaagggacgcggggcagccgacgacggcggcagtgtggaaggcgaggaccgcaaggagcacaagcaggaggaggacgcggcggagctcctcttcctcaagtcgtcgccgcctctctctctctccctccgcccgccgctgccggattcggtgggcagcgcgagttcctaccgcgccgccgccaccggatctggtgggaagcgcgagctcccacctcgtcgccgccaccggatctggtgggaagcgtgtcgccgtcccgccaccgccggctcctccacctctccaccgacggctggcgcctgtttcactcccttctttgtcccaggtcgtcgccgtcacgccatcgttggctcctccaccacctctccgcctccgaatcctttccaccgtcggccaagggtgaaaggggaacttttgttgcgggagccgtgtccacaagacacgacaccacccaacgcgaggcctagctcagtggctttggctgaggagcaggggggacacgtccctcggagaggagtcgtgcccctctgctgggagacggctttg

SEQ ID NO: 5568 - DNA, 12185 bp, Oryza sativa
ccaaaaaaaaacccacggtgggtgttttcctatactacccctctcttctccccccctctctctctcctcttttttctccacctcattcccctcctcttctttttttcttcgctctctccgccgggtttcactcctttcgctcggcggcgtcgctgtcctccccctccctctccctttctctcccacgagcgctggcgccaccttcctcctcgccctccccagctaccgccgccgccgctttctcctctctctttctctcgccgccgctacttgcctctctcttactgccgcgcggaggaggccaaggcagaggaggtcgcgacgacggcgaccaccaccacgacgtcgtcctcgtgctcctcggtggcgagcacgggcgcctcaagtggtggctacggcggcaccgccgcagatccgtcgtcaccgtcgcctctctcttctctctctctcgcctgcgcctctctctctctctcgccgccacctcgggttcctccccaccgccgtcggtcttttcctagcgacgaggtcgagggtagaaggggaattcacaggtgtggtagccgtatccacgagcgccccaagcccccaatgtgtcacctggcagcgactccccatgaaaagttggcgaggtgcggagagagctgcatcccctagcagagggacgcgttctatcgcgggggaacggcgcggacggaaaagcgaatggccatcgctaggggtacgacctggggataccgattgtagatggccttatggcatgtctatagttacgagacaaaacttttcacgttgtcacatcgaatgtttggcacatgcatgaaacattaaataaaaaaaactaattacacagttcaccatgaaattgcgagacgaatcttttaagtctaattgcgtcatgatttgataatgtggtgctacagtaaacatttgctaacgacagattaattaggcttaataaattcatctcacagtttcctgacggaatctgtaatttgttttgttattagaccacatttaatacttaaatgtgtatccgtatatctgatgtcatatgcagagtcaaattttttttccaactaaacatgcccttagaaggccggttttatgtccaaaactgatggaaattaactctcctcataaatatgctacagtatcaaactttttaactttgaccatggtttttaaagtaaattttataaaactccatctagtatagtctaggcacaaaaacacatgaattttggcacataacacatatcctcgcgtattatggtcataaagtttcacaaaatcacaccattaaccattttgacatattcctatatcaaaatttgactctctcaaatataacttcaatctaattcatatcctgaatcgctatgccagatatcttgatcctcaacaattaaggccagtgttatttgattccctcagcaattttggaggtttgtttacgttgacgtggcgctttacttggtctaacctgctgagtcatcctgtaggtcctacccgtcagtgacccttatatttgttctcttccttccgcctcttctccgctaccactgcgtggccaatttcaccaagctcatccatggcgcccacgattgaatgcaagagaggtaggggaagagaagagaatagaatatgactaaaagcttcttggcctgctcgagggcatagtgtggtcgaagtggaagagatcaaagatgatgttggtgtagacgtggataggacggtcggggtgctccgtctctgacagtgacagtgttggtatttcttaatgacattactagaaatataattcccagcaatggtgcagaaatacttctggtatattatggttacagagttcatccgtaagcgcacggatataccattgtagtatttcacccgagagtattccaatgatatcgtatttgtttaatctcgtgggaagattataatagagagaaccgtactaataatttatatattacttgcaacaatcaaagtctaagcaggggttaatataattcaagagtagagtgacactaagcagaaacattcatacactcattcataattatctaaattaagtggaaagaatatagaaagatctattcatatacttctagtatacaggcatattatacatacatcctagttatatcattacttagctaataccctctttctgatgccctcctggtgcttcgagaagccacccatgattgccgagttccttacgacaatccgtcatgaccatccaaccgggactaaatatggagaagtaccatccccaggaaattaacttaggactatatacacgcgcgaaagaatacccgtactgagctgtcaccatcagcgacccacctcgcttccgcaacatataatctcaaataatgatatccagtaatctaaacaccacgcttaaattacgaaatactactctaatgtcatcgtcatgacatagagtcatcgtaaatacgatcactatacccacaccattgcatctcccagataagctagcatcataataaatataacttggacatataataaagttggtattcataaactcgaaaaatagtacaataccaaagtagtaaaaagaagaatattctaaataaagtacaagtcttacaaaagaaggaaaagctactaaagccataccaccatcccctcctcaccgccgcggcggcgggggtggctctgctgcctcgggcaccgccgccctgcgcggatccggcaccaagggcggcgggggcggccgatccggtgcctgccatcccctcctcaccgccacacccccctcctcaccgcccctcctcccctcttcactgccgcggcggcgggggcggctctgctgccttgggtggccccgccctgcgcgaattcgacgccaagggcggcgggggcggccgatccggtgccgctgacgacggcgggcggcgagggcgacggatccagtgccagcgatgacggcgggtggcagggacgacggatcgcggtggcgggctagggtttgggattttttttatttttattttttgtttgctaaatttatttttgcatgcggccggtataagcaaccgcatacgaaaatgggatttttgcatgtggttgcaccggccgcatgtgaaaagcttgatttttgcagaccttctcgcccttacgtttggggcaatcgtatgcaaagatgcccttcgcccgcatgcaaaaagcctttctgtagtagtaccgggtggtctgaccaagtagcctgacggtcaaaccgacaaactctaggagggaatcagtttcgggttgttttcatggattttctagattgcttcatgcttatgacttatagatggcttctatacatatgtgatattgttttgtgtgctgatttgagtcaagttggtgcaaacttatactcggatatgaagtttctttgttgttcatgtgtaggtgttgcttgaggttatgggagtttagctggtaatggttcgggactaggcttggtagaatttgagatccagacagtcaagttgatcacacaacatgctcagactagagaacaatgcacgtggaggtgaaagttttcatatgtcatacacatggtgttacatgcttatggacggatgagtcaaatttggataagagtctaagtttggtaagtttggagtgtggagttatatgggaatgttgtttcctggtttggtaggtttcctatgtgattatgagttctagttatagttgaattcgtggttagggtcagccatgttttgggtataaataaaagaggggttgaggttagaagtatatcaactttttgggagagaaaagttagggtttgcttcgagacttcgattctagtttgttcgtgaattgagagaagagtgctttagacacatcgatgtaataaagttaatttaattttaagagtttcgttgatttatgtttcccggatcccgatggtccgactgaagtacaatgagcggttagatcggcgacggtggtggcagcaagcaaataaggagaccgacaggtggtccaaccggtggcgatctgaccaacgactagggttaggactgactcgcattgatctggcggtgtgatcgaagcaacttcatcaggttcgagggtgatcttttaattctgaaaaaagatttggttttagtgttcctctggtaaacttggttcttgtatttgatcccacatcaatatttggtagaaaacacccaaaattttatgtctagattttcaaatataatttgtatcttttcttttttcttatctgcatgtataataatggatttgtaagcagtattcgaaaatatattgttcatttctggtgtattattttcttcttttttttgctcgtataatgaatacaatagggaaacaatattccaaaaaacctttgtctgtttcaatgtcctaatattttttcccgtttccactcctaatctctttttttctattctttcgattaacgtgggattttgtaaaccgtgaaagccaacctaaagactctttttctactactttctaagttaatagatcacggcttaaaagtttatacacaagaaaagtttatatatctgatttggattcatattcaaatgtttctaataaaatgtttgtatattaaagtatttttacgaagcttgtatagtttttctcgatgtaaagtttgtacttataaacttatattaactttcatggatagcatttcgtggtgggttacatgcccggatgcacgtgcgcgaacaccccccattagacccacccgaagctattgtagtatagatttactccctcggttcttaaaaaagtcaatttaagggctcctttggatgcacggggagaaaacccctaggaaaaaaccccatacagggattttccctgtaccaagtgaatccccccccaaatctctagggaagcactttccgctaagggagatttccctgctaccatttggaagcagctcacgggactgggggatgattagggtttttaagttttgagcctactctaccaaataatggctagttggagcgcacccaacaagataaaaaatgtctaaataaacataaccgagcacaaaaatagaataattaagttaaaaatgcaagaaaaaaaaaatctgaaaatcatatgaactccaagtagagcaataaattctagctaaaatagagaacattatagatacaagcatcaacttagttcatgagatgatcaaattgaggtaccatctacagtatttagccaagtattatatgagcatccaagaaatatcactttcagcaaatacaagatgtaattcatacaattatcatttacaaatatcttggaagtgttttcctcctgcattcatgagcatcaactatctccatcgctgctccaaattgagaacaaggctgaatatacaagggcaaggcctgttgcctacatccaagaattaaaaacacaagtaagggtgcaacctgtaaggcttattcgtttaaaaggaattgcaaagaaaaagcataggaataggaatatgttctaaactaccatttgtttcataggaatgcaccataggaaaattataggaaaattttcaattcctccattttcgaaggaaaagcataggaaaaaataatccactccaacctaatgtttgcattcctttggttggcttgctcaacaacataggaaaaattcctgtgtttttcaatccatagatttgcacatgtattcctatagtattcctacgtttttcctattactacgttttgaaaatccagtgaaccgaatgagcccgtagtgttggtagaaaaaaaagcattcaaatacttcttgtatagaaaatgcagactagagtatagctctgtgtgggacaatctttgtttatgccaatccagagattcaaattgaatcatggcaagaggaagagtgcaagaggacaattatcattatggacatgacaaggaaaagaagtgcatctcatatatataccccctatgtgagtcctcattaggtaaacttttgcaacattttcagctgaactgcagtgccgttgagctgctgtttaggcgcaaactgattagacagattaaagcctcatgctactacagtttgagatgcaaattaatgcgcaatgcttcagacggaccgtggccatttccagctaactctgtctcttagttttatgcccccaagcaagcacacaaacactgtcattagtgtagatagttatggttagcacttagcaatactaattagtagtagtagtagttgttttaattaactagtcttgcacgtcgatactattgaatggagttaattttgaaagagtattcagtcttggtactaacaaaaatatgtgtattcataaatatgtgattaattttgaatggagttaattttgattgagccactgagccaaagatctaaggggaaaccctagaggagaagaagagcagaaaccctaggaggaggaggagaggaggggaaagagaagaaggcttaccatggtacggtggcagcgctggtggtgtctcgccggaggagtcccggcggtggcgcgtctcgccggaggaggaggcgcggcggtgcccaacattggtcgcgcgcgagagagaagcggcggcggatcgcgcgaggaaaaattccttccctagggtttccccgcggattgggctgggaaatccctgcctcgtgggcttccaaatggacaggaaataagcctgtggaaattttcaccgcgggcctttctcccaggggaatgggcggggatcccccgggatcccaagttgccaaaggaggcctaaaagggaatgtgacccctcctagtacaacgaatctgaataatcgagataaagaaatgtccagattcgttgtattaggagggatcacatttttttcctaggttgacttttattttttggaactgatggagtatgtgactactgactagtgtagctatagatggccatatggcccgaggcccgtggcttagcccaaggcacgtcattttggcctggcccaagcatggcacagcccgactcggggtcgtgcccgtgccagcccggcctggtagctgggccgtgcttgggccgcacacttggcacggtgggctagcccggcacggcatgaccgaataaaaaaatcgaggatgtcaaatagacttaattaacatataagacaaggcccaaagagaagagaaatacaaaatagacttattttctagccatatggacccagcccacagagttgagcaacgtaaaatagacttattatgtggaaaagaacagtgaaccatcgtgccttctggccggcccggcacggcccgagtcgtgttgggccatgcctgggccgtgtttgcggcttgtgggctggcacggcacagcccagtgtaggtcgggccgtgccgcccgtttggccatctgtaagtgtagctaccagagaggggcaatgcggtcgagctccacagggaggccgttgagcggcgtcggcagcgggtccctgacgaacgtgttctcctccccgcaggccgcagcacagctgccacctgaaatgcctcacaaggtagtgcgtcgtcaccagcgtctccaccctcgcaagctccatcccggggcataccctcggcccgccgccgaacgccacgaacgattagggcagcggcggcggtggcgccgccgacgccgcctgggcgtcgaaccgggacggcaagaacttggccgggtccatgtgcgtcacgcatggcgaccagaacgcctgccaccctttcgggatgacgtagccgtcgacctcgatgtcctcgggtgctctcctgcgcgacgcgccacgacagcttcatcctcgtgacgtcctcccgtgtcagggcctcgccttcttgcttgctcttggctatctcgtcatgctctgcatccatcaatcgtggccggctatggcggttgttagggtgttcgatctttttttggcgaaaggaaatgttagtcttggggttggattattacttgccttggaccatggcggcgagtgtggctgggtcgttggcgaggtggcggaccatgaaggtcaagaggatggcggaggtgtcgtggccggcgacgagggcgttcgagcacggagttatcgacgatctcctcctccatcggtcagcagccgccggccgccgtcgccgtctcaatcggaggctcacgaggcagctgatgggatcgtccgttggggacgacttgccctgctcctccaggttggccttcttctccctcagctcacggtcgcctcgagcagccggcgcgccgtcgcgctcgatcgccttgaggccgttgcggaacgcggtgaacggcagatgagatccaccggcaccgattgcgtgccctccagcatgccggtgtacgcgtcggcgagctgctcccggatggcgccgcgctcgagcccgaacagcagggtggcgatgatgtcgaacgtcagcgtcttcatcagcgggagcaccgtgacggtgcggcggccggcccacctgtcggcgaggtggcgcctgacctcacctcgccgtcgatctttcccacgtaccgccgcagcatctccggcttgaggaactgcatcagcgcgctgacgagctccaggatgttcttcctcccgaggatatcgtcgccaggctccgtggctgcttgggcgccagcgcctcgtggaggaacaccaccttgttcgccgccggcccggcgaggagcaccgtcggcgcgccgaacagcgacagcttcgacacggggccgtacctgtcgatcctgtcctgcagccatcgctcggcggtgttgcgcccggcatggcgcgcagcagggccaggctctgcccgatcagcggcaggccgagggatcccggcggtatagatggctaaaaggcccgcccggtacggcccggcccaggcatggctaggcacggcccaccagctgtcgggccgtgctgtgccggcccgaaggcacaggtggcccatcgggcctttttttaaaataagtctattttctttccctcctctttgggctgttacatatgtatagctaaaaaataagtctattttccatctcctctttgggctgacatatgtatagttaaaataagtatattttacgtccctcctatttgggctgacatatgaatagataataagtctattttatatccttattctttcgtccatggcatatatatgtctatttttactcccttttttttatatcgggcctggctgccggcccggtcatgccgggccggcccaacgtgccagtggaggggccaggcacggcccggtggtcaggtcgtgccatgcttgggccatctatacccggcggcaagttgcaccgccgcggcgacgccctcctcgctctccccgccaggtgcacggccagcggcgtcactcaggagggcgacgaggagcgcgacgatgacggcgatcgccatcgcagcagtaggaaggggccaagtaggtggctaggagaacgagtgcgactgtgtgtgtgtgtggctaagcttggattgacacaaacaagaaagaaatctacccaacatcattgtagccttataagaggatcattagttgttacttcgtttcatattataaattactttataacttttaaatttaattaagtttatagaaaaatatagtaacattttcaacacaaaactaacatattatcaaagctagatttaatgaaatcaatttgatattttagacgttgataaatatttttaaaaatttagttaaacttaatagagttcaacttagaaaaaaaattaaaacgacttgccacggagcgagtaagagttatagtatgtgtactttgttttcaatagttacgactttgaccaatgaaattatttacaaacatttgacaacgcatggaaccaactatatactccctcatcttttctttttaaatattttataaaaatatatcatattattaaagcattttgcatcctaaacaattatagtacttacattaaccaaaacataaaagtttttattggtgaaagataaaattataggggtcaagtgtcaaattataagggtgattgccctgaaggtaactgcgtgcttggtctgtcacgtgggtgcacaaatgatctaatcactaataaagatttggccgtacgcagaaaacaagattttaatagtgatgggttgggaagggagagccacagatcgaagtcctgtctctcagccaacaccaatttctacatcacgtgggctgcggaccggcttacttgggggagtacttcgtttactgtgacatattttccaaaccgttaaaagatatatcttttaaaaaattaaaataaaattattattttttattattttaaaattagaataacaaattatatgcaaatcatctttatcttactcgtttttgtgtgtggtttacaaattccctctaaactatgtttttctatcgaagactaattcttgtttcatgcttaaaaaaactaagagaaaattgagagaggtgaggatactgtttgtgaaaaaaaaaagcatgcttgtctgttcaagaaagtggacaaaagaagaggaaaaaagaattgattgagcagcaactgatggaaactgatagaaaggaaagtcagacgaggatgatctatttgagcaagaatggaggaagagaatataaattatattagaggataaaatggagatctatgaacaagaggagagattttggcagaggagatgaggaggatctatgaacaagaggagagattttggcagaggagatgtggaggatctatgaacaagaggagagattttggcataggagatgtggagaacaatgtatcttgaaggacgattctaattctaataactcctttttcatggattggaaaataggagaagaaagagtcacactttctcactacaaacaaagggaaaattggaattccttaggcatctgtttttatgataaacactaacattgtaggccattccacatttttctacataatgatcttaagtcactccatttctgaataactttaccacagccttcatacctgcaacactcttgacacctcaactaaactggagaaaacataaactgaaacgcatggtaatagacagaaacatgtggatcattttaagcatgagcatattcaaggggggcttctggtctcaagttccattgggagtccaagaacaggcatcggaagaggatctttcctgtaaccttcttctttgcagcacaatttccacctgaactgcctcactaggtagtgcatggttaccaatgtctcggtccttgcaaactcgtttccagggcacattcttgggcctcccccaaatggcacaaagcaataaggtgggattgaagtctggttgtcaaatctagtagggtcaaacttgaccgggtcattgaaaaaatttccgtccaaatgtgtgatactttgagcagtgaagacctagcatcgcaagatgtatgtgagagtaataaaaaggaatatagcagttgggtacattaatcagatcgaaatatcactgcgacactaatggcattattggaatggaaaagatatccaatgacaaaagaaattggatcatagaaaaatgcttactttccagccttttggaatgtgatagcctcggtattcgatgtctttgatagctgttcggaagcttccaaatattgggggaacagtccgtagtgtctccaatgccaccttccatgtgtacttcatccttgagacatcatcccaggttaaaggttcattaggtcctctgctactagctatctcctcttgttctgtggttcacgataggtgcaaatgataccgtgctactcagaagattaaaacaccaaaatacaggcacacgatacaatatagagtactaggtgctcaccctcggttatcttgccaaggatgtctggatcattagctaggtaccggagcaagaaggtgataagaacagccgaattcccataaccggcagtcaggagtacgattgcattgtccacaatgtcctccactgtgagcgagtgtgtgccttcagagcgcaaaacaagcatgtatgtgaagaaatcatcagctgaactagaatggccttgctgcaatgctgcttccctttcgcgagcaatttgcctgagtacctttctgatcctccggctcgcactcaggcccttgttgaacttggtgaagggtatattcactggtagtgatagcaaagcctgcaccaa

SEQ ID NO: 5569 - DNA, 10779 bp, Oryza sativa
cctccccgtgatgggacatcggaggcggcttgggggcgcctacgtccgtgcgggtacgcgcatgggtgcagcagtgctgcgctttgcttgcttgcgggcttcttttctcctccagatgaggtgtgccatccacctgctcgacgaaatgcgccccccacccccacccccggctgataaccatatgtatgtccttcgcaaggcaatggatggcgtcatggcgcaggacgaacctccgtggactaaccatgttgaaccttctcctcccggacctctggtgcccgtcctgatggcctcatggctcaacgaagtgttaaggtacacgtcagttgtgggcacgctgcctttcttttattatttaactaggaaggtggcccgcgcgcatgcgaattattgtttgtttaaaaattttgtcataatagattaagagcaaactaaagttcggataatgttattttataatattttaagggttctatttttcttaaggtatgacttttaaatcattttttctcgagtaaataagaaactattgctagttaattatcatacaacataccgtgtagtatggccacggatgaaaaatgtgaaagcaagatactcaaaattcttatgattaaatcatctaagaaggcgcatgatgtagtaaaaagggagggaagtgtatgcatggaaaaaaaagaagaaagggaaaaataaaaaagggaggggaagcatacgtacccatgtacgtaggtgcatacctatgccacgggacgagaggtgagaccttatagtatttagttttttcaaagatcaatttaatctaacagtttataatattggacatactgattaagtgaatactttgctcttttttcccttagaatttctaatatttgctctaatttattagagcaccacgtggcagtttgagagcattttaagaaattttaaaggacttaacaatgcaattagaatattaaccgcttaatatatatgtatagggcatataataatatttgttccagtttcgtgcatgtttatatacatgttgagagaaattaattatgtggttagcaagctattagatgtctaattagtagcaattaattttgacacctatttacaattgttcatagtagctcttacatattcatcttacgactttgattatccgttgattcccaatttactgatcaccatgactcgcataaaataatatgtactacttagggtctagggcagctgaaattgatgaattatctgatttatctgatagctatttgagggtataaacgaatgaattgacttttaaaaagttaaaatgttgtttaaaaaagacaccattttaaaacttggaaagcgtgcaaacgaaaatccaactatggaatcgggaaaaaagcggatcttaaactcccttataacaccctagtctttgtaagagtgctattgatatttgttaatattgtgctcacatttataacataatgatttctttcacctatacgaacaaatagtacaaaatccaaatacgacatatataacacaatacattataattattctgtaattaactctcggtttcagtttaaacagagctaagtattggaaaaaaatacacaacccatagtgcttaattcatctctcgctgcatcacacttttaattttcttttcatgttattaacaaaattaatcatctccatatatgatttgatatgtggcaaagtggtagtgctgcggtagtcgtgatcaccttagatgcctcagacacgacgctttgtcaagcgtgcaaaaggcaaagctgcagacgtgcattgtgcagcgggcaaaaaagagaacttcggacgctttatttattagcaaataatatatcagatgatttaaataatgggtccaccggttctagtgtaagtgtacatttgttaatatagattttaaattgttaatttaatgggtacataatataatataatggtgtagactttattttgaaaccatgcattatttgagaataatagtccaatgtaacaaaaaatagttccgatgatttaaataatgggtcctcggtttaagtgcacgtataaatcaattaatatagatcttaaactgtttatttgataggtacacaatataattgtgtaaaattatttgaaaataatagtacaaaataatgagtacccatgtttaagtggaaactatattacattattaatttaatggtcacatataatagtttaaattttatttttaaaaatggtagagctaatttaattacccgagagttgcatgatggtagattctttgtgttgtaaatttatgattatttaaaaaagtatatatccatattatataaatggaaaaggaagaaaaaaagaaaaaaaaaagaaaagaagggcgtacgtacatggtacgtacgtatatatacccatgtacacatgcacgggagaaggagagctggggtccatagtatttggtttgtttaaagatcaatttcatctaatggtgtgtaataatggacccactaatttaagtgaaaatcaagggtagatgttttgctttttttcttatttctaagattttctataatttattagagtgccacgtgacagcttgagagtgtttgtatgaagtgtaatggacttttagtatataatagatagattggagccatgtcctaataactttactaatttgggatagaaggaaatactgtgatgttgttgtagcctattgttaatccggtctggagcaggtctgtgccgtgaactagtattgttcaattgtttgtgagtaaattctatactataaaacctcacttattatgatccaaattatacaaaatcatacagattttggtatgtgatacgtaagctcaggttttatggtcataatgtttcacaaaccacgttattgatcattttgattttaatctttcacacttttgggttctaccatcacatctcaaatttataagaattttattcatcatataaatattacatccattttcttaaattttgatatatgagtatatcaaaatggttaacattgtgattttgtgaaactttagatataatacccgtggttatgtgttagaacaaagtccaacaagtatggcaaacgcacccccttctcttgcagggagccttagtttagatccatgggggataagataagaggaagagagtgctgctaaatgaatgtaatgggaagatgcctccgccttcttgctcttggaggactccttttattcatatgtaatggaaaattgcagtattacccttgatcggttgcatcataggggcattgtcctaggggcgtttgagcccattattacattaatttatacaacaccctagatgtgaggggtcctttccaaccgtacacgctggcatggggttattccccaacattatgtgtcacgtgtcaaaatcgctgtggttttgtaaaatttggatcataataggtggggtcattgttttatagatattttttttattagtgtaatcaaatatatataatcaggttttctattggcaagcagaaatcaaactatcgagaacccgcgtcttggttaaaggagagatagtgagagaattttttttatttttaatttttttattaaaagttttacaaaaataatttttcattttgaaaattgacggatgtagtcgcctaccgccctctgggagggcgatttttaaaaatcgccatcccagagggcggcgaaagtgacgtggcagacggccgttcgctctcgggcgacggccgtcaacgaaatttgcaggcggcccccttgccgccctctgctagggcgattttgtactgtggggggggccgcctgcaaatgggcggcggggggcctggaattttgcaggcggcccccttgccgccctccgctacggcgattttgtactgtgggggggggccgcctacaaatgggcggcggggggcctggaattttgcaggcggcccccttgccgcccttggggagggcgattttatactgtgctttatatttttgtataaatattaatagttatcaaatctttttatattgaaaactatacaagattaaaatctccaagactggtaaaatacaattttattatttttagggcctatttggaatgttaccgtacaaatattttgttagtgccaaaatataagctgttctagcaccatatgaatgaaaagaactatgtagacgagacaaacacaagtagtactgcagtagtaatagcaaaagtagtactgctttacaagtttgtaagccaaaagaaacggtcacataaggtctgaagaggtagaacactactgacgaggcctcttacccctgtccctcctaccctgcgccctaatgtgcccctgggagtacgtgagtcggtccgggggtacggcacggccaacccgtcctgcctgtacaggtgtgacctctggctgctcctgagtgtgcgcctctggagctcctccaagctgagaggagcctagtacgtcgtggtggtgtgcaccgtgcaagtcgtcgtcgtagaactggctagtaggaccagtcctaccggcgtgagacgaagaggccccagtaccgaagatcccggctgcaaatcctgctggacaaggaccatcagtttcatacaggtatttaatagtattaataaaaagtaaagtaccgtgtgggcgagggatcgacgctccgtgagaggaagagctggcgaacgcgcccgaagaggtggcgaacgcccctgcggagctcgcggaagcgccggtcgtgcctgcgaacgcgctcgaaggcagacgaggtcctgcgatgaggaaacgtgcagttaaaacatggtgacatattcgtgcaaaagctgaaacaaaaatgaactaatctctgggctgaactgtaccgtgcggaaccggtgctgtaggtcgcactgctccgaagctaggggcgctcgaaggcaaacgaggtcctgcgaggatggaacatcaagttacgacggggtgatgttttcgtacaaaaacagaaacaaaacttaagaaacctctgggctgagcagtaccgtgcgaaaaaggtgccgtaggtcgaggtcctgctccgacagtaggcgcgcgaggccgtggttgtaccggaccagctggaggtacgacgtccacggcgctgctacaggagaagacgcgcatgaccgcacgcatcttctcctgcatccggttgaaggtcaccctctgctcaacgtcagtcaagtgcaaacctctgttcaacctcacttggactgcggtgatatcggcactgatatcccatgcggcatcagcctatgcaagatggaaataaaaaaattcagtagttgtcctatattatgcaagataaatgaaataattgtgagaactaatacaaattcgacgtacccccacgaagtagtctcggtcacggtgcgtgggatacgcgtccgtgacagcggcaacgtgcggctctagggcgtctggagtgaaggtcacacgcgcacgagtgcgaggaaggtaccagcgaaggtagtcacggtagttctcctccgtgtgtgggaagagctcgttgatcacctcctctgtagctaacacccagtcgtcaacgtactgctgtacacgtggagcccaaagtgcgcctgctagctgtccccgtcgagtcaacctgtgaagagaggtaaattatatggctcgatgaagtaattatcataaaaatttagaaatgaacactccgaactcacgagtggtcggcagggaggacggtcggctgcacgttgcccggaaacacctgcctaagtccgaactgtctcatcacacgctgcgggcagtgaggctcaacgaaaatgtcgaacaccatcggcaggatggtgagccagtaagcctggtcgcgtgtgcacaaggacgaaagtcctagcggtgctctcgcagcgacggcctcttctgtgtacggctcccagatgatgtcgctcggctggagacggtcaaacttgaacacgaagtccgggtagcctcgtctcacttggacgtgagcgtaacgacgctgcaataaacatgatcggaattagacatgttatgtgaagaaaaaaaaagaagacgactgataaacttataacgcagcgaagttgcactaaccccacgtcgacaccagtaagtccccatcgtgggaccgtcctctggccactgcgcgctgcgaccaaccccgtagggtgcgctgtccaccactggtcgacctatggcaaacctctcggctgcccaaagctgaagcaacatagggcagccagcgatgatcgctcccgcgtcagtcttcgtgcacgcctcacagagggcacgatacgtggctgctagcacggcagaaccccagctccactgcggcacgtcctgtggctgagcatccgcgatggaccgttagtggaccagccggaagtccacagcgtgcccgtgggtgctagtgaacatcacccacccgaacaaccacaacaggtacgcctcaagggagcgtcggaccgagtaatcatcagcgtcagggtgcagaaggtccgcctacaattaagaatgaaatgttagtacaaaacactctgttgatcgcaaataagcatgtatgataataacaacttatttacttacagtgaactagagcaaccaagccttgctaggcccgactatagagtacggaggaagggtgttggccggtcctaggtgtggaaggcgcatcaccttctcgaagcgcgcagtgatatcctccttccacccaaaaacaccgtccacgggaccaactggtgctcccgccagcggtagcccgagcaggtacgacacgtcctgtagtgtcggagccatctccccacagggaaggtggaacgtgtgcgtctcaggtctccagcggtctaccagagcggcaagaagtgaccggtctgcatcccaccgcttcgctgggtcacggtcgtccgccgccgcctcaacaagcctacaaagtggtagaaggcctgccgcacgcaacctgtatagagcaaacttcaaacataagtacaacacaaagcaaagttgagttgaaatgtgaacatacgcgtaccaaggaacgtgacgggggtcgacacgcaaccactcgcgcgacgtgcgtggacggaaggtgccgagctgtgcaccctcgactgctgacaggaacgagcggtggttcctgtcaatcccacggttcaacagcgccggtgtgtcgtacgccatacctgcatcaaatagattgatcagaaacatataaataattagttcaacataagtaataaatgttcataagcgaattagtaacacatattaaacaagagtacaaacaaacaaaattgtcaccagacggaatatttctgattacaacaataactgcagttacacgatatgagtacttagtccgaacactcatcacgataacattatgatacaacaccgaatagttcgcaatactactagtacaacaatagtcggaggtactcattacaacaacattcaattgaaattacacgatagaagtatttagtccgaacactcatcacatcacaacagcattttatttcctaaatcgataacattgttacaccatggaatcgcctgctgcgcgacgacgccttggccttgcgcgcctgcttgttgttccttcaccaggtggtcgcctaccatcacttgcctgtccagatggactagcatctgcgccgcttggaacttctgcattcttcgggcatttcttgtaagtatggccgcgcagatcacacttgctgcatcgtaaagtcctcccacctgcttctgactcatccatatcatttctgatgcgtcgagtttggcgtcgaccctttttcacccttaacttagatggatctggaatataaaaaacttgggcactcagcgttgtgtaagatcctgagatcccgaacccatatatctcctcactccatgtatgaaagattgcttctttcctgaaataatttgagacgtacacagcagcaagaacgtgtgagcaaggaaggtgatgaagcttcggcttcatacaactgcaggtacatccaccatccgccttcaagacaccgatgcacttgtgtgccttgagcaacaactctatgtctccgtgcctttttgattttatcttccatgtactttgtcactacgttgccaaacactatgttgttatcggccatggacggaccaattttcttgtatcgatccctaaagtacgcttgtgtgccgtgaaggatgaattcaacaatagcaaccaatggaagtacccgaactcctcgcattacccagttgtacacctctgccaaattggttgtcattatgccataccgagatccatcggtgtcgaacaatagagaccacttctccttaggctcattctcaatccactgagtgaaatttctgatggacgaccctgacctccttctcattgttggtgggtcatcatgtaatgcaccaagaggtatgggaggctcgtcaccttcaacttgtggtctgcgagattgctcatctgtttgcttcgttgtcaactcatccaacttgtcccacaactcattaaatttcttctcttggttctgtgcacagagcctcttaaagagctccataagatgcttgttcttgaattgtttgtagaaatttgcacccatgtgacgcatgcaccaccgactccgaacatcaggccacttagctagaagtcccttctcatcccaaccgttctgcaagtagtcaatagcccgcaacatacccgcatgacgatcatgtataaggcaaacgttgggcctcatacgcaccactgcaatgtgcactctctctaggaaccagtaccagctttcagtgttctcactctctacaaatgcaaaagccataggtagaacctggttgttcccatcacacccaattgctgtcaatatctgacctcggtatttacctgtcataaaagttccatctatgcatagaacaggtcgacaatgcacaaaagcattgatgcaagcacccaatgagaaaaaggctctttgcagcacactctttgttcgatcatcaaccgatgtaagtgtatgtaggtcatagtaagtattattattcctctgggcaatggtggctaacaaacgaggcaaattatcataagaagcttcaaatgtgccatacctcatctcaataatcttttgtttggctctccagacctttgcatagcttatggtgtacttgaatttgttctcgatgtgcctaataattgattttggttcaaaaccaatgttactaacaacactgctgtacatctcacttgccacaaaagctgaagtgatgtttcggtgacacttctccaccccttgtaagtagcacttgtgctcggtcacaatgctaactttccaataatcattccatttacccttatatgcatggacacgccacggacaatcttccttcatgcacctcacttcatacacataatttgttgacttgaccaccctaaactctctctgcaaggaaactgcccaatgcttcaccgcctccttcatctcatccttatgagcataccttgcaccctcaattacctcgttctccttatactcccagggtacatgatcaccctctgatataacaagtccagagaagtcctcatttgcccaatcagtggccattacatcaccttcctcatcggatgatgcgtcgtcgtccgcttcctcattatccgaatcttccctctccatttcatcaacaattataccgactctctccccctcatccgccatgcccatggcctgctcctcccttggttgattttcctcattttgcatcgatggtccaacaacatcccctgcattgataggaccctctacatcttcggtttgcattgaaacatttatatctttctcttgtaccgacacaaatataacgaggggccatgaccgttcaaaagccatttccacataccgtctccaagcagcagtgctgtccatcggcattagttcccaaaaataaccttctgttgcacgactcactacaactgatactgacattgtgtagacttcttggtctattctaaatcctctcaacaaccaactataaattgactgaaatgttctctccgcaggcctatcgatgcccttagatgtcattacaaaatctgacagatcaacaccatctggaccaaatctaatatttccttcaccatgaactatctgaaatgtgaccttatttgacattgtgcctgatgaaaacaataactgcgttaacctcgcatttctgtactacgccctaagttacattctctacaatattgttctccaaaattctaaaagtatgttacattctccatatcaaactaaactacatcttacaattaacactactgtctatgtctcaattcatactattatattctatgctctggatctacacatatgtgctgtgtgctacagatctgctaaaatatatggaactaaaactaaaacgcaacatatatactcaaacataacatattagtacaaatgcaaaagatgtatgggagcaaacctgtgatgaagtgagcgaaccagcagggcttcgccgctccccttctgctgccctcccctctctctctttcgttttttttggatttttagtgaatataatgaaatttcagagaggggggactgggctttataggggggaggcaaaaatcgccctcccccagggcggcaagggggccgcctgcaaaattccatgccccctcgccgcccatttgcaggcgccccccccccacagtacaaaatcgccctagcggagggcggcaagggggccgcctgcaaaattccatgccccctcgccgcccatttgcaggcggcccc

SEQ ID NO: 5570 - DNA, 1961 bp, Oryza sativa
atttctgtttctgtaccactcagcactttgacgctgcaataggggacatcgctattgtgacaaatagaacaagacttgttgattttacccagccatatacagaatctggacttattattttagctccagcaagggagattgaatcaaatgcctgggcttttctaaaaccattcaccttccaaatgtggtctgttctaggtgttctcttcctttttgtgggtgcagttgtttgggtacttgagcatcgtactaatactgagtttcgtggacccccaaggcaacaaattatgacagtatgctggttagtatctgcctcgtgactcttctctcttttttttcacttcttcaagattcaaaagttattgtttatttgtttataatttaattttgttagagttttgtaccatttcaggtttagtttttctaccatgtttttcgcgcacagtaagtgtaaacatgaaactagccaaaagtttttttttggatctcatagtccagattcatatccttctatctgttgttttacacaggagagaacacagttagtgcacttggtagatttgtgctgcttgtctggctgtttgttgtgctcattataaactcaagctacacggcaagcttgacatcacttcttacagttcaggaactcacatcagggatacaggggctcgatagcttgatatcgagtccaagttcaattgggtatcaagttggatcttttgcgagaagctaccttgtacaggagctcaatattgccgagacccgattggtaccactaaacagcccgtcagattatgcaagagcgctagagttaggatcaggaaatggtggtgttgatgcaataattgatgaacttccatacgtggagatcttcttgtcaaaatactgcaaattcaagacggttggccaggttttcacgaaaagtgggtggggatttgtaagtgacttggactataattgtatactagagatttcgttccagccttccaggatatcttctgaatatagtttattctgtttcaggccttcccaagagactcccctcttgctgaggacttgtcaacagcaatcttgacattgtcggagaatggcaatcttcaaaggatccacgatgaatggttaactgggacagaatgcagtgcagatgacaatgaggttggctcaaaccgtttgagcctttcaagcttctggggcctctacctcatctgtggcttttcatgtgtccttgctctcttaattttcttcttgcgaatatgctgtcaatacagtaagtacaataaccaggttggacttgactctcctgaaccagagattgtaactcgatcggcaaggttaactactatcaagtcaataatctcatttgtggataagagggaggaggaggtgaagaatgctctcaagaaaaagcctaatgacagtctgcagccaaggacaggaagcacaggagaacaatctacattaccaccatgacacatttatcactgcctgactgacatattcaacaaaatgcataattttgcactgggcttgctggcagcttcagaaacccggtgatgatttgttctggttctgaaggtcaaacctgtaggagctcctcagagtattttctctgaactctgaagcatgacaggaacattctgaattgtgcccaacagtaacatgtctgaatctccttccaacagctacttccaggagaagtagagcattggttgcaagttcaatttcaaactagttgagaagtttgaacctctgtcaagttgagaggccccttttttcgttcggaagcaacctctgacaagttcttgtagctacaatcttaagcatcttccaaataagttgagaagtttgagtctttgtttggtgtggaatttgtctggttgagcatttcctttcactattgcactgtgctgaaaaggcagtaacatatcttctcttttcaattggctatgggctgcaggaat

SEQ ID NO: 5571 - DNA, 2592 bp, Oryza sativa
tgtcacagcccttcttgtggaaaacaggctggtctgaccaccatatcctgactgcttacggtcataacggcgctttccctgggcagacaggctgtccttacccttcttgtactgagtgaccttgtgaagggtgtgcttcctgcactccttgttcttgcagtaggtcttcttggtcttgggaacgttcacctatacaaaacaaatttgaaacaaaagcagtcagcttaacaaatactgaatgtggaatggacatcgcaggcctataaacaacagtcgaatgtgcataatttgaagcaaatgtgtccaaatttttcaacactgaagacacattcagcaaaccaatggttaaaacctcaattgggtcctcaggaaatatgcttatgtttgtcatcacaagaatgtcaggtctcaaagatttcatgccatcattggagcccatcagtcaaagccagacaagattaccgaacaattttagaacaagaagagaaaaaaaaaggaactcatccgatgtcctcacaggaagatgatgaaaatgtttatgctacagaagtttaagtgctaattgaatgacaacaatacacatataatctagatataacccactacaaaattttcagcatgcagagggtcagctcggaaaatacgtcgatcttcacgacaataatctggtctataccggcgattcaaagcatttaagtcttgaagataaaaatgacataactagaacaatcaccgtggacatcaacatgaacaaaaaaaaatgtcgctaaagagaaaccatctcatgttaaaatccgctagaccccaaaacgcataatcaaagaaactagctactcctccggctcaagatccccccatctacggcagatcaacatgaataaagaacgcatcctacccatcgagaaagaccatgagaaagacggcgcgcgcggagccgtggactggcacgaggacaagcacgcgtgcgatcttcccgtcgtgcggcggaggggaggaggaggaggaggaggaggagggagaagcgtaccattttcacggccgcggggagggggcggctagggtttcggaggcaagtggcggcggcgggggaggagaaggagagagaggtctgcggctttatacgggtgcggtcttggaggctagggctttactggtgagggagatagagcccatgggccgtggtgccccggctaagccccgcaagatattgtgggcttgtggccgcactttcagcccaagggcagtagtgccccggataagccctgcgcgacattgtggccgtttggttggtaaaaattttactcttgtgacaatagtttctagattttcaatgtacatgtgatttgcactatatatttttttacgcagatatgcattatccttgttcacaaaatcttactactaccagtttatcgcaacttaaaaattcgcttctcgttgattcttgtatagtagtatctcctataagtgcagtcaaatcttgaaaccttaaaaatttaatagacgtaaaaatatttaaaatatgaaaagttatattggtatatttttatgagaaactctctttcataaagttatattcgtaatgttttttaaatatataatttagactttagagactagtggccctgcggcgatcgcggcgacggatctggtctcccccgtcgttgcggcggcagatccggcctccgccgtcgtcgcagcggccgaatccggcccgagctcatggcggctagcggcggagaggaggaggccacgccccaccgccgcggagaggcggtagaggcgacggcagccgacggcggtggagaagggaggaagaaggtgaaaccgagagagaaggaagagaggcggcggaggggccacgcggtgggggaagggagaagggagcggtgggggtgggggacggtagatttatatattcgcccaaaactttttttgcagcggtcctccttacctactgccagtgaaaatgagatttttcgctggcggacgcctaagaggtccgcctagaaaaactggcggacacttaagaggcccgcctcgaaaaatagagtagttttttaggcgtttctcttagcgtggttaccagcaaaaattggtttttgctggtggtccgtagccccccacctattgttatgtttttgttgacggtttttgcatatggccgccagcgtaaattatagggtaacatcatgaaaaatcgttttttatagtgtaaaattgttatgatgataaaatgtgtattgcggactatgctgatgatgtcactcatctgaaaacagagatagtaacaaggagtgaacacgttacatatgcccacttaacccttacgaaaatgtattcgagaattactaatctaaatgctccactacgtacagtacatcgtcggagattaattgtgtgatgggccacaagaatgagctgccatgcactcgactgaattctgatggaacaggaacaccatacagtattggtaccggcgacagcaacagcaattggtttctgcttctcgcgttgacaatttcactatgctaaccaccactttgtccactaaaacgcgctcatgaccaatgtcaaatcaaaccggtggat

SEQ ID NO: 5572 - DNA, 2293 bp, Oryza sativa
aactcggtggggttgacgctcccgtcatacttctcagcgatggtgggtcggaaccttgggggccaacggacattccgaagactcgccacaaaggctctacagccgacaccaccagccgggggcacggagggctggtcctcgtgtccatgtcgaggcgacactctggacgaagaggcgccctccgtcgcgtggggagcacgccggtcattacgccggcgctcgatgtcgaggcgggcatccggctctccacgctgatcgtcccgagtcgaaggcgccgacgagggagtagcagccgaatggcgtgcaacagccgccgctcgccgcgccctccgccttgacgacacggagccagtggtagcggcgccggaggtcctggtggtggaggaccgtccaccagcacccaggcgctgctgtgccgtcatgaccaagttggccacgtcgtccagccatcgctgggctggagactccgggtcagggacgacgggcgagtgacgtaggagcgcgccagcagcctgaagcgcgccctggggcgtgctgccgtcgccatagacgaggaggcaacgctccccatctcgccgttctcctccatcgcccgcgatcggtgaagccgcggatctatcgaccctctcgagcgcctccccctgcttaggactttggtgtggaggaggcggtggagtacgagctcgacggcgtgggtttggctccccgtcgtcgccgctcacactcggagagaggtcgtgcgcctttgcttgcccggccattaggctgaacaagaaaaacttggcgcacacagaaaagtgcgagagctcagaaaacacacgctgagccccctacctggcgcgccagatgacggagtgtgggggctcctcaccgggagaccgcacaggcccccctatgccggttcggccgggggctcagggtgaaatcccaagctctgtctatatgtggaaagatcgcgacctctcgaaagagcatgaaacaccagcgatgtatacaggttcgggccgctgagaagcgtaataccctactcatgtgttttggtggatctgtgtatgaaggagctacaaagtatcagccagcctctccctccttctgggttcccgatctgggaaggtccagtcccagcccaagcctgctctccctatgggcaaggtcctccttttatatttcaaggggataccacatgcacccctctctctcttttcataaatggacggagatttgtatggttgccgtctgaatgaccttttatgggacagcccacacctacctccacttccgccggaagcaggcgcgacgtgggaacatggctgtctgctgacgatatgaccagtgtcagaccggtcacaaatcggtcattcttgtccaccacgcgtcagtttatcaatctgcatgttcgcccttcttcatacaatatcttgcctgtaatggttaggatgaagcctggcatatatctgaccggaaccaacgtgccatctccaggaggtaacacgccggctccggctagggacgagtgcttggaggctctcgtcctgacgggatggggcgaggcgtgcgtcagaccgcctgtcgccacctaacccacgatctgaccggtttgtgactgatcacagaccggatgaacgagcgcgctgtactgcattacgtgtggcgtgacgtgctcacccaaaccgcaataaatgcggttaggtgagccccgctgcgctcacctaacccatacacgcggcgcaaaacccacaaggggtcggggcgcctcggccctcggggccgaggcgggagcggtccgaccccctcggggagacaaagaggagggcgaacacatcaccctcgggcccgacgccccccgagggtgccaggccacgtgggcgattgtgtctgcctcaagcctctagtcatgatactcccggtcccatgtcaccgacagtagcccccggcgttatgccagggcgatcgccctccccgagggaagcggtcgggcgtgacgccacttctaaggcctggtgacaggtggggccggttcctacaggtgccgtcgaactacatcacccaaagggcggtgtgaggcagctgcgatgggctcgagctggcctcgggggcggagacaagctcgggagctggggtccactccaccacaaagtcggcgagggcctggctcttgatcgcgtggcttggttcaaagcgcaaatcgaattcagagagttcgattgcccatttcaccacccgtccagtaccctctcggttatacaagatttggccgaggggataagacgtaaccaccgtgacccgatgcgcc

SEQ ID NO: 5573 - DNA, 4181 bp, Oryza sativa
tgtcggtgacatgggaccgggagtatcatgactagaggcttgaggcagacacaatcgcccacgtggcctggcaccctcggggggcgtcgggcccgagggtgatgtgttcgccctcctctttgtctccccgagggggtcggaccgctcccgcctcggccccgagggccgaggcgccccgaccccttgtgggttttgcgccgcgtgtatgggttaggtgagcgcagcggggctcacctaaccgcatttattgcggtttgggtgagcacgtcacgccacacgtaatgcagtacagcgcgctcgttcatccggtctgtgatcagtcacagaccggtcagatcgtgggttaggtggcgacaggcggtctgacgcacgcctcgccccatcccgtcaggacgagagcctccaagcactcgtccctagccggagccggcgtgttacctcctggagatggcacgttggttccggtcagatatatgccaggcttcatcctaaccattacaggcaagatattgtatgaagaagggcgaacatgcagattgataaactgacgcgtggtggacaagaatgaccgatttgtgaccggtctgacactggtcatatcgtcagcagacagccatgttcccacgtcgcgcctgcttccggcggaagtggaggtaggtgtgggctgtcccatcagaaggtcattcagacggcaaccatacaaatctccgtccatttatgaaaagataggataagtccccacacaaaagagagagaggggtgcatgtggtatccccttgaaatataaaaggaggaccttgcccatagggagagcaggcttgggttgggactggaccttcccagatcgggaacccagaaggagggagaggctggctgatactttgtagctccttcatacacagatccaccaaaacacaggagtagggtattacgcttctcagcggcccgaacctgtatacatcgctggtgtttcatgctctttcgagaggtcgcgatctttccacatatagacagagcttgggatttcaccctgagcccccggccgaaccggcataggggggcctgtgcggtctcccggtgaggagcccccacactccgtcacggttggtaacacaaaccgggactaaagatcaaatatgcccgttacccttttgaaccgggactaaagatcatctttagccctggtttttattgcatccgggactattgtggaaatcggccgaccgacgaaagatggtttctccaccagtgatacatgccgatgtactagcaacgatataaatttaacatacactataaattgttgcattgcgtttgtatatcataaccagacaacacagagaggcagggggacgtagttttttgtatggctgcgaatcagttttgatatatattactatctcatataattatttgatggttggaacaatataaatggcttatgtttatatatagacaagattatcttacgattcgcacagttttttatagggagtaattttcacgcctcgtgtttttatatatggataaaaaaatactatatgaattggaaagggcatatttacggtgactctaatttacaggttaagtcatagacttatgagcattcgtatttacggctatttatccttttagtagtaagacggcgtatttgtcaacaacgagatgtccatataacttcgtcaactagtctagtttttttaatatgcttataaagatatggtgtgtgtatatgttcatatcggtaagtgtttgcgttgtactgtgtaattctaaaaaaaagtgagctaggtagcgttacgagtatattgttgggaaaattgatctctcggtttgaaagatcacgctagaccgttttccacccgttgtctacgcaaaatcagagcgatccaatctgttaattcccgattaactatgcgccgtgatcggtggcacccaatttatttcctattgagtcgcccccgattccccacagtgctaaatataaaaggggaggccggcccaacagtagatgacaatctctctcggtctcaatctaaacccaatcaacattggcgctggaggggaaacgtgtggcggttctaggatagtgtaggtggcaaccggaaggctgccgctaccccgcaaccggcgttctcactgctacgactacttcccttacgccgacgatcacggagcagttcgagggacttcatcctctacttccactccggttgatggtattggagagggaacaacaagaatcgcaacggtggtttcaaataacggtcagtaatcgtaaaattccgtattagggtgatcatgtttagactaagcactcatgttaatagatcagtagaatctacatatatgtgttcgtatcgggtttctagaaaattttacaacgaatagggtaatactccctccgtttctaaatatttgacgctgttgacttttttaaatatgtttaaccgttcgtcttatttaaaaaatttaagtaattattttttttcctatcatttgattaattgttaaatatacttatatgtatatatatagttttacatatttcacaaaagtttttgaataagacgaacggtcaaatatgtgataaaaagttaatggtgttaaatatttagaaatagagggagaggaagtactgatatacggagtaatcagcaaaaagatggaccatagccgtcgtgttggactcctccatgtaagacgacccggaacagcgaaaagaagaagcgcacgtaagaatcggcagggtcaaagctagtttctcaaaaaaaaaaagataataagaataatataataagaaaataaaaagaaaaaaaatccccatggagacgaaacgtggacaaaaatcgcagccgtcacgtccatctccgcaagaccgcggcgccaaacgggtcaaccacccacctctcttctcctcatccccatcccattcccatttctctcgcgcgcacggcgccgcgcgcgacgcgagacgcgacgcaagccatcaccaacacaaaaacatggcgtccaccacctcctcgcccacgcgcgcaccctcctcctacccgtaaacgacacccacaccgacccgcctccgcctgcgcggcgagaaaacccaagaaccccccacgtaggcaagacgaggagaaagaggattgcaagacgctgtccatcgaagcatgccatccatggcgcctcctcggctataaccaggcgagagagagagagacgagacgagacagccaagaacacgcgcgtgcgcgcgtgcgtgattcttagtttagcgccttcccccccgcggccgataataacacggtggtgggggaggtgttcgtccgtggcgcgttcttttgtcccaggcgtgcatggccgagacgccatgacgacgacgacggcgacgaacacggcgacgaacacggcggcagccatggaggtgaccaaggcggtcacgcagctctgcgcgcagggtgggggcggcggcgggaggaggagggggaggggcaggccggccgtgctgcggctcgacctccgctggggccgcctgctccgcctcgccgtcatcagcagggtcgtccgcctcgtctgggaccagctcctcgcctgctcctcctgcgccggcggcggcggcggccgctaccgcaggctcggcccgccgccgcagggcgtcgccgccggtgccgtcctctccccgctccccagggacgccgacgacgacgctgccgccgccgaccgcgacgcggccgatgtcgaggacgtcgtcagcctcaaggtcagcctgctcggcgattgccagatcggcaagaccagcttcatggtaacttctcccatctcctcctcctctttcaaccaagaagcaatcaaattctgaaactcgagtcagcaatcgaacacaagaatcatttcttcttgaattcagaatagtcaatccagatagtaaaaagtaaattaatctattgggtaattgattctgcaggttaagtatgttggggacgacgaggagcagaacggcttgcagatgacgggcctgaatctgatggacaagaccttggcagttcggggagctcgaattgccttcagcatttgggatgtggcaggtaatttgcacaagcatatgaactacaaatgcaggatttgtttccccctttatacttgcattggttgaagaatcagattttttaaaaaggggatccactagt

SEQ ID NO: 5574 - DNA, 2562 bp, Oryza sativa
attcgcaactgggccggcctaggaacgaagtaggaattgggcctccagcaacttccccccggcgtatcttgccgcgctctcggccaccgccacgcctcccgctccgatgctccaccgcgcagaccttgcgccggcgagaaacggcgaaacccaaatcctctctcgaatccccgcgcccgcgcttgctcgatgcaccaatggcagcaggggggggtggggggggcgcggctcgggatcctggggacctgcgccatctggcagccacgaagcgaacccaccgtccactcgccgagttcaggcggcttcgtcctgggcgaggaacgcacgccgcctgctcgacgaaatgcgcgggaaagacgggagcggaccatatgtcccacgagatcgaggaaaaggtgcgcgcgcgtcgcagacgcagatctactcccccgccgcgcccgcgcccctgccgtgaggcaagggagttgaacagtacacaggaaatgggaggaagacccgtctcgcctagcgctccaagacccaagtgagtcaactcttgtgctctgtaaatttccggtacacgttcgttggttgtccaggcctgggaattgcttgtatctgaagaaaagttgctcgtctgatccacgaatttctgtccttatctttgtggtatagtttcacacacgggtgaggtgataggactccaagaagaactggagaatggattatcataatttctggtatacgtttactcgaatgcgtgactacaatttggaaatttccttgtttcacactaaggtctggtttagttcccaactttttcttcaaacttccaactttttcatcgcatcaaaactttcctacacacacaaacttccaacttttccatcacatcgttccaatttcaatcaaacttctaattttggcgtgaactaaacacaccctaaggtatggaatacccccaaactttttataagaaaatgaacatctaacagcacacgcttttgttttggatgaaagctcatgtgaagtttctaatcaagacaccagacacatctaaagtgtgcctggaaggtttgatcttatttaagaaccattagttacatagggtccagtgacttggacttatgtcacccaaataatcttatcttatgttccagtggtggttagtgccatataccaaaaacacaatttccccgccactacctccagtcctccaccagtccaaccctccaactatattgtcatctacatcatacgttttcacagttttgcagtctgacttgctcttagttgttgcagagaattggatttacaaactgagcatagcctagaaggatctccaccacctttcccttggcaaaacagaaggtcagttcaatgtttctactccatatgtccatatgtgtggatgtccactaaatttgtgctttggtcatgcctattctgctctattcttacgtatttgctcttctacaataaaattaggatggcaggagtaggactggtagttggaggatggattgcaaaggcagtgattgccaatatcttgtccagagtacgctccctcctccacgataatttcagtctgcaaaaggacactgaaaaaatgctgaatgacttggaggttgcgcttcctcgcattgaggcggtgattgaagcagcggagcggagatcaattgaaagcagtgccctttccacatggttgcagcagttgaaggatgctgtttcccatgcaggagatgttgttgatgattttgaagccaagacaattaaagatcaggtcgaaagcaagagcaaggtcagtgcaaaggcatactctaccgtcaaggctttaaaggctttggtcttttctgatagtgaattgaagaagctgaagcatgctgtaagaagacttgaaaatgtatcagcgagagttgattctttcattgaattgatcaggctaaatgatgatgatacagtgggaaggattggccatagcttgcatagtgagaccagctctttacttggtgacaccaaagtaattggtcgggatgaagaaattaacctgatattggacatcatattgggttaccgctaccacttgccaagaactagtgagcatgcacgacctgatgatcaaccaaaatttggtcaaaggggaacactttttgataaattacggaagattttccttactggaactgctgaatctagtaaatcgagtgataaggctaaacttgaagaattagaagcaagaaagaaggggaacaaaattgaagaagaagatcctagcaaagattgcatagaaattggagaatacgaacctaatcagaagggacaaactgaaagattagattataatagttctgatgtacatgaaaccagtggttcatctcaaaaccttggcatccttcccatagttggcattaatggagtgggaaaaacaactgtggctcaagctgtcttcaacaataagagggtaaaaatgtgctttgatctaacagcatgggtttatgtgtcagacaacataagtgggaaacaaattatacaaaggatcatcatgtctttggaaccatggagtggactaactgatgatgcact

SEQ ID NO: 5575 - DNA, 1167 bp, Oryza sativa
aaaaaatagttcgagaaccgtggtatatccccccccccaaaacctccccaacccacccataaaaaaccggatggcagcaatcacaacttagcattgcttctcatagcaatgttcgtatactataagtgcaggttagttcagacttcagacacctatggtaattgttttttattttgttcgttaggtggtgtttgggtccatggattaaactttagcctttatgtttagacactaatttagactaaatatagattacttacaaaaataattaaataaatgagagctaattcgcgagacaaattttttaagcctaattaattcataattagagaatgtttactgtagcatcacataggctaatcatggattaattaggcttaatagattcgtctcgcgaattagtccaagattatggatatgttttgttaatagtctatatttaatacttctaattagtgtacaaacatccaatttggaaagtgctaaaaaattttagtcccttccaaacacccccttattatttttatcaaatagccacgtaagcgtcatctcaatagcacgtgggacaaagacccctagtcaaaggcgtcatgtcagccaaaaccagagacattgctaccgagggagctcgtttgcatagttgaagaaggcgccatgtcagccaaaaccggagacatttttatcgagggacctcgtttgcatagttgggttgtactccctccatattttaatgtatgacgccgttgactttttaatcaacgcttgaccattcgtcttattcaaaaaattatgtaattatcatttattttattatggcttgatttatcatcaaatattctttaagtatgacataaatatttttatatttgcacaaaaaatttgaataagacgaatagtcaaacattattcgaaaagtcaacggtgtcatacattaaaatacggagcgagtatatggttttcggataaggatgaaaaacagacttagcgactataagggaataagttaactaatcataaaccgtgcgaaaaagatccaaaaacatacggagcgacaaagtaagggacctattgtgaacttatttgagggataaagtcacttccttaactacaagggaataagttcacctgacgtccctcaactttatgttgagtttgtctgcggtcccc

SEQ ID NO: 5576 - DNA, 8642 bp, Oryza sativa
tttttgcttgcactgtttgaccactcatcttattcaaaaaaatttagaattattatttattttttgtgtgacttactttattatccaaagtactttaagcacaacttttcgttttttatatttgcacaatttttttaataagacgagtggtcaaacaataaaaaaaaactcaaaatcccttatattatgggacggagagagtatgtattttaagggcatgtttagtttccaaacaaaatttttcacgctattacatcgaatgtttgaatacatgtatggagtattaaatgtagaaaaaaataattacacagattgcgtgtaaattgcgagacgaatcttttaagcctaattgcaccatgatttgacaatgtggtgctacagtaaacatttgctaatgatgtattaattaggtttaataaattcgtctcgcagtttcatggcaaaatttgtaatttattttgttattagaatacatttaatactttaaatgtgtgtccgtatatccaatgtgatatgcatgggcaaaatttttgccaccaaaacaggccctaatcacaacagaaataggagtacatagcatttacacagctggatctcaatgcaaagtaacacggtccagattgatctagctatcctacctgtacatggtacgagtatgacgtgctatagtgccaagtaactagtgctgtaataatagtttaatatgatgtttaggctgagtttatgacccacacatataaataagataataagtgattaaaatatgattaatacaaacttaaaaactaatttatttaattttttttaaattttttttaaaaaatatcgtttaataatttaggaagcgtacgtgcttgtgcttatggtaaataagggagttaaaaaaccaaactcattttgaacgactcagccaaattaactaaccatcgtgggctactacttcagaaacagacaacgagatcaggtactcaccatttccaaacatataaattgccctgcaggtggcacgtaccacgtacgtacgtccaattccagcaggcagcactaatcagtcacaactactacaaggaccaatctcattaacaccaatctaattattattaacaaattaaagcaggtaacatgaggccatcgttgacttgcattagagagcgtatcaaaacaattaatcaacgtgcagggcaaacaccaattaacggatgggaaagtgatggtgccgtagttacggtaaactacgaattgtaaacagaacgtacgctgtctgatataatcttgcttaattagtttaagtccttgcatgtccaagcaactatcatttcaagccgatcaaaattcagaacacgcgtacggtgcactgattaaactagtactaaccagaatttttcaaaattgatttgccgatgatttgatcgtaattaatggcgcttgatttatatctttaatttgctcatgccggcttgataatgaagtagcgtgcaacatttcactgcagctccctctgggaaaaaaaaggacttgttcactttactactatttctaatcttaacaagttttggtactgttgaatttccattaggcagtttaaaaaaattccattaggtagctagtaatccaaacacatatctaaaataatactataccaaatctttttcatatagcttcacacgaaataattgctaagtaccaaatcaaacaacaaccacatatctctaccttaccatttttttggcatttcccagactttgctaaattctggttatgcatcaaactgaacatgcccttaaacttatctataaatgttgaccatttaacaaaatattgataatcaaaattttcatcaaatcttatctataaatgtcaaatatttttatcacgaaaagtcaagatgattaaaattagaacatgaaatcaatctttattttttgaataaatgagtatcaaagcaatcatgaacatctcccatttgagaggcaaaacgcaggttgcggtccacaactccatacatgtgtttgactgtcgcctttctgcgctctccacaatagctcctttctaatatatttttttaatcaaactttcttgtcttttaagcgagttctctttcttttagacctttttaagtttttcatatccatttgaataagcagtcttgctcggaaatcgaattttgggaagacaagctcagcacaattgcgcaaatacgtagagaaaaacatccatttgcaaatgacctgatatcagccgacaggctgtttaattttcctgtttggagctcgttcatgacgtgcccatctccacattaactggatgtgtcagagttttaagtgttttttcttaaaaaaaatccggttcttatgtgaagatttctcctaaattacagctgaaaaacattttttttgtgaaataggaaaattataataaattgtcctttccatgtcacaaacacataaacctattaattgatataccatacaaacaactattacactacatacacttaaggggtagtaaataaaaaaattgctgcaatatcttcattcttgaattactcaaagggcaaatattttttttaaaaaaaggacaagtattttgatacgccgcatcctaaataaaaattgatactactaagttataaaatgaagtaacatcccaagatgctactagtatttagaattggttctgcttagctgaaacagtaagcatatgccatgtttgttgttgtgatagtcaaaacacacacggacatataattagcctgaaatttcaactcaggcatgtggaaagctttaaaaaatcttttatgtcaccgaggtggaatctgtccaaaaccccaaatacctccaagtactgaattctttaattccaagaaagcccaatttgcatgtaaccccttcacaaatatactattcttttcttgaaatgccttactagaaaataccaaatggaaaaaagaataatttgttcacaacacacaaatgacatttgacactattctcttcgtcccagaaaaaagtaactttcatacatatatcaaataacttatatatataaagcacatatactaaataacttttatacatgtccagtctaaatttacacttaagagttgtttttttatggccaagtttagtttcaaacttccaatttttttatcacatcaaaacttttctacacacataaattttcaacttctccgtcacgtcattctaatttcaaccaaacttctaattttaacgtgtactaaacacctatagacagggaattcgagtcagaatgacagagaagagagcgaagagaagaagaagcagccggcaggcaataaatggggagaggtgtataagttgcacccttcaaggcacacaaacaggtcatttgaatgtgacctactctcccctcaccccttcatcaattcggctcagaggctgctcctcctcagtcctgagtctcctgtcctcatctccattttgttttctcctcctcctcctctctctctctctctctctctctctctctctctgtctctctggtggagtgcagtgcagagattcaagaagttcaagatcgaacaggcctgctggtatgaaccctgttcatgttttttgcttgctctgtgtaatctctctgggctctggccatctggtgctggagagattggagatttgctgcataatcattggttcattactaccagttgtttgttgaagctccattaattggggattcagtggttcttgttttggtatttcctcttaccatttcttagggtggttttggttgatgtattttcccacaaattcattccatgcgtggagttcttgatggctaatccatagtggtttcaggctttcagctgctattcttctttttgttttttctcctcccccaaattgtctgctgtatggaacagagagcagttcattatgttttctggatgctcttgtatgcctttttttaatcaaactgtcagcttctgttctctgtccatgcttcttctgggctttgacctgaaagattgtggtttagaacattaaatctgcaccccaaaaaccatatattgtccgacatgcagaagtggaaatgtgagctcttgtttaatgctgctcatttgttgcctcttttcaagaaaatgaaaatttgttacaattgcgtggtctagttcttgttttcttccatccctgtattagataaggagtttggtaggcactgtcacatgattttgtgccgcaattgattttattcattagattagtaacctaaggaatccaagaacattagggtacattaataaaatgcaaagaaacagggacagaagagagtaggttctttactttgcccagttggcatcccctgaagtgatgcttgatgcttccttccattttgattatctcttgctgctgttggtggtaaatcattattattagtactaccttttttatttttcggaagaagaaaaagaggaacaagccaatgtggcctacataatatgtggtctagaaagttggcatcagtagtgtgtagatgcaatttgaggaaattaaggcagaaaggaagggacaggaaaaggggctgaaaggtttgcttgagcatagtgcatctccacaccttaaaattgctggtcaaattgtccttaaaatcgtttatatcacgcagacggcatatcgttttcgacattgccttccttaactcctgtgttaattcgaccacaactttagaacagcttgttgagatttcttaatcccagtgttgtatgtcaacattgcattgattgtagtattattatgagaagattagatactgtaacccctccagagagtgacatccattgccttctgttactggatttctgccaattcttagttagatttatggataaaaagtttttaaccaagtagacttaacaggaccaaaggttgaatttgttcacctaagaaaaatgtacaatttgttgaacaaacagcacaattcttgaatgaggagatttttagtagtcaggtttgttgtttggatatcatagtttttgaatgaggagaacatattggttggatttactgcgtggacatcacaattattgaatttggagaacaaattggttagatttgttgtgtggatatcatacttcttgaattagaagaccaaactagttgtttctttgaacaaattggttagaattattttttttttaaaaaaatcatttttcccttcatgaattaggaacagacagattgatgcccatgttaccatggtggtgtctgactcattgcagtcttatctttttacactctctagttttcccaagctgcaatcatggtggccaagtgcatgccatgatgcacctctcatataccaccatctctgcatgctcaagaacatcatgattttttgttcttcttgtcaccaactttttttttgtttttccccctaacttcttttcacccttgcaacgcacttctcactcgtagctttagttttcctcttgtcagtagcatatgtttgtttagttgtgataaattatcttttttttccagatcatgccttgtgctgcggccgagctcgccaatggcgaggcggcggcagcagcagcatgcgcggtgaaggtcggcacgaccggcaccatcggctcgctgatgacgagggagctggaggccatcaaggccgcgccgccgcacgccacagccgcggcgacgacgccgcggcggctgaggcggcagagcagcccggtgtcggtgccatgcggagccagcccgaggaagatcgccgcgctgaggaagagctcgtccagcctctccaccaccagcagcggcggcggcagcgggcggcgcactgaccgcgtgagcgccgaggagtcgtcggcgtgcaagacggcggcgtgcaggaggagctctagtaccacgccggccagctccccgatgctcgcggcggacgtcgaccggagcggcggcggcggcaaggcgaagaaggcggcggcgagggggcgccgcggcgtcggcggcgtggaggtggtggacgtgaggtgcgggaacccgatgagcagccggctgaggaggctgggattctccaagctgtcggagacgttcgcgtgagcagaatcagatcgtcttcagtcctgacggcgagctgtgtcgcgaattgcaattcggaattgcattatgtttgctatagtaattatattgttgttattaaaattttcttttgctggtttctctcgtgtatgggtatgaccaaattaagttaatttatgagaagcgttttgccatcgtcgcaatgcaagttcttcgtggtgatgtgtatgatgtacccgtaattgcgtattttaacttttggagtgaatgtctcctcgtttttttatgccgtccaaatagttattttttttaaacaaggtaatatgatagattaatatatgatatattacactaaaaacatgcatgttaaaattatatctccacaaattgcaaacataaacactagctagttaacgtatactactactactcacaattaaatttgttttgccaattcaaaattatatgtttacgaagtaatatatcatatattaatttatcttattagttttttttaaaaaaattataaccatttggatgagttcaagatcgtttttccatgttttttagcctatagactggcgcgttgagcgttgctggatctcgaatcaacggtagatcttgcacaaacgattcttgaaacttttttcccgtgtcacgtcgaggtactgtagaaagacagaagtgaactacaaaattggatgcaatttttagtaattgattagctaacatggtgatttaccacttcaccgtattaggaaggaaaaaaaaaggactcattggcttataagattcagcgaaagatagaaacacacccactgtttggttttacatcatggagggtgtatgtcatcttggaaatacaaacttgatgggaaagtaggaaatcttgttgggtgtgttcgctattcctggatcccaaccggatccctccgcacggaaaacggagcggtttattagcgtgtaattaataagtattagctattttgttaaaaaaatggattaatttgattttttaaacaactttcatatagaaatttttttttttaaaaaacgcaccgtttagcagtttgaaaagcgtacgtgtggaaaataagggagatgagatgggaaaggggcatccgaagtctggaatggaagtagggatttctagactgttgattgatgtttgaaataaccaagctcaatgcatccaaaatgaggctagatttgagctgttcatgattgaatgcaatgtcagaagatctgagatcactactactcactgtactaactccctcacagttgcatatcatctgaaggagacaagagggaagatctttgattggatgctggatgatgagctagtttaatagccctacttgacaggataaccgtgtgaagtgttttgttggagcaaacaggaactttctctgtttgaaggttaagcaatcattaatcataatatatgtaaaaaaaccaatcattaatcaaataatggtgaggatattcaagacccatgccaaatgatttgggcttgggactgagatattggcagggatttattgggcttcccaaacaggacctaactgtgttcctagcttttttagaacttctaactgtttctagctggcttattattctacaagcctactggttattctaccaactggttcacaattctggaaaagtgccaagaagcaaatacccggcaagatactgtccgttcattcctgagatataataaaatagatttatttaaattttttaaagaattttttatataaaaagtttttggacgaaatacatcatttaatcgggaaaacgagcttacagagaacgagataacaactttagcccaaatgaaggtcaaaacgccgcaagctaatagtgagttcaaagcagcttaatagactggcttttccatggcacgtttaacgagaaaaaactattagcgtacaattaattaagtattaactattatattttttaaaaaataatttttaaaatttttaaaatattttttttataaaaaagtttatagaaaaaaatactgtgagcaacttagaaaacatggttatggctgtgtttgctgggggaggttgggaacaaatcttcttcgcacggaaaacggagcggtccattaacacgtgattaattagaaattagctaatttttttttaaaatgaatcaatatgattttttaagcaatttttgtatagaaactttttgcaaaaaacacattgtttaacagtttaaaaagcgtgcacgcggaaaacgatggagaggtgctgggaacccttgggtccgaacacaccctaggatcttagggaaaacaagtcctactagcggccaactcacaaaaggctgattcagactcagcctaaagggaaagaaaaaacacttccgaatgaaacaataatatgattcacatggcaaagctgccgccatatgttttgcaggtggtagctgccaaaagctcaaagctgagagcggagcacacagattcctttttccaggaatatgcaggaggcagtgtgctgttgtcccagtatggcacggatcaaatttatccatcttttttttcaccttacttttactgaaatt

SEQ ID NO: 5577 - DNA, 2518 bp, Oryza sativa
tctgttcaatgcaaacatgtggtaataaccatcacgtagttttaaagtatatgactttcagctgtgcatttttcatgttatgatacatggttcctgttttcaggcaaaaaccaccaagaagattgtgctgaagctgcaatgccaaagctgcaagcattactcccagcaccccatcaaggtatttttgcaatgtgaagattcaagctgaaaattctcatgaatcagtatctttttagatgtgttggatgctcacttacataattattctgtgcagaggtgcaagcattttgaaattggtggagacaagaagggcaagggaacgtctcttttctaaactacctactggatactgaagttgtgggtctactgtgcttcatacttcaatgttattaggagcttaatttaagcagaccatatcatgtattcaagtactctagcaaggattggctttctgctgaatcaagttttgttgcttaatgctcattgaatccaatgtgatgcatgtgtttatgttgcactgcaattttgtcttatggcagttttatctccctaagtactcggtgtctgtttttcgttatcttacctatgtttgcaatcctagagcgacccacttaaacgaattcctgtgacatgaatccctgagaggttagtctgatgaacttccatttttcagactgaatttcgtatatggttaactatactatgttttgttcaatatcttcgtcacgagatagaaggtatggaataccatggatggaggtgaattgtaagataggccttggtcttgtgattgttatcttagaaggtcgatactaatgtttggtcttgtggcgttagtgaaactgttttcgtagcaatgtttggtcttgtgatgttagtgaactgttttcgtagcattgtagtacttgttccattcttcatgcatgatttggataggttattgacaattgtttatagtaatgaattaaatattacactcctaaatctattatataattaaaggaatagaaaaaagagcctccacgtttactctcatggcttagaaattctcacattaatcggagaaaaaaaaacagagtccatatagaaatacaatttagaaatagctgaaattcggaattaaaaaataaggaatattagaagagaagactagagttcatatagaaatacactttagaaatagttgaaatttggaattaaaaaataaggaatattagaagaggagtatagagtccatatagaaatacaattaggaaataatagaaattcggaattaaaaataaagaatattagaagtagagtatagagtccatatagaaatacaattaggaaataatagaaattctgaattaaaaataaggaatattagaagtagagtataaagtccatatagaaatacaattaagaaaaaatagaaattcagaattaaaaaataagaaatattagaagtagagtatagagtccatataggaatttaaaactaactaaaattcggaaaaaaaaaaaggagcctctacgttcgctcccatggcctagaaattctcacattaatcgaagaaaaagaaaaaaacagagttcatatagaaatacaatttagaaatagctgaaattcagaattaaaaataaggaatattagaagaggagactagagtccatatagaaatacactttagaaatagctgaaattcggaattaaaaaaagaaatattagaataggagtatagagtccatatagaaatacaattaggaaatagttgaaattcggaattaaaaataaggaatattagaagtagagtatagagtccatatagaaatacaattaggaaataattgaaattcggaattaaaaataaggaatattagaagtagagtatagagtccatatagaaatacaattaggaaataactgaaattcggaattaaaaataaggaatattagaagtagagcatagagtccatatagaaatacaattaagaaaaaaaaatagaaattcggaattaaaaataagaaatattagaagtagagtatagagtccatataggaatttcaaactaactaaaattcggaaaaaaaaaaggagccttcacgttcgctctcatgatctagaaattctcacattaatcggagaaaaagaaaaagcagaatctatatagaaatacaatttagaaatagctgaaattcggaattaaaaaaaagaaatattaaaagaggagactagagtccatatagaaatacaatttagaaatagttgaaattcggaattaaaaaataaggaatattagaagtggagactagagtccatatagaaatacaattaggaaataactgaaattcgaaattaaaaataaggaatattagaagtagagtatagagtacatatagaaatacaattaggaaataaccgaaattcggaattaaaaataagaaatattagaagtagagtatagagtccttatagaaatacaattaagaaaaaaaatagaaatttggaattaaaaaataaggaatattagaagt

SEQ ID NO: 5578 - DNA, 4541 bp, Oryza sativa
acaggcgaacatacaaaaccacactcaaaaggaaaaaagaatggcatggagtactgaggaccatcaatctaaagattaaattgccacccatgaacaactccttggccatctcctccaaaagcatagagttttaagggccacaaattctaagattagatcgccacccatatccctgagtaaaaaactccttgaccaccttctccaaatgttgacatgccacaactaccatatcccgcgaaccaggcttcaggcttctgtaggatagcccatgtacgaagtcaatggataagagaatatataacctgcaaaggtaaagatatcactttttttttataaaaaaaccacattattcctacatagccaaagcgaccaacaagtagcagctgctcctaacaaaacatgtgctttcaaattattataaattccatcaagccagctcccaaatatatgcgctacacaatgtggtggaggaaatccagatgctacttggatgatggaccaagcaaaatgggaaaaacgacatttgaagaaaagatgtctaattgtctcgtcattgcaacaaaaacaacaattcttattcccttgccattttctttttgtcaaattgtcctttgttaacaccactccacggtgcaagtaccagagaaaaatcttaacttttaagagtatctttaatttccaaatacgcttattaatgttgggaacattgctgtgaattagagctagataatgagacttcatcgagaactcctcatttgaggttaagttcctatgaaactcatcttgctcctgagttaattgaaaaccagtgatacgtggtaataaattattccacgctgctagttttgatcctataaggtctcttctccatgaaaaagatagaggattgttttcgaagatttgtgcaactgtagccttcttatacctaactatgttgtaaaggcaaggatactgttctttcaagattgaattgcccaaccattcatcttcccaaaacctcaaactaaggcaaggatattgtttccaaagttttttgagacaaaaaatatttacaatcgttgtttctccatcaggtgtgcttctgcatttctgcaagctagaaaacctacattcctacaatgctacacttgcaacatttattttgttttttctttgaactttgtttatattctgtaaattaaggaggatgctcgatacccatttaatccattgtgttgtcatacgctggtacttctatgagaagtctaaacttctcaaccacaactaacttttttcatttcattttctcagcatgtccttgtaaacgcatggtaacacttaatttgatggagctgtttcctccatgaagaagctgttattttcctatgaatatctcatcaggttaacaggtttcttgcaagttcagaacaagaaagttgcctgagatgatgcaaactgactgcacaaacagaaaggcaaccagttggttacttcatcgatattacaggctagatcgatgtagcctggagactctgcaagtatgcatagaaacagagtggtctttactcttgttcattaatcaggatagccttgctgatgctgaagcagcaaaacggaagccggttagagattgcagcataaattggattcagtaatgctttgcacttctttcgtgggaccgcactttaatctgtactacttcctccgtttcacaatataagtcattctagcatttcccacatctatctatctattatattattaaaacagctttgaaaggaggcaccacgttcgctgtgggggctagaaattcccacattaatcgaagaaaaagtgaaaaaagaaaaaggagagtccaaatagaagtccaatttaaaaatagctgaaattcggaattaaaaataagcaatattgaaaaaagtttccatataagaacctaatacgagattaatcaaaattcaaaataaaaataaaataaaatccaaaattagaagaggaaaggagagtccaagtagaaatacaatttaaaaatagctgaaattcggaattaaaaataagcaatattgaaagaagtttccatataagaacccaatacgagattaatcaaaattctaaataaaaataaaataaaatccaaaattagaaaagtaaagaagagtccaagtaggaatacaattttaaaatagctgaaatttggaattaaaaataaggaatattaaaagaagagtccatataagaatccaatacaagattaattaaaattcggaataaaaacaaaaataaatctgaaattagcaaaagaaaataaaagaagagttcaagtaggaatacaatttaaaattagctagaattcagaattaaatttaagcaatattgaaagaagaatccatataagaatccaatacgagattaattaaaattttgaataaaaaataaaataatatccaaaattataaaaattaaaagagatttcaagtaggaataccattttgaaacaactgaaattgaaaataaaaaataaaaacattaaaagaacacaatacggtattaactaaaaattttttaaaaataaattctgaaattagaaaaggaaataagatttcaattagtaatacaatttataaataactaaaatttgtgataaaaataaagactattgaaaaaaagaccatctaaaacacatgacgagataaattaagtaacatgcctataaaggagtagagtggtggcggttgatacgacatataaaaattgttaataaaacacaaaaaagaatcctaatgacgattaaaaggagggacgtcaggcaagtcgtgaagcaaacaagtaaggcggttgccgggatttctagacagtaaaaaaataaaccccattaataatcatattcgatttttaaaatctcaatgacaataaaagggagaagcagcgggcggggtatataagagtatagttgcagagccgccgacggttgacgggacttctagaaaataaaaaatgaattccaacgatagttatgtttgatttttaaaatcatagtgtaataaagagtaggcggcggacgggctgtagaggggcattgtggcatcgttcgatgggacttctaaaaattataaaaaatgaaaatacaagtccaatttttaaaggttcggaacttccaaaaattaaaaaaacccaatgataatcatgttcgatttaaaaatctcaatgacaataaagaacggaggcagtgcgcgagccgtagaagagtacagtggcaaagccgctgacggtttggcgggacttctagaaagtaaaaatgaacccaaacgataattatgttcgatttttgaaatctcaatgataataaagagaagaaacagtggacgggccatagaggagtataatggcaacgtttgacgggacatctagaaattataaaaacaaaacccaatgtgacaataaactctaaaaactataaaatccaatttttaaaggttccaagaagaatgaatagaaatagtggtagatcaagcaagcaaataaagaaggggtagcaactggtgtgacttttaaaaactatatgtagaaacacgaggatgataaagtttggtcttttaaagtcttaagataataagatagctatttaataaattttaagtaaaatcatcctaaaaaatatatgaatttgtttgggtgctagccgcgcaattgcgcgggccacccagctagtttatattgattttagtgaatctagatagatatatatgtctagattcattaacatcaatatgaatgtaggaaatgttagaatgacttatattgtaaaacggagagagtagatgttatcttgtgaggcggtctggtgattgtgtttacacagtaataaaactgtagctctgtatgctatctcaggtactgtagtttgctgtttgcagttgttccaatcttgccaaatcttttgttacgatgtacatacactgtccgcatatctttgtccaatgtgatctgtatgagtttccacggactgtatctactgatatacagtaattgtgagcgccgctatttgaatcttcagcgacttgattggaagtaaaatcaacgatcttttttttagctcaagccaggccagcattgatagttactcccttcgtttcaaaatgtttgacaccgttgactttttagcctatgtttgaccgttcgtcttatttaaaaaaaatttgtgaaatatgaaaaattatatatgtacatgaaagtttatttaacaatgaatcaaatgatatgaaaagaataaataattacttaatttttttaataagacgaatggtcaaacacgtattaaaaagtcaatggtgtcaaacattttgaaacggagggagtaacttaccatctgacagaaccaccagctagagaaacgcaaggccgatgcaagtatgcaaaacatcttccgtcgtaactgttgtctgttgatcgtacagcccattacccagaggcgaaacccatgacgcgctgggcgaacactcccctctcctccgttccaatctgtagccgtgaagaccggacgaggtgaggggggggggggggag

SEQ ID NO: 5579 - DNA, 3215 bp, Oryza sativa
aaggaaatggaataaggttggtacattgttcttctataatcgtgtggttttcattttttctggatgtgttctttaggattatagctgaaccataggtagactgtgcactgaaaaattgttacagtattacaagttgctgctaaaacagtaactagcagatgggttcccacaatccaacatatgtcagagcatgcctgcagatcactgtttctgaacaatttagtaatgctgatacttgttcatatgtttttatcggtgctctagctgaacagtgaaatggtgtccttggttcttggtattgtagctgaacagtttttatctctcttttgttttctgacagacggctattccaatcctaattgggacgaagtttgatgacttcgctcagcttcctcttgagatgcaatggaccatcgttaacgaggtacgtttattaatagtttcttgcaatcaaaatattgttcccccttgcctttctttggttcttggatatgcagccttcagcatctccaatgtttgttagcatagaaagatgagaccttttcttggttctgacgatatgggtttgggctacacatgtttcttttatctcaaacgctgcaaattaaccagataggtcagaactttaatcttgaattagccttttcatggctaccaagtgctaatagcaaatcagaaatattcgaaagccaaccatcccctgaaaactcccattttgaggttcagatttctgaaaactgctactgaatcaaaattttctcatcaaagatttgagcttctttctgtaggccatgaacacgaaatttttttagcttgatcgcatctgcaattaattaagaatacctatgtgaaaacgacaagagagcccaaatcaaacctgaatcgagtacagcatgctaccaattatgtttgtgcagaccgtgctgacctgatagcaccatatatgaatgcctattactattgcaacattgaatacagtggaccttggttgatcagggggagcattcgttaagtaggcccaaacacgtcttgtcttcgtcttcgtctccggggaaggaggctcgccagtcaccactaacaacagccgggatgatcgagtcaaacgatagaaaatttattaggcaatggatataatttctgttttgtttgtgcccatttgtttgcatcttgtccaaaccatacgacgatcatcgatccctgtgggccttacaacatacagaatgtagatcgatggtcactaatcactcgacatgctaaaagcaaggaaaagctacatcacaactaaccgaaaataactcctcgtgctactgggagccctcatgcttgaaaatgtagttgcgtttcttttcagccacagtgaatatcagttcactgaaaagtttttgtaactaatcctagaaactactgtttgaccaggtttaattctgacaaagaattcgagaacacaaaaccatatgcttcgcatttggtttactgttgttaaaaaaacatgttgtattcgaaagaaactcctctgatgtaatgccctctgacatgtgggtccacgagttatgggctccatatgtcagtcccttaaagtcggaggacagtaagttagaaggtttttttccgttgtattcttgtttctgatggaggattttttttttctgaaatttcaggccagggcatacgcgagagcgatgaaggcgaccctcttcttctccagctcgacgcacaacatcaacgtgaacaagatcttcaagttcatcacggccaagctcttcaacctgccgtggacggtggagcgcaacctcaccgtcggcgagcccatcatagacttctgaagactctacacccttacactgacaaaatgctaggcaaaaaaacgtacacgagcccttccttccctccccttcgtcgtcttcctcctgacctttctctcccggtaatggaggccggccatggccatggctgagcagaactgagctcttgcatgtacatataggtgaaagaaaaaagaaaaaaaaaagaaagaaaaaggatcaagttgagttcgtcgttgtcgaggtgttatcccttcccttgtgcagtgcaggcaagggcagaagaggaaaccgtgagatgttgtctgtaaccctcgtcacagtgtatagtagagtaggagtttaaccgatccatgtaatataatcctcaccgtttttttaacaccagttttagatatgggtactcatcgaaccattcgatcagtttaattttttttttttgcggggaaaccattaattcgatcagttcatctaaagtctaaatgaactaaaatctacatagtccctcgtttcaaactaagtatatgtccaggcctccagggatacttgtactacttctatcctaatataagagcatttttagacgtgagagaaaaataagaagagaaaattacctaaatgttctatattaaacgagagatgatggaaagtgcgagggtaattgaggataagatttttttttgactaattcaccaggagggagagattccccacctgaatatattgcgtcaaacgaaattacacagggcaggcttcacctacgcaagtgcaggaaccctggaggataatagcaaaaaatacacggggagtcctgagaagagaatacaaaagagaggccaccttcccaaaataacagcaattgaagtttgcacttgcaagaaacccaaccgaaaaccagagcaacctaaagctaacaccctagctcatcaacaaccatatcgttatgcaaacttggaaacgccagagtccacgccggagggcctttttgccacaagcatgtcagctatggattaacggcaaccaaaagactgaggaagtcataaaccacccgcattaagccgtcaaaatccaacttaatcttgttgctgcttggatcagtgcccgccgacaccatttgggggaaggaagcctcagagaagggagggccactaaaggttgcggccatagagaccgcccgcatcgagtcttcttcaatccgactataacaaattgctagctagttccacgccctccaacgcccttttagggaaggaagcctcaaaggagggagggccgccgaacaatgtggttgaggacaatccaaggaaaagggtggagacgaagagggagctggacaaaagataagtggtagaggggggaatcctacagctgaaagaacgtcaaccgcgtcaacagggaaggctgcaagaatag

SEQ ID NO: 5580 - DNA, 4605 bp, Oryza sativa
atagcgaatttgctagggacaatgggtccaataactttgaataccctagaacagactgacttcggtatctctttaaccaccttgtgtttgatgactgcttctatcatcattatgaagtacacctctttgaatcaatatgcggaaaaatagctgataagttccatgggctgccgttggcagccaagacagttgcaccactattaagggccaatagaaatatggaatattgggaaaatgtcctgggaagtgattggtggaatatttctgatcatggtttgggaataaacgttctgccagccctaggaattggctgcctatatccagcgctaaggcagtgtcttctgttctgctcaatatttccaaggaattatgtctttgaaaaggaaagagtggtccagatgtgggtggcacatgggttcattcagtctagtgatagaagggatatcgttccagagaatgttgctaaaaattggtttgatgaactagttgataggtccttcttgcaaccaacagtctggcaaggccgttacgtcatgcatgatttgataagagagttctcagttgctgtttcttccaatgaatattatgtctttcacaggaattccaaggttcttccacaatttgctaatcatatttctgttgataatgataatttcgatcttcaatggggtcattatgatcataaaagattacaaactctgatgttttttggtcatcacagggttgacaaaaattatggcactcttggtagcatagtgagaaagtcaactagtctacgtgtactggatttgtcttacatttgcatgagtaatgtcagtcaggcttcagatgttctctgcaagttgtcacatcttcgatatcttgatctctcttttactggtatcaaagatctcccggaggcatttggtaatctataccatctccaggtacttgatctgcggggttgtataattgagaagctgccaaagaacatgaacaatttgatcaatctaaggcatttatatgctgattcacaaaccaccgcactgatctatgctgtaggccagctgacaaaacttcaggagttacaggaattcagagttaggttggaggatggttacaagataaatgagttaagggacatgaaagacctgaggaaattgtacattacaaatcttgagaaagtctcaagttggcaagaggctacagatgcaaagctggtggagaaaaagtcccttgactatctgcaattgaaatgggtgtaccaggtacctgaaagtaggtctacctctcagttgaacaaggatattctcgatggcctacaccctcacttccagttgaaaaggttgaaaattctgaactatatgggaattgattttccttactgggtgcagcgtctcacagacctcgttgctgttaacataattaactgccgatggttgagtgttctgccaccattgggagagctcccacgtctcaagaaactatctctttttggtctatcctctataactcatattaatgatcaagtatacggaaccaatgatgtgatctttccatatttagaggagctgcacttctagaattgtttagctgggagcaatggtccgaggcagaatataaactgcttattcctcacctacggaaacttggtataaatgcctgcagcaaattaagtctattgccgattgaaactttgagttcatcagtcaaagagcttcatctttcttcatgcacatcatatatcagtatgctgcccgcttatttgaaaagactgacgtccctcaccaaattgagcatacaggactgctctgccacattactaatcccgtgccattccttgacattactggagcacttgcagctggaaagctgtttcgatgtacattttgaagggggcatgcagtactttaccaaactgaagaagctagaagtacatcgctgctttgatgtcactcagaacatatatgaacaaacatcactagtggagagatattctctgatggggggtcttcagtccctcatccatcttgttatcgacgacagattcatgtattacagatactaccatatgctgaacactctttgttcaattcgaactatgaagttttgtgcctttgatctttccgagttcaccacggaagacgaggaatggctccagcaactacagtccctacaggagatccagtttgcttcatgtcgcaatctcttacgccttccttctaacctgaataatatgtgtaacctgaagaaggtcgttctgaacgattgctgcaagctccagtcactgccgctgaatggcttgccagataacctaaaagaattccatgtctcaggaggttctgaagtactggagcaacaatgtcagaaaacagatggggatgaatggcagaaaatttctcatgtgccatacgttcggataaatggcagaactatccagatgatttcacatgatcttggaagttagcaacacatgtataacaaggttactctaggttaagttatgtgtaggcattttgtgggatatcattgttggtacttcatcggtaggaattaggagtttctgaaaacttcaaaggtatggtttcaaaaaaccaaattcacattaactgctccggcttctgtcacatatctggatatacaagccactagattgtcagcgatctgctcaaagagggaaatgaaccaatcaaaaactgggaagtagccattttttaaaaaaaatggagagtgctctgattattttctgatgttttcacgtttcaacagaagccaatttttcatcgttttccagtgcagactaaggtgatctttctccatggctattacatttttattatgttctatgatatataaatccaatttttggtaaacagctgaattttgtctcgtgatgacagattggtattcggagcgatgcagaattgcagataccatcagacgcactatgactgtatactaatatactgtactactgaattcgcacatcacactgagcgttgtgtgttgtctggtagattgctagtctctggtatgagatgcacactacatatatagttacgagttatgacttcatattcattctcctatcgaatagtaaaagagcttttaaatgattatactctatactgttgcagcttgcacctgcgcagttctgcgttgcacctcttcagaaatgataaccaccgaggtttcaaaataaatgttcaaacgaatgatatgtttcattcgctgtacttgtgcttgcaaagggcaacgcaaaatttgtctaagagcaagtttaatagtcatacaatagttggctataaaaatatactataccattaatgctcgatctcacatcgcatacactcataatgtcttggagtccgtgttgcagccgactataaatctgtagcccgctttcttctctctcttctctttttttctcgatatgtggttatagctggcttatagcttgctattgtacctgctctaatgagttggtttggtttgtggtctaaataggccttaccaaattttgtcaatgccaatttttggtaagttttgacatgactaattttggtaaggcaaagttgtatttggattgaagccaaaatagcctaagttcactattgaaatggcatattttcttaggcatgccaaaatttggcttcaaaccaaataaacactaaacactattgaaattgtcaaatattggtaagcctaatttagacctcaaaccaaaccagcccaataccacaatcgagcatatgtggatctatttgaacgaaactcttatgtcttgccacactcacatgtccacacgaagtaaataaactgtacccatgtcattcttaccaggacaaaggcgaatcatggaattgtacaaggcagcaggcataaacagcagagaaaacagtacttgtataaaagtagaacaccctgattcatagggaaaagagagcattcaaaattgaaatctttttacacggagcgttggatggtttggcttattactcatatatgtccacaagcatgaaacaaagttattctttgcaaggaaacccagctaatgaaagctacatttcgctctcagacatcaaacatgaggctgaatttggtggcaagaggaatggatataatgacagctcccagggcagcaccaaaaatacggtgtgagattgagaacgtagcactcagctgcggcttcttcaaagggagatggggtgacagtgggcggtttgcaacaggagccgacaggggacgacttgtgtgcaggagtcggtttccagatgggaacatctttggtctcagagctcctaggggtgaagatgtgtagctcctagcttgtccagaacttgaggattgtctcagatgatctatgttgttgaaggatgagtttgagctaccaagggcacctgaaaacgatgaaaaaaggtgagggcatttatttagttgtttgaagcagttgcaaaacatgtacatcaaattatacaatatacactagcgtccagttcaataaaaaattagagactaacctaaaaacagtgaaaaccatgtctcgtgtaaaccaatgacgacttccattttcttaaaaaaaaacaataacttactctagtgtggttgcaagaaatttgtgtccta

SEQ ID NO: 5581 - DNA, 21060 bp, Oryza sativa
caaatcatggtgcaattaggcttaaaagattcgtctcgcaatttacacgcaatctgtgtaattatttttttctacatttaatactccatacatgtattcaaacattcgatgtaatagcgtgaaaaattttgtttggaaactaaacatgcccttaaaatacatactctctccgtcccataatataagggattttgagtttttttttattgtttgaccactcgtcttattaaaaaaattgtgcaaatataaaaaacgaaaagttgtgcttaaagtactttggataataaagtaagtcacacaaaaaataaataataattctaaatttttttgaataagatgagtggtcaaacagtgcaagcaaaaactcaaaatcccttatatcatgggacggagggagtattttaccttgatttttcttagcacgttttttatactgtttcgtgtcagaacttctatataaaagttgctttaaaatataaaataaatacatattcacgtttataataattaaaacttaattaattacatgctaatggttttctcgttctacaatatttaattgactttaattgaacgaagaagtcattcaattgacttaattgtttagtgggtaagaggtatatatacaacataattaattgttagtggataaaggccaaggggcatagaactatagatacaacataactaattcctgctttaattgacttaattaatttaatttaattgctaatgactttaattgaacggatctagtagttgaagcccgatgctttaatgtgggatgcatagagttaagtataaaaataacacatgcatataagttaaaaatactgtgaaaatgaagtggggatggtgatgatttgaaatattttctaatgaataatgacgtgacatatctatatgctgtaatactttctaaaaaaaatatttagcgttagttaactcaaaattaaactaatcaacacctaatatttcggaaaaggagatagcaaattaattgttagtgggcaaggggtatacaactatacatacaacacttacactaccataacatcgcgcattagcaggacaaagctgtatcgcatccatatatatgatccaaataaagcagggaaatccaaccgagccgtgctcgaagttaattaaaccgtcgcatcgagcaggtgatggaccgccgcggcagaggccgggacggggcccgggcacgtatactacatgggtacgtataggccattatcgtcccaaccaccgctacagggcaagcagagaccgacgcacgcatcatgcgtcgtcctacttactctacgtacttcctatagtaaagaaagtcatttagcacagcgatacggtctctaaaatacaattttgactttttgtttctataaaaatatttattgaaaagtgatatatgtatatctttatgaaattatttttcaagacaaatctattgacataagttttacatttttcaaattcaacaacttgagagttatttatgatttatattcttaaggtttgacttaaacattgtcctaaacgacttcttttacgagtacgaagatagtacacccttcctttaaatactttgtcctacttactctctaataattattttcacctattttttaatatcaatatttctttatatcaaaatataaatcacaaccattttttcaatatttaatacaagatactcatgcatgactgcaaataaatagcaccttcgtcttctccttagcttaccttttaaatacttccaccctcgaagtctcccgtcgtactgggtgcatacatatgaatacctagtcacgatttggaatttcgagcctaaaaataattgagattgagggagtgtttgattgggactaaaattttttagtctctgtcccatcggatgtttgacactaattagaagtattaaacgtaaactaatgataaaacccattccataaccctggattaattcgtgagacgagtctatttagcctagttaatccataattagcctatgtgatgctacagtaaacatgtgctaattatggactaattaggcttaaaaaattgtctcgtgaattagctcttatttatgtaattagttttgtaagtagtctatgtttaatactccaaattagtgttcaaacatccgatgtgatagggactaaagtttagtccctggatccaaacacaccttgagggcccctttgatttaaaggaaaaatataggaattttagaggatttcaatcctataggaaaatttcctatgaagccctttgaaacaaaggagtgaatcatatccaatcctttgaaattcctatggaatggacaatcctatagagattttggaggaaatttagcaagagcttcaacctcttgctaactttcctttgagtctatctctctcatctaattcctgtttttttttctgtggttcaatcaaacggtcattcctatgtttttcctgcgttttgcaatcctctgttttatacttacattcctatcaaaatcctacgttttttctattcctacgttttctcaatcttgcgattcaaaggggccctgaatggttttacgagagaagagataagagataatttgatccatatgtgtatcattcaaaggctagaaataattagggtgatgtggctcaatgagagaagagataaataacattaactacacttagtactaatgaactatataagtatataggattggattggtccaaacgagaagatgataataattctttattgatacctgtgttagtaatagttatggcttgtatattgggatggagagagtacctctttccatatgaaaggggtaaaaatttgtatttggatatgctacatgacactttcattattgaacatcggatggattgatttattgtatccaatgcaaataaaatacaaatttatccatgagacatgtttcttttttaacttgatcaggtctagttccaactagatttagaccaggggagtaagaatggttcaaatcagacctaatctccttacaagccgatggagcacacaagcaaaatggtactttccacgttatttctctcttcgtttataccaaatatcataagataacgtgtaaagtgtccagcagctaattacaatattttctgtatcattcatcgaatacgcgtttttaaatatcatgtagtaaatatcataaactttgagtatcttatagtaaattttgtaaaaaaaaaaacttatatagttgttggctagcggttgctcgtgtcgtctccttcctatcgtcgttgatgatgggctttgggcgccgcgttcctttcgcccgcccgtcgtccggccggtgcggtccggtccccgcgcgtggcgtcgtcgcgcgcgtaaatgctcgcagctcgcaagagctaaggcgaacacgcgtgctttgctcgagctcgtcgatactcgataggcgaggcgaccactgtgcgtgtgcgtgcccacctgcgttgcgccatagtacttgtattttccgcatgcgtccgtccacggtccatccacgtatggcctggccggcgcggctagctaccagctgcagctctcatgctcacacacgcatttccgattgggcctagcctctccattcatcaggtcaggatatgagcatttaagcacagctgttctaattagcctacggtcattgtaaatcatcttattatgtagtcccctatttcacaatgtaagtcattctagcattttccacatttatattaatgttaatgaatctaaacatatatatctatctagattcaataacatcaatatgtatgtgagaaatattagaatgacattctgaaacagaagaagtaacacgatggtaaaagtacgagacaaagggatatggtctatacatcaacaagccgatcgcctggtttctttcagtctacctacacctcaatctacatttttacggctaagattattttgagattcgtccaacaatcgtgtcctgataccctcttctctcttcccccgatctccaatcacactatcgccactcgcccatgagtcggcaacgcacggatgcgatttgtctatcctcctcaccaccttctacacgctagtgccatcaccacgagccccatcaactgttacctccctactcctctccatgcctccatagtcacatatcttcatcaactccaacgactttctcccaccctggttctcatctcttgtgtctgacggctcgcgtcactaaatccattggcatccctttcccttgccaccaacccctttatcttgtactccctccgtttcacaacgtaaattatttaagcatttcccacattcgtattgatgttaatgaatctagacatatatatctatctagatttattaacaacaatatgaatatagaaaatgttagaatgacttacattgtgtaacagaggaagtaactccgatggtgccatcacgttgcctcattgcccgccctgcatcttcatgtccactatccgccgccgtgctctagttctttgccacccaaaccattaccctaaagcggccattgttgcccccttgctcactcccatcaccaccaaccctaacaccaagatttcgcaagctagagtttagaaatcattgatattgagggcttgccaagaagaaagttagcgtgcaattaattgctaagccctcaccatcctcctccctctctcacgtctagctagaggctaaagacgttgcccaataataaaatctcagtcgactgatagtaaagacggtactacaagtaattaatgattggtcttaaatacctacggactatattattcattgtacctccttctttgcctctaagggtgtgtttagttcacgctaaaattggaagtttaattgaaattggaatgatgtgacggaaaagttggaaatttatgtgtgtagaaaagttttgatgtgatggaaaagttgaaagtttgaagaaaaaatttagaactaaactcggcctaaatcttgtgaattatatctattcagctagggcggagacatgggtaggacaactaggggcacataaccgtactccaaagtctggatgaccatgtcaatacattttaaaaatattacactactggaaaaaaaaacatttttactggaggccaaaacatatttttcaagcgtccataaccttcgcctgcaaccaaacacctgcaaaaattgattttcgcaggtggccaaatccaccctcatgcaaaaatatttttaacgtaaaaaaaaaaattggctgccatccagccctacccgccgccgcctcccctccggcgaccgccaccacgagctgtgccaccacaagggttttgggagagagggaggggaggggagctgcgccgccacgagctcaccgcgccagcccgccgccaccgccgaggggatgagaggggaggggaggaaaggggagggaagtcaccgtccggatctgggagtgggagcgctgccgccgaccttcggcctccgcctcctcgccgcctcagccaccgccctccccatgatgccgccagatccgcgaggggaggggagcgccgccgacgaccgccggcctccgctgctgcatgcagccgccgtcgccgtcctcccccacgatgcttctggatccgggatgggagggccgccagccggatctggaaggtgggagcgccgccgctgacctccgtcctcctccgccaccgacctccctcctccgtcgtccgccccgcgccgccggccaccaccggcctcccccctcccccctttggcaggatctgggagggaggggaggcgagccacaccgggggtgcaccgtccccgcctcgccatcgcggatcccaccgcccacatgcgttgccgtcgccggttcccgccgcccccgccgctaaacgcccgtgaggagaggagaggaaaggaggagaggtgaggccggctaagggagaggagagtgaggacttagaaaaaatctaagtgatgagtggtccatttatactccacacctattttcgcaggcagaccacataagaggtccgcctgcaaaaataaatggtatttttgcaggcggaccgcttaagggtccgcttgcaaaaatagattttcgtaggcagacaacgagcttcaccccagtttatatttttgaggcggtcattttactccgagggtcatgttcgcctgtgaaaataaaaccctcacgtctgtgaaaatgctttttctagttgtgttaaaaagaagagcacagcacgaaaatatgtaaaccacactaaactcatccctaggctcgaaaataaaatcggttgtgcccctgcgtcggagaggttcgtttggtcccaaatcaagtggccatggacagacgaccaattgttacttaactcgctagctactagtccgtcaatgggtctcgtgatgatgattgaccatagatgcacatccatgtagccatgtgtgacattctggttcaattagcatatgacatttgttgcttatagatgttatgtgtgtatgtttaataacacaatgctaattcagtaaggatggaatcaacttatataagtggttgtctctctagcactatatctctggggttaaccctttaatctaaagtgaaaatataagtgtaaatggggtattatatgtgtaagtgggggtgcctgtcaaatagagtggagtgcgcaattttggaggcttgggtgttacaccacgcgagtgacttaatttcgctcgcctttgctcttgtttctgtatgcacatttggaccggaatcgccggatgcatacttgcaatgcacacacggacacacctacgcgtacagacacaacaaactctcgcacatcatgtatatacgcgttctcgattatctgtttcttatacactgtagagcaaacaaacttcccccaagctgtatatgggacaattcatgcgaaactagtgtatatagacgcgcattcgcgcaacattaaccccctctatattgagctcctttacatgtttttaggattcatttgttctttttcttcaaataatcaaattgtaattaaatcattagagtatatttataaattaaatagtttttattaaatgacttgagtgttcatttacaatattacttattgttcgtgaagtgagcatagcttaatcgttaggttctagaacctacactcatattcaagttctagtactaagatttagtactgatactcgtatttatggccaattattctttcagcgatagtggatgtacccatttgcattgtgtttcttaaataaaatcttatttattgattaatactattattaataaatacatggactccaacataacatgtgcagtggctaataaattgtacataattaaaaaaatattgggaacatattgaatttatcatcttatatataatttttttgaatgttttagagaataaaatcattaggaggtctacttagaatgtaaaaatatttattttattctgatatgtaatgaatgaactatattagcacgacaacaaacttttattgcaattttatccaaaccttatattaatatgtaaaacgaagtttacataattttattaatatttgttatcatctttgtcgtagcataagtcgttgccttctcgccatctatgctacagcattacccttatccttcacttatttttcattagtgcacaagtattatagcatgtatacatttattttttgcgggtttattatgtatatttatatttgaatcgtacaaacctaatgattcattatgaacgatctggcatttagctgcctgtttgtaatagtaataattttttcgttgatataaccaagtctctgccgtgtatttttccctccttttatttgctctttattatgtcccatgtgtgaggaagccagggaggttctggtgttgtattggtatgctggaaagctcgagagaacgccctatcactatcaggttcctttactgatatgatcctacggctctctttaattttttcatcatcggatggcctgggatttttggcttacgtggacgtatcaggtgatccttttggatttagtaacattttaaccttcacttatagagatttccaccttagatctaactactttctacattcggttttctttttaactctttttttaggtggacaaccatagccaacagctatcttgtcaagcagccattaatcctctcctacttgtgcagttgtgcgtgctgtgcctgcctgaaacatgtcgattacggcccaattaagatattgttagctatctgggctttcgagctggaataacgaactacgtgggcttcagtttgccctcttgctcgacagcacgtataaagcccaaattaaaaaaaaaaagagagtacctatacatctttcgaaagatttttatgatcgtatcacacagatttttaatctttggattaaaatctgatagatataataaaaagcaaaaagcaattaagaaacatcataatggacactaaattaccatatcctcaagaaaaagaccaaatccaatacaaaatttaaaatttacatgcgaagattcaaaaattacagtgtaacttacaaaagttacagtgtaagtttcataaattacactgtaacttacaagaaaatgcactgtaaatttgagtgagaaaatcgagtgagagataaaaaaaatctttcgattgagatatagcaaaatcgaaaaaaaaatactacggcccataatgtgtcgtttgatattcttgattaaatctactcttttgatatgctcaattagtactactacagtattactataaaacctgcatgctaataactttctagcatccctgcaaaatattaattctagcagacaacactcaatgcatgtctgacagtgtagcacgcagggagattacaagattagtccctgcatgatgccaaaggtgatcatcatacgtcttcattggcaacaacaaatagggacgtgctaaccacctatttctatggcgtttctttgtttttttgtttcagttgcagcgcaagctgtttttgatgtgtcctctgaacctacctcaccaaccatggtgatcatcttctccaaagctgcagcagcagagcagagaacattcatgccatgttgaactgtaaatttactcttgggaattagttgcagactgcaaacaaatttgcatcacaaaagagtcgggtcgggtgttgattcgccattgctattagtcattctactcgtgcctactgcttactttctcgatcgatggaatcggtgattcatttggttgggcgttgttagtacaaaattgaattaacgaatatcaaatcaaataatgaaaatggagggagtaactagtggtagtaatttattcgaatgtatggaagatgcacacataattgcgagtggcccttttactcgtatcttagtgggttaattactcacaaaacaacaagtctattacattatccatccctgatttcttcgtaaaaatagaaaaaaaaatctgtccttggttggattgttgctgctacatgcatgcatggtcctttgacaacttgtcatatgacagatgcagagtcttactccaagcagatgaaaatggaatgaactcctcaacataaaattgacaactttcaaatcagcccagagagatcagatatcgtcaaacggatagaatcatagaagtgcattttacctaaaaaagttgatgttttccacctttttttcttttcaatattagtatgattgtactggtactggctgtttgcttggagtttggacttgcatttgtacaattaaattccaccggcaacttacaaaggacagaagaaacctcgaccgacacccagagaaatgaacaaattcatgggcccaacataattattctaaagttcgtggatacttagcttctcatcgtctgattattaatttatcagtatcaaccaaaaaaaataaatttagaggttattttgaggtttcatcgtaatttatttttcagcactataacttttaaaacactaagctttgttataaattattttttattttgcttcgctcctagagcaaccagcttattggcagataagtcacgaatttggaaattattcaaaaattttagacgataaaaaaccgcaaacatggtgtttctgggagtaaacagcatggtgttttgctccgtacttctccacttgtcagtgagtacttccttcagttccaaattcttgatgtcttgaaaaaaaaatcaacaagtacactacactgtctcactgacaggtgtgcccaggaggacactctaattaaacagcaccaaatcatttgaacggccatttatttttccagctcgctatagtacactcctataaacccaggtaacccagctactaatccctgacaaggtggccccactctctaccacctcagtgggccctcactcctctaccctcctcctcatcgtctcgactccaacgaatcttgagccctttcgccctctctctctctctcgcctccgccctcctcgcctttctcccccacctccacctcctccgctcccgaggcgagatctcgccgccgccgccattccccaatccgccccaaaacccccaccccccaaaccctccgatcgatccgagggaggagccaatcccgcgctcgaattcgttcgccccgaatcagccgctggatgcgtcgagctcgaggcggcggaattcaaatctgagctcgccgttggcgcggatccgacggggatggcgacggcggtgtcgaagtcggcggctaagccgcaccccaggtcgcccaccaccgcgcagccgccgaacaacggctccgcggcgggggcggcggcggggggcgggggcggtggagtgggtatggggcccgcgggggcgacgccgtcgaagaacgcggcgatggcggagctcaagtcgagggtgctcggggcgctcgcgaagctctccgacagggacacgcaccacatcgccgtcgaggacctcgaccgcatcatccgctcgctgccgtcgcccgacgccgtgcccatgctggtgcacgcgctggcgtcggactcgccgggcctcgcgtcccccgcgcggcgggagtcgctgcgcctcctcgccacgctctgcgcggcgcaccccgacgccgccgcgccctacctgcagaaggtgatggcgcacctcgcgcggaggctcaaggacaccaactcggactcctccgtgcgcgacgcgtgccgcgatgccgccggccagctctcggaggtgtacctccgacccctggcggcctcggctgccgctgaagcgggcaatgcgactgtcacactgttcgtgaagccactgtttgaggcgatgggggagcagagcaaggcagtgcagggtggggcggcggcctgcctggcaaagacggtggagggcgcggggcctggacctggcgtggtagggatgtttgggaagattggtccgagggtttgcaaattgcttggtggacagggagtacaggctaaaggggcacttctcaccatcatcgggagcttgtctcaggttgggattgcgcgatatttttctttatgcatgcaatatgttcgatgaattgacttgacagatgccaggtggtagaaatttgtggtagacattactaaattgattatttttcatggacatttagttttctgtctgaatatgggaaatgttatcataaattgtggccaaggggtaggaattgtttttgtgataagtgatgtttggtgctgccgctgcggtcgaatgtagttcatcatgtaatcagttttggatgttgcctatatgtcttgctgacaactatatggttggaaattgttcgtgttgtgaagaatggtgagttatcattgagacaagggtttgatattttcaatcattattacaatgtgccattttgttttgcacctctgaatttatggatggttaggacttaggagtttagtatttgatatcctaccattgggtacataagactgttgttacttttgtgtggtgtttggccccatgaacaatggatagtaccacagcattgtgatttaatgtttagataagcgaataattaaccttttgctttgcctctggtagccttttattctttttagtacttcagttgaaacattgaactgaaacatacattgatgctctaagcgaatgtgtctcctaacacatgctttgaatggtactattgggaatactgtgccaagcattactgtgcgatacatatcttataaatctctgcaatgacataacatcagattcactagctctccttgtttgaataattgttgatatatttcttgtcaggttggagcaatcagtcctcagaatatgcctcaaacattgcaaagcattcgtgactgtctcgagaacagtgattgggctactagaaaagctgcagctgatacattgtgtgtcctggccacatattcaggccgattgataggtgatggaacagctccaacaatagctgctcttgaagcttgtcgcttcgataaggtaactaaaactttaactcactcaacccaaactgaaggatctgttgctcttccatggatccttttcagatgatgacaagtcattgttacatgcattatgttgcattaagttgttcttgtcaatccttttcaggtaaaacctgtcagagatagcatggctgatgcagtgcagctatggaaaaaaatggcaggagatgattcgaacggtatcaatttgttttttagtttaaaagtgcatgatgttatttaggattttattactctatgcttattgcaacataatttcattcaacagatggtaaaaataaggaatcagctgataatgaagggaaaatggattcacctaataacaatgacaaagtgaagggcagtagcatggctgaaaaagcagcagttctcttaaagaaaagacctacattaaccgatagggaattgaaccctgaattttttcaaaagctcgagacaagaatcacagatgaattagctgttgaggtggttgtaccccgcaaaactttacaatctcatttacaaagtgaagaggaaccagaagatgcagatggcgatcctgttggtccagctaacagcaatggatcagcagatgatgaagcaaatttgactcaactgcgttctagctctaattttcaaaatattcgagatagatgggctggccagagaggaagtagaaacaaagatgcaaaggttagggcatctgatgttgaagataggaatgaatctagtgcaaaagattctgcttcagcagcaatgaatgttcctggagaagggccttccttaaataataaaacaaactggttggcgatacagaggcagttgtcccacttggatagacagcagactagtctaatgaacatgctgcaggttagtgccatgtttatttattcccgtgaagaaattgttggaatttcttttttttgtttttctgttaagaaataattcttgaggagaaatgtccaggatatcacactttttttatgtcctaattggtaacatcagttttttttcttcttctgaatatgtaactatctgctaatgagatttgtcactgcttgctatgctttctgagattatattgtcatgtgttatgtttgtcttagtgatgtgctgctaggcatcttttggtgtcagcaatttcatgttgtcttctaaaagaaagtagtgctacgatattacacagtagcccaaataaagtgagcttacattatttagaacaaaacattatgttggctttagaagggatgttagtaggtagtagctttgatgtctatgtaatgttgtacattgctaaagtctacaaaaaagtactttattgatggtttatcaccgtttcttagtttgggtttgaaacagaaaatttcctgctttgttttgttgtacatgaaccttttttccagtaattcacaaatgtgatccgttgtgatgtactgatgtatgccatctctgaggacatggtttttagttaattgggtgtctgtgggctaactacctaatatcacttctttttttaatacaattttcaggatttcatgggaggatctcatgacagtatggttactttagagaaccgagtgcgtggtcttgagagagttgttgaggaaatggccagggatatatcactatcatcaggcaggagaggtggtggccccatgctgggctttgattcatctcctggtagatcatctatgaaatacaatggttttcatgaatattctaattcaaaatttgggagggatcgtgatggacgggtgggatttgcagaaaggtacttttctggagatggtatgtcttctggtgtaagaagctctgaaccatgggactcgtatgcttattctggatcaagaagtggtatgaatgccaggagagggttggactctgtttcatctgataacagggtgcctagaaatgaacgaagcaatgatcaagcaggacctaggcgaggatgggacaaaggacagggtccatttaggtttggggagggtccttctgctcgaagtgcatggcgagcctccaaagatgaagcgacactggaagctattagggttgctggtgaagataatggaacttctagggcagctgcgagagttgctatccgtgaattggatggggaaactttgaatgatgataatcaaggggatgaaagaggaccaatttgggagtcttggactcgtgcaatggatgcgatacatgttggtgatatggattcggcttatgctgaggttctttcaactggggatgctgaattacttgtaaaattaatggagcaaactggaccagtagttgatcaactttcaaatgaagttgcaaacgaagtcctacatgctgttggacaatttcttgtggaagaaagcttctatgatatagctttgagctggcttcagcaggtaaagtagtatgttccattgtaggaatataaaagttctgaagagacaggtgtttactctgacaacaatatcatggaaaatgttaacctgtgttcagactaaaactggtgttgatataataaaaatgacattctgtgttaaaagagtagaatgctctaaattgcttaggaatggatttaaacatattttgacagttgcatgctattttagcactactgctctggttccccttcctggttcaaagccagccattcatgatacatatgattagcattgcatttgcaaataggattatctgtagcatgtgatggtgatcggaagttttgtaaggctgaaaacatctgatactgataccgggtgtttcttcaatttccaatttctgcttagtatactcgccagttttcagacagtgtttgtgtctatagttttacacattccttgcattatcatttggctccactcttgatttgtgagttcaatttggtttcgtcccttataattcagcaaacaaaaaagagctttgaaaggttttgagttattaaagaatgctattttctttagtaacaagaatggagaaacaaggaatggcaaccacaataaattaatttttcattagctatatgcttatccaattgaagtaactgaagcactcttaagatgtcttggtaaaaaagtccatttggatggagactagaattttgactgatttacgcttggtcctttgccctctcaaacagaatcctggcttttcatttggtctagaatgaaggcctctcacttttactggattgctacaaggttgaagaaaaaatgattgtgaagtatgtgaaggatatttgatgctatcttcaatgatcaaatggccttctgtttgttggatagttgtttatgttctttgtttgctcaacaataccaataataattaaggttctgtctggacagcaggtatgcactggcatgcttgtgaaactaaacagttgcttcaatattgaaaaccaatgcaatactgtcatggtgcaacttatgttatgtccagacatacagaataagttagtaagttgtcagatgatggttataaactatagacttttgaatataggagttatgttgctctaacaaaaagtttgaaagaacgcgtagctgtcttttttctttttttggaagttagaaagggaggtagacttcttttattgaacagaatatgatgtactctccgtgctccagttgtttgtatagagatgttaaaacctttgtttggtccatgcatttattgttttgtttttggggataggaaaggagtattactttgaagtacatacccaagtgctgaatatcttgattgttgttgcagttgactgatctggtaatggacaacggatccggttatcttggaatccccctagatgcgaagaacgacctcttactgggattacacgaagctactgccattgagttgcctgatgattgggagggggcgacgccggttcagataatgaagcagctagcttcatcatggcggattgatctgcagcagcttatcagttagggccatcggttgttgacatgagttaatttcatttgttcatttctgcctattttttctctatatatcttgctattagggctataagtattaggtttgacagaacctttgagtggaactgtgttgacatggattggtgttgtacggggaaatatgatgttgatattgtttacctcataacctgtgttggctttcctatttataatttggaggatctcaatttttacattttttactggctcaatttatagttttattatgcatcttgaactcttaagacaccggttgggctgataaacctaacgcacaatgaacagacaaaattgtaatttggacatgaatagattgtacattgcttttgttctttcacctaaaggacagaggctggcaggcagcaggagattaaagatatcctgtcgagcttaatgcaggccgacaataatttgttagggaagacaaaacttatcccagatgatggttgcagacagagatagccattgatcaatttgaagatggattgatatggaaatcttaaagcacgaggtattaatttcatgctacagtcaaaatattttccagggttaatttcctgctgcagttcaatctttttagtgttctcaaccctcaggtaatctactgctgcgcgtggtgaatctgcgctttgttatggctgattgtgatatcgactcgaaacgatgtggtcagcatggaagcgttttgctgaatctgaaaaactgatgtggatgatgttgaacagcgagcctcaagctaccgtggtccgtggttatcaaaattctcccttcttggaaattgttgatgaacagcaagtctaacaagatagagaattactactatatttatcattcaggagttgaactcgtcgcagcggagaggagcaatgtggtcgagctcgacggggagcccgttggccggcgacggcagcgggtccctgacgaaggtgttctcctcccccccgcagcagagcctccacctgaagtgcctcaccaggtagtgcatcgtcaccagcgtctccaccctcgcgagctccatcccggggcagatcctcggcccgccgccgaacgccacgaacgagtacggcggcggcgccgacgccgccgcctgggcgtcgaaccgcgacgggtcgaacttgtccgggtcgtggtagatggccgggtccatgtgcgtcacgcacggcgcccagaacacctgccaccctttcgggatgacgtagccgccgtcgagctcgacgtcctcgagggccctcctgaagctgccgaacaccgggggcaccatgcggagcgtctcctgcgcgacgcgccatgtcagcttcatcctcgccacgtcctcccatgtcagcgcctcgccgtctcgcttgctcctcgcgatctcctcgtgctctggccatggcgttgtcagagggattcgatcttggcaaatggaaatggtgatgtgatgtgtgagttacttgccttggaccatggcggcgaggatggcagggtcgtcggcgaggtggcggaccatgaaggtcaagaggatggcggaggtgtcgtggccggcggtgaggcagacgatggagttgtcgatgatctcctcctcggtgagcagcggccggccgccgccgccgtcgccgtctcggaggctgacgaggtagctgatgaggtcgtccgatggagacgactcgccctgctccaggttggccttcttctccctcaccgtcgccgcgagcagccggcgagccctcgcgctcgccctgaggctccggcggaacgcggtgaacggcaggtcgagcggcaccgcccacaggccctccagcatgtcggcgaacgcggcggcgagccgctcccggacggcgccgcgcgcgagcccgaacagcagggtggcgatgacgtcgagcgtcagcagcttcatcagcggcagcaccgcgacggtgcggcgcccggcccaccgcccggcgaggtggcgcctgacctcgccgtcgatcctgcccacgtaccgccgcagcatctccggcctcaggaactgcgccagcgcgccgcgcacgcggcggtggtcgtcgccgacgagctccagcatgttcctcctcccgatgatcgccgcgaggctccgcggctgcttgggcgccagcgcctcgctgaggaacaccgccttgttcgccgccgggccggcgaggagcaccgtcggcgcgccgaacagcgacagcttcgacacgggcccgtacctgtcgatcctgccctgcagccaccgctcggcggtgttgcgacgcatggcacgcagcagggacaggctctggccgaccagcggcaggccgagggatcccggcggcaggttgcgccgcggcggcggcttcgtcctcgtcgatcttccggccaggtagacggccagcggcgtgaggaaggcgacgaggagcgcgacgacgacgacggcgagtgccattgcagcgatggctaactgggacgatgagtgtgaaagggtttatgtgttgagacttgagagagaccgacagaatggcatccgcatacttctttcgtaacggggtgacaggaatctgatttaagccgctttcatatgtaattaacaactatgtcaaagtagaattgtttgcagtttttttatttgacattcatattttagcagctggacccaagctaataggaaccgtgttacgacgtcccattggcatggtgggagatgctagccaaaaaaaaaaaagatgcgcctaagaaatgcttgcgtaccttgatcctactggttatttgggagatctggaatggagagaacttcaaacaaaagaagacttcggcccctggccctaggttgttcaacaaaataatggaagaaacatgaacttggaccctagctggtgttaaaaagctagtgagtttcatctctgtacaactttacttttttctaaccctaggggttgtatttttctcccattttatttaatgatagcacagtctcgtgctgattccaatcaaattttaccttaaaaaagacaaaatttgctacaggacataaaaaaaatgtgtaattagctaagggacaccacaagatcgtgaaacgactgagaaacacttaaaaaaatgtgtaatttgttgttagacactttcatcattattttatcatttttgggctagatggaaagagaaacaattcaaaaggaccagattgctcttggggctagattatttgtagcgtcggtgtcgtcgtcatcgatgcgcgtcgctgcgtgtcgttgccaccacggttgatgcgcattgctgccgcagctaatgcacgccactctctgcgcgcccgatgcgtgtcgccaccgccaccaagacacgccatagcagatgtgcgccgcaggcccgcaaccataatcgatgtggtgagaggagaggagctgagaggagacgagtgtgaatgcgtgatgcggcgtaaatgttttgggatgcggcgtcgaagaggagaggaagtgggattagggtagattgcctattgggttgtgatgggctgggagacctgggctaggaaaagctatgtgtgaggctaggccacacgagtagggctgggccacgagtggttaggaaaatctaaaaaaattataagtactagtcaactaatttttttctcacgagtagggctcaggcccaagctgccctagacccagttccgccctaactccctcatcgtttcttttattaaaaatacatcatattattaaagcattttgcatcctaaatacaactatattacttagactaaccaaaacataaaagtttttattggtgaaagataaagttgtaggggtcaagtgtcaaattataagagtgcgtgcttggtctgtcacgttcacgtcacacgtgggtgtacaattcatctaatcacttctctactattataaaagatgtttttgccagtcctttggtacatcatctgtgtttgagtcagtttttaagtccattcgctttacatatccgtatttgattcggtttttttaagatcgttcgcttttagaaatacaaaaaaagttttataagaaatatctttaaacaaacttgcatgataatttgagacgatcagactcctaattgcagcttatgattttgtaaaaaaaatttctttcactcgttgcaacccacgaatatttttttttctagtaataaagattcggtcgtacgcagaaaacaagtttttaatagtgatgggttgggaagggagagccgcagatcgagtcctgtctctctcagccaacaccgatttctacttcacgtgggctgtgcccgagcttattgggagagtactttgtttaaagggacacgtttttcaaaccattaaaggatgtgtcctttaaaaaattgaaataaagtcatttctaaaattagaataactgatcatacgcaaatcaccaatctcttcctcgtttttgtctgtggtttacaaattccctctgtttcgactgaagcctaattcttgtttcatgctaaaaaaattaagagaaaattgagagaggtgaggatattgtttgtgaaaaaaaagtcaaattttgctataggacatgcaaaaaaaacgtgtaattggccataggacaccggttgtatttattatttatggatcaaaataggtgagatatttttctaaatacccggattgccccttatctttcc

SEQ ID NO: 5582 - DNA, 9003 bp, Oryza sativa
ttcagaaaaggagtcggcaccaacccttgattgatttgattgcttgtatttcatagaaaaatagatttttctatacaagtttcatcaccaactaaggttaggtcccaacgtgtctatacactagagatcaaaatgtatacactgcaagatgtagtccaatgtagagtatacattgtgattatcttggcaaccactacctacaagtgttgggaactgattgaattcggttattaaaaaaatcaactgcatccgtccagttaagaaatcaaattgtagcaccggttgctagatttttatcttagagaaattttattgcccttggtagttaccggggtactccctctagtaaaaaaaaagtttatgataaggttcagtcaaattttaaaatcccaataatcaatataagttcatattattatgagaaatataatttctttttgacgcagaactacatatatcatttctttcgttttcaaactaagtgtttgagaaattattgatggttaggaattttaaaggtttgcatgaatctttctctaggagtaaaatatttttgaccaaaggaaataatatattctctaacataaaactacctttttaccaactagttatacacacacaacaatgtgtctatatatcatcccactttcctcttgttttttgacttatcttgcacgataacatcatcaaaaattacacgtgaaggttcgttactcctacacggcatgcaggcgacaaaagtatatatggtctagttggtcacaaaaaccaattcgtgaatcgtgatgaggtgtgcttaaggcgatccaaagaaatctttttcttgtgcaaggtgcgcagcacacactggtccaaacctctgaacaataaattattaggagacaactaagtggcaaaagatttatactagcggccgaccttgtgaaagttgcaatgggacaccagctttaattagctttaatttttttctcttggcttgatttggttaatttgctttgctccaagtagtgtggcccattgccgattaagcaatgaataggtgaaaccaaattgcattagcaaacccccttttgtggtggccatgcatgatcatcacttgctatcacgtaatgctcatgctgtttcttcttgtttggattattgttgctgatagggtgcatgatgtggtttctgatgtgaacaataatcaggggcaataagaacaatgacttaaaatccttacgaatatgttctttgtgatccacaattttattattatatggtgtaacaaggattttagatttgtaagctgtaaaatctgtttgataaaatcaaattttggccaaaaaaaacagatatccagatattcccgtaggcagtgtttaagcgtttatttcacctgttgatatacttatatattgacatgtttgtacatatctcccgagcaaatcgaactatttagggtcagttcggttcctgccttactacaatataaattaattaggagagttaattttttgtttattgaataaagcaaagtgtggacgtatcatgccacctttttgccatgttatatacgcatgtgagattaacaatgggccaacttgacatatattttcccattaaatcttgtaattacaaaaaaaaaagatggtatacaaattaagtggcaagccacacggttgtagccatgattagtttacataagcataattttcatagatagcggtgctaaacatgatgggctatcaaaacattgtgtatttttatggtggttaattcttaatgctgatagataggatgaatcattggtttgcacagcaatctatatatgtgttgtgcatgatcttgatagggggcatgactagtttctttatccaattgtcaggacataaatagcgatgtgcttcaagggaaggcaaaggagaaaaaggtaatctttttttgtgtttgtggtttgtgatcccacttgtgtatacttttgctcctctttaggtagtggtagggctgtcaagcaagttaattaagtatttctgaaaagtggaagataccattcaagtttgttaatttgttcttgttggttatcatcagtttatacttaatagattaaaatactgcagcccatggttagtgcattatagttatgcatgcatgctgctcctgaaagagacttgaagaaaaaagagaggatcaggaaatttatttgtttttaatccttaaaacttgacttctgaccatatcaaatatgcatcgtgatatatagctggtcatttcttgtttcaatatttgtagggaggatatagaaattaaatatcagctcaactgaatcattcagccatgcataaagaaacttgttggtatagctattggtttcttgcagtcttcataatttaatgaactgattttttttcagtttaatgtggtgccatcctattgatcaatagtatccatctcatgaagcctacagacactaactgcctaactgtctaagtaggcaagaatagaacaagtcgtccacacttgtctgcatcctttttctccatctttcttttttttgatatctggtggttgcaacatcaattactactcatcacataaaaccaaaccctacaagatttttaacatgagtcctgcaagaaaacaaaagatttttcaagccaatcaagaaacaaattctttcagacagggtggtaggtgtggacattcagatcttgattgagtgtacaccttaattgcacctgtcctaaaactgtttaatccttcttgtttaccttatcacacagagcagtactgcagtactagtccaaaacaaagggcatcaatgctttgtccttagaagcatattttttatgaatcagtaaagggaactaattaaagatgtaatccttccctagtcttgatcaaagatcttattctttgtgattgattgacagggtcattccacctaaattttaacagaattaatcgaatcattcatacaggtcggttgcgttaatattctaggcttcattagaaggatattattgatcaataggatggaaccatattaaaactagaaaaactagatccttggtttagaagactgaaagagaacaacatatggcttttttatatacatagctaatttagtaagattaattgaaaacgcaaaaggtcgtcagaaatttgacttgaggggatattaaatttgggagattagcgaagcttaacttcatttgtcaatgtgcgtacataactgaagcagatatgtcaaccaaagagatggaaaagtccagcaggatcgagcaatcaattttcaggtttaatggattatatattcaggacattttcgtgagataggcgccagttttggggtctatttatatatatatatatatggtttcatacatttccactaaataagttaggtacggcattgttatttctccgaaataggctctttcaaaatagagcaattttacggtccttaagaaggtaccatgaggtaccacttttttctattgtaaatttggtacctcttgatatctatgtactattaggtaccaaattttacactgaatttttttttgtaccttatggtacctcctgaaggaccgtagaattgctcatggtcctcattgctcccatgttacctatttaaagaaagttaatttttgttagaaaaataagttattctaacccaaacatggaataaactttacagttcatatttttttccaaaaaaaatacatgtgaaaatattcaaacttgggtaaaataaaaccaaaccaaatataccattagaactgtagttaaataaacttaaattacaaattaagcaccatggttttaggcttgacattgtgtagtttttggtgaatgaaaatctacaaacctttcaagcacctgaaatacaacaaaatccctgaagaaatagttgcaagagtttccatttggaagagccttgatcgatccctcctacccacgcacacatcacaggtccacaagaccacaacatacacggtttgcgttatgccctgtgcggcaatgtcactgtgcgattagctggactgatcacgtctcccaataataagccgtacgccggctctggcctaaccagaaccacactagaacaggattagcaactttagcatgcagcagctgccaatttgccactgacgcctctcccgtccatctttttccccgtgtaccacttctccgtccgtatgcatgcgcgaccatctccagactccacagctcacgagatgcctgccttttgctccctgcagctgcagctgcaggccacaatagcccaagagtgacaccaccacatgaccgcaacaacaattgccgcctcgcctgcgaaagccaccaagagctagtagcgataaaacagcacaagcttaccatgtcatgccaccgcgtaatccgtgtacacgtacgttgtagtaagagcaagtttaatagtatagctccactactagctccaaatcatctataaccaatgtaatagtcaattcataccatagttgcttgctatactattaatatctggtcccacctgtcatacacacgttacgtcttgaagttcgtgctgcagctggctacaaatctaatatatttatagctgacttatagcctgctattgtacgtgctctaatagcttaaccgagaaatgtggcgccgatctatcgccagagagacccaaggcgaaattaaacgtaacagcgacgacgcgccctgaaactgaaagtacgtacgttgcgttccaagatgcattttgccatggtcgatcggaatttcttctccttaattttggctgtgcctgtctgtctcagcctcagggggacgctcaaaaaggtcacacggttttctttttcccttttttttttcgttttgttttttgttttctgggggaagataaaaaaaatggatggaatcttcggctaagggaagttggtgggtaccagaaaaactaacgcggttctacgtagcataatgcgcaaggcactcggttcacggtaatctgtattgggcgtagcttaagaaaataggtcccctaggccatatcgacgatgggtacatatcattgtttaggtgacaaaacaccggcgcgtacgaagcccccgtcgaatggcagccaaataaaaaactaaaattaaaaattacaaacttaattataagattcattttgagatattttcaacctagcttttttcgttggtttttaagtaaaaaaagcacgtatttaaaagttttacctgtaaatttaatttttattctctaataaaccgttttgggtttattagggaaaaggcgaaacaacatggcctcgagacggcatggagaattcgcgtgtgtcgtctcgtcgtcccagcggagacgcttccgtttaccggttcgctctcgaggaggaaagggaattagctgggacgacacgggtgtttttattacaaaccgtccttgcccgtgtccgtgagaagggggaggaacgacatgcagggaggcggtactactgtcccgtggtagacaatctgaaatctgggttaattgtttatttgttcgttcgtagctagtatattagctctttttctaagggtgtatttgaaactatgtgtggagattatgggtaccctatacccacacggcatagttatccgactggttatatggtataacttatagagaaaattcgatctatagcacaggaaaaaacccggtaccaaaatatagcagaacaaattttctacttcgactaaaagcatagggcacaaattttcttgcgattcataccacttccgtcacatttgccatccaaacatgtgagttgacatgaaaaaaaaactcatttgcccctcttccctccgctagcgctcttctcactcggcgacgttgccgcgcccgtgtcgccgacgctcggtgagctgacggagccgcgcttcccgcccgcccgctcgctcagccgcttccgatcggcgctcgtcaccacgcttcccaccgttgcccgcgccagatccgtcgcaccaccactggatttgtgcgcgtggggtggagcaccggccagatccgcatggggaggaaggcggtggaggaggaggtggagacgccgcgcttctggcccgccagctcatggccgcctactcggcggcggcggcaccgcccgaggtcatggagctgacaaagcccgccgcccgcccgctcgcgaatcatcccaacatccgccagcgcgcgccgcagcccgcctgcataagcggcaggtcatcgtccctgtcgccgttgtcgtcatcgccggcgtccccgttgttgttgtcgttgtcacgtgcaagcagcggcaagccagcgcggcgtggcgtcgtggcaagggagatgctgttctgcggcaccgagtacggccaccacgggccacatccatccacgccgaagctagggccgcccacgtcatcgtcgttgtcctcgtcgtcaagctgccgccggcgcgggaggctcgccctctatcagcaacgccgagtgccagacggggtccacctcgccgtcggcggcgacggcgagccacgcacccacgtcgttgaagagcgtgtgtagctcgctcgacggtggcggggagacgaggcggtcggcggtcgccaggcacgccgatggccgccacgccgccatccacgagggggcggaagaggagacctggtggggaacgtggggaacgaagggcaaatgtgtccgacaaaaattttctccactccgatctaacaccgttacttcaaaatgtgacggaagtactatagggcgaagaaaaatcggtggcctatgctatggatcgaaagtggaaattttttgtgctattttttggtaccgctttttttcctgtgctatggatcgaattttctctaacttatatttatagaatatgtaacggataatgacttaggtattacgtttccttctatattatggaatggcctaaagtcctggtttgataatattgtagagtagatttagaaaaccgataccgtattggttaagatttctatcttgtaatcatgtcccccccatcctatataaggtgggcaggagaccctctagaggcatgagacacaactagatcgtcagatctataatacacccggcagatttaaatccccaaacaggagtagggtatcacctctcattgagagggcctgaacctgtctaaatcctttgtctccgcatccatccacttttaagtctcgtgcgctacccctttatattgctgaaatattgtttcgacactatgggttaggagaagattgaaaagacatgtaaaacgagataagtcattagcacatgataattaattaagcattatttcttttaaatttcaaaatatattaatatgattttgttaaagcaactgttttataacaaattttgaaaaagaacaccgtttaaccgttcaacaaaagtaggaggaaaaacaagacaaatttcctctcaatttgttgcttccgaatgtagttacttgcattttttttttagaatgaacaatactggagtacttgcatttgaataaggactagggctctaataagtccatgagcttggacaccgtacctctttatcatagtaaatccagcgcaacacaaaataggctaggtcccgcctctgctcataagtcttgactagaatgaatggatgaaattaacattcaagaccaagatcacaaaggccgtcccttctttagtcgattgatgaatatataatataaacatcgatggcacatcttataaatagaaagaatctattacatgccactggctttgtcacatgtctacgatttgccactgactttgtcacgttctacaatatgctatcgacttttgtttaacttctacgatttaccatcgccgtccggttagtctccgttagtactgtacaaatttgtcgaaatgaccaaaatacccctgggacaaaacctttcaaaatttggataaaaattcgaaaatatcatattttaagtttttggctaaattttggatgtttacaatcttatgtttataatatgttattttgataattttatctaaattttggaagtttttgtcctaggggtattttggtcatttggacaaaattgtacagtgctaacagatgctaaccggacggtgatggtaaatcttataagttaagcaaaagtcgatggcatattatagaacgtgaaaaagtcagtggcaaatcatagacgtgtgacaaagttagtggcatataatagattctctcttataaatacgatagcaatatgcagagaaagggggtacgtacgtacgagtacgacttccaactttgtttcaaagtcgtcgatgacgacggccactgcccactagcagggccaagtggtacacacacatatatcgttcgtgcattcgtgcgatatcgccaccgggtccatccgtgcatttgcctcaaaaccccacacacacaagcttcacagtaaccatgcacaattgagcgcatcacttcagggcagtacgtagcaaccggcatagccagaaacaagtcacataggttcatctgtattcagtcactagctgaaagactaggctgaaacaaggttcacaatcccaacgaaaaccagacttctcgaaccggtttgcaataccacaaaccactcggttttttcgtcaatttgtttttttaagaaacaataaaattattcaaattttatcagtttttaccggtttgctaacggttttcatgaaaaatggaaatattgaccgtgagttcttttcagtccgataagaggctttcacagcacacatacttatcgtttagctccaacctgccacattaaagatttcacgctatatctgtctcttctattaccaagtgaagaacgtgaagccaagtaagacatgtgttcctcgttaggattcgccagggcggggcaaggaatggctcatgttgcatgttgggagaggcttagctccatgtgacgcccctataccatgtgcgggttggcaacgatgagccacttgtattatgagaaaagcggattttagacttatgactccagtt

SEQ ID NO: 5583 - DNA, 22555 bp, Oryza sativa
aaaggagccttcacgttcgctctcatgatctagaaattctcacattaatcggagaaaaagaaaaagcagaatctatatagaaatacaatttagaaatagctgaaattcggaattaaaaaaaagaaatattaaaagaggagactagagtccatatagaaatacaatttagaaatagttgaaattcggaattaaaaaataaggaatattagaagtggagactagagtccatatagaaatacaattaggaaataactgaaattcgaaattaaaaataaggaatattagaagtagagtatagagtacatatagaaatacaattaggaaataaccgaaatttggaattaaaaataagaaatattagaagtagagtatagagtccttatagaaatacaattaagaaaaaaaatagaaatttggaattaaaaaataaggaatattagaagtagaatatagagttcatattggaatttaaaaccaactaaaattcggaataaaaaggagctttcaggttcgctctcatggcatagaaattctcacattaatcagagaaaaagaaaaaacagagtccatatagaaatacaatttagaaatagctgaaattcagaattaaaaaataagaaatattagaagaggagactagagtagttattacacattagtagttttgaaaagttattgcaaaatttaaaattatgttgtcattgtaatatattataataatataatgagaaaacatatatgctattatatgagagaaaatataatgatgctagccgcgcaatatgcgcaggccaccatgctagttattataaaccgaataaatagcttagaacgagccaggcaatgctgatgtagaaaatttctagtttgagaacagtggtatgcatatcccgaagttcataagctgaaaagattgcaccctaaatctaatgtattgtaattttcctgtactgaaaatgctgagggggggactacaaggagccaagccgaggcccgtcaccgccctcacggacgacacgtcgccagacagcaccgctagcgactgccctccgcggccaaggagcacgaccgctccttcgccgggaacagcacaccgtcgccgggacacacgccgccgcaccgcctccaccacgccccatcgcgccaccgcgcacggcattgttgctctcctccggccaggtccaaaagcagggtgccagatccagccacgggggcgccagatccgaagcttcgcgccgcgctgatgtcagcccccacctatcacgcgccgcgtcatcatcctcacgctgagccgtcgcgtcgccgaggaatggcctcgccgccgccctcacagttggccgcgcggaactccggtggcgcgctccggcggcggcgaggggggagaggaagggagggggcggcgggggctagggttcaccccctgtgccgctcgcgtgagagggcgacgcgggggtcgtgccggcttcgtactcttccaattgaggataagatgaactgatgtgataagtagtacgggattgtacttattttaaaacaaaatttgaatataaaatcatacttattttagaaggattgtagtatttggacttgggagtaattttactgttcttggtattagaaggtaccatttcttttatataaaacttggtatttctcgaggtataaaaaacatacggttaggaccgtaacgaactgtgttagctgtaggtttgcatctgttcccaaggtgatttaatttgagcaattgcaaatagctttttcttctttcactcggcagctgaatcttgcttggtggagtactcgggccgtgcacgttcatccacgggtttgatttgacattggtcatgagcgcgttttagtggacaaagtggtggttagcatagtgaaattgtcaacgcgagaagcagaaaccaattgctgttgctgtcgccggtaccaatactgtatggtgttcctgttccatcagaattcagtcgagtgcatggcagctcattcttgtggcccatcacacaattaatctccgacgatgtactgtacgtagtggagcatttagattagtaattctcgaatacattttcgtaagggttaagtgggcatatgtaacgtgttcactccttgttactatctctgttttcagatgagtgacatcatcagcatagtccgcaatacacattttatcatcataacaattttacactataaaaaacgatttttcgtgatgttaccctatattttacgctggcgtccatatgcaaaaaccgccaaaaaaacataacaataggtggggggctacggaccaccagcagaaaccaatttttgctgataaccacgctaagagaaatgcctaaaaaaactactctatttttcgagacgaacctcttaagtgtctgccagtttttcgaggcggacctcttaagtgtccgccagcgaaaaatctcattttcaccggcagtaggtaaggaggaccactgcgaaaaatgttttgggcgaatatataaatctactgtcccccacccccaccgctcccttctcccttcccccactgcgcggcccctccgccgcctctcttccttctctctcggtttcaccttcttcctcccttctccaccgccgccggctgccgtcgcctctaccgcctctccgcggtggtggggcgtggcctcctcctctccaccgctagccgccataagctcggggccggattcggccgctgcgacgatggtggaggccggatctgccgccgcgacgacgggggaggctagatccgtcgccgcgaccgccgcagggccactagtctctaaagactaaactatatatttaaaaaaacattaccaatataactttatgaaagagagtttctcataaaaaaaaatataccaatataacttttcatattttaaatatttttacgtctattaaatttttaaggtttcaagatttgactgcacttacaggagatactactatacaagaatcaacgagaaacgaatttttaagttgcgataaactggtagtagtaagattttgtgaacaaggataatgcatatctgtgtaaaaaaaatatatagtgcaaatcacatatacattgaaaatctagaaactattgtcacgagtaaaatttttaccaaccaaacggccacaatgtcgcgcagggcttatccggggcactactgcccatgggctgaaagtgcggccacaagcccacaatatcttgcggggcttagccggggcaccacggcccatgggctctatctccctcaccagtaaagccctagcctccaagaccgcacccgtataaagctgcagacctctctctccttctcctcccccgccaccgccgctcgcctccgaaaccctagccgccccctccccgcggccgcgaaaatggtacgcttctccctcctcctcctcctcctcctcctcccctccgccgcacgacgggaagatcgcacgcgtgcttgtcctcgtgccagtccacggctccgcgcgcgccgtctttctcatggtctttctcgatgggtaggatgcgttctttattcatgttgatctgccgtagatggggggatcttgagccggaggagtagctagtttctttgattatgcgttttggggtctagcggattttaacatgagatggtttctctttagcgacatttttttttgttcatgttgatgtccacggtgattgttctagttatgtcatttttatcttcaagacttaaatgctttgaatcgccggtatagaccagattattgtcgtgaagatcgacgtattttccgagctgaccctctgcatgctgaaaattttgtagtgggttatatctagattatatgtgtattgttgtcattcaattagcacttaaacttctgtagcatgaacattttcatcattttcctgtgaggacatcggatgagttcctttttttttctcttcttgttctaaaattgttcggtaatcttgtctggctttgactgatgggctccaatgatggcatgaaatctttgagacctgacattcttgtgatgacaaacataagcatatttcctgagacccaattgaggttttaaccattggtttgctgaatgtgtcttcactgttgaaaaatttgtacacacatttgcttcaaattatgcacatttgattattgtttataggcctgcgatgtccattccacattcagtatttgttaagctgagtgcttttgtttcaaatttgttttgtataggtgaacgttcccaagaccaagaagacctactgcaagaacaaggagtgcaggaagcacacccttcacaaggtcactcagtacaagaagggtaaggacagcctgtctgcccagggaaagcgccgttatgaccgaaagcagtcaggatatggtggtcagaccaagcctgttttccacaagaaggtactgtgacagtttatatatgattatgcagtgttgtgtgtgactctctgttcattagaaacgtacggtgtcatgattgatgtagcagtgatatgtgtctgtacaatgcatgtggcaataaccatcacgtagttttaattgcatgtggctttcagctgtgcatttttcatgttatgatacatggttcctgttttcaggcaaaaaccaccaagaagatcgtgctgaagctgcaatgccaaagctgcaagcattactcccagcaccccatcaaggtattatttcattgtcaagactccagagctgaaaattatcatgaatcattattttgctggatgtgttggatgctcacttgcataattgttctctgcagaggtgcaagcatttcgagattggtggagacaagaagggcaagggaacatctcttttctaaattgcttgctacctactggatactatagttgttggtctactgtgcttcaatatttcaatgttattaggagcttatttaagcagaccatatcaatgtattcaagtatcatcgtctgacatttactctagcaaggattggctttctgctgaatcaagttttgttgcttaatgctcgttgaatccaatgtgatgcatgtgtttatattttgctgcaattttatcttacgacagttctatttaccttagtcctcagtatcccttttctttttttgttatcttacctgctgtcttttgattagtagttagcaaacatagagcgacccactttaattacttcccgtgacatgaatatgacctcgagagattagtctagtgaacttcctttttcagactgaatgttgtattgttaactgtactggcgtttggtcagtatctttcgaaagagatggaatgtagggacgtaattttattgcaagataattcatttgttcttgtggttcagtatcttggaaggtcttgtgatattagtgaattcttttcgtagcattgcagtacttgctctgtccttaatgcatgattcgataggctacgcaatcccgtttgtagtaatgaattaaaaattatatattattatgaaccgaataaatagcttcgaacaagctaagcaatgctgatgtagaaaaaaattagtttgagaaccgtggtatattccaaagtttgtaactgtcataagctgccccccaacccacccaaaaaaaccggatggcagcaatcacaacttagcattgctgctcatggcaatgttcatatactatgagtgcgggttagttcagactacagacacgtgtggtaattgtttttttttagttttttattttgtttgttaggtggtgtttggatccagggattaaactttagtctttgttttagatactaatttagagtattaaatattgactacttacaaaactaattacataaatgagagctaattcgtgagacaaattttttagggttaattggatagatgccattataaaatctttagttttgaaatataccgttactattaaactatttagaaacatgccattacaactttttcaggtattggaaatatgtcactgtacaacctttggatgtgtttaacaaaaattttagaccaaatcgctctcgtcttctcctttgtctccaccctctcctgttcatcttctttcttccatttctttcccttttggatctggtatcttagtattcttcctccacatctcctttctcggccagcaacggcggtgttgtgctgcaccatctagtttcccttcttcccttcgctggccgcatcaccaccttctcagtttccagcctccccgaggtctactgcaacaaccaagacgcggagcatgtcgttcttgaatgtccagcacccggacgcccaaggacgtgcccctgtcggtgcagctggagtcattcgcctacagcggcttcaccatggcgtggtccacgtccaccgattacgtgctcgtcgacgagcgcgccttgtgcacagggccggtcctgagttttcaagctctaggacaaaaacttacgtggaggcccctatatatatacataaactaatatatatatttatagtcttataaacatgtaatatttaatatttgatatgataaaattatctatatataatattttaaaactttcaaagagaaataatataatcataaacacttacttggcactttcaaaagtttcttctaaaatttcaatgaaatcatccgaacattttttccgttttcttttttcgctaccggatacatattttcttgacaatatgattaatgttgtgctaaaaaataatcattaattattaagtagtacaagctaataatttttgatctataaagaggaaaaagaaagatagagaaaattaccttagacgacgactgcgaggcgcgagcagccgatcggccgatgagggcgcgccgccgggcggttggcctccaatcgacgtagtcagccagtcatgcagagccgctgcgatttgctgccgattgccgtgtttgcgttgcggtttgccgccgtttaccgtttgcaacgcgacgcgaggcgtgatcgaggcgacgggaacggagtcagatcgcttcacttttccttcgctcctcttcgtcttctgtcttcgataccatacatgattcaggactgagagcgatgctgaccctgggggcgtcgtgggccatggcccatccgccatggggccccctaaattttgggggactcgggcgtgcgcacgggctgaccccccctagggccggccctgcttgtgcatgatcctgacaaagtgactattactgtgtactcctaatctcacagcagcaagaaacgggaggaagaagatgaacaacagaacaggagagatgggggaggcaaaggaagaagacgggggcaatttggtccaaaatttttgttagacatatccaaggggtatgtaatggtatatttccaatacctgaaaaattataatggcatacctccaaatagttgagtagtaatggtatatttcaaaactgaagaatttacaatggcatgtatccaattaacccaattttttaagcctaattaattcataattatagaatgtttattgtatcatcacataggctaatcatggatttattaggctcaatagattcgtctcgcgaataagtccaagattatggataggttttgttaatagtctatatttaatacttctaattagtgtccaaacatccaatttggaagggactaaaaaattttagtccattccaaacacctccttattatttttatcaaatagccacgtaagcgtcatgtcaatagcacgtgggacgaagacccctagtcaaaggcgtcatgtcagctaaaaccggagacattgctaccgagagagctcgtttgcacagtttgaagaaggcgtcatgtcagccaaaaccagaaatattattaccgagggacctcgtttgcacactttgaaggatggattgtatatggttttcggataaggatgaaaaacagactaagcgacaaagtaagagacctaaagtgaacttatttgagggataaagtccacttggacttccttaactataagggaataagttcacctgacgtcccttaactttaagtcgagttcgtctgaggttcctaatccacaataaaatctctacctctcaactaatcataaaccgtgcgaaaaagatcacaaaacagacggagcgatgaagtaagggacctaaagtgaactcattttgagggataaagtcacttcataactataagggaatataagttcacctgacggccctcaactttatgttgagtttgtctgaggtccctaatccgcgatagcaaaaatctctacccctcaactatcataaaccgtgcaaaaaagatcccaagacaatattgatccattttctccggttttgctgacgtggcatacggtgggacccacatgtcagcgtcctgtcttctcctcttttcttttttctttttttttcttcttgtcttttctttcttctctcttctcctcttcccttcttctcctagcctgagaggccggcgggcgggcgagcaggcgacggcaggcggtggcggcggtgtgcggagcaggcaaggggtaacgggtggcgggcgagcgacggcgcctcagagagggtgtggtgtgggcgtcgctgtgctgtggcgggcggagcggggtggcggcggtggggtgcagaggacgacgacatatggaagtgatggcggacgctgtaggggacgatggcgaggaggacgaagtaggccgggagaggatgactccgacgcgcttggggtttcaccaggagacctcgccttcaccgtcttcgtgccctcaccagagtcgttccaccgcgtcctcaggctgcggcgtcccaataacaacgttgccgatgggtgggtctcacattttccttctatttcacttacatgtgggactcacatattattttattcctattttgctaactaggatgccacgttagtgaaaccaagacatctatactgccataggacataaattgaacggttttgtatatttggggtgaagatttctggtattgaggataagggatggcaaacaaactcggtgtaaagttgagggacatcagatgaacttattccaactataaggcaacgcatcacggtgcatggcccatgggctgcgcattctggcccacaaagcagcacacgcaccagtaaaccctagcctccaggagctcacccgtataaagtcgcagaccttctccttcccctccccgccgccactcgccgcagcgtgtcgaccagacaaggcagcgcctccgaaaccctagctccccgccttcccctccgcggccgccaaaatggtacgcttcttcctcctccccgtccgcctctctccgccgcacgacggcaagatcatgcgctcgtgtgtcctcgtgccagtccacggcaccctgctctggtcgatttgtagggggattgcgttctttattcatgttgatctgctgtagatgggggcgatcttgagccggaggagtagctagtttcttattgatgcggtttcggggtttttagagatttaacacggtttcgcggtttctctttagcgatttcttttttcatgttgatataatgatatccacggtggttgttctagttatgtcatttttatcttgagtgctttgtgtgattgtttttcaattgtgggtagagaccagattattgtcgttaagatgcatgctctgaaacgcggaatttttttgtaatgggttatatctagattatgtgtattgctgtcattcaatagtcttttcttaatacaaggcgcaaccgtcttttcttcaagtaccagtatacaaggcggcaactgctcaactccgtacttggtgcatgcaagcattgaatggatggttgcatgagctcatgatattcggttcattagtttaaaggcaaaggatccaccactcggatgcttgcatgcacgcgcaaaaactgcaggacacgggtgcatgctgctttggcactagatgcgatgaactgatcaaagcgtcacgcattggaacgcgctggaataaatcggtacgatgggtagttataggttttcttgttctccgagtccaaacaagttatgccttgtattaaggaatggagggagtagcaattaacttctggagtaaacatttttcatcatcttccttgaggacgtgggatgaattcttttttttatcttgtgcgaaaattgtttggtaatcatgtctggttttgactgatgggctccgatgatggcatgaaatctttgagacctgacattcttgtgatgacaaacataagcatatttcctgaggacccaattgaggttttaaccattggtctgctgaatttgtctttgctgtcgaaaaatatcgattcacatgtgcttctgattatgcacatttgattgtgttgtttataggcctgctatgtgctttccaataaccagtatttgttaaatttgtttcatatttcttatgtataggtgaacgttcccaagaccaagaagacctactgcaagaacaaggagtgcaggaagcacacccttcacaaggtcactcagtacaagaagggtaaggacagcctgtctgcccagggaaagcgccgttatgaccgtaagcagtcaggatatggtggtcagaccaagcctgttttccacaagaaggtattgtgacagtttatatgtgattacgcagtgctgtgtgtgattgtctctcttcattagaaacatatggtgtcatgatttgtgtctgttcaatgcaaacatgtggcaataaccatcatgtagttttaatgtatctgactttcagctgtgcatttttcatgttatgatacatggttcctgttttcaggcaaaaaccaccaagaagattgtgctgaagctgcaatgccaaagctgcaagcattactcccagcaccccatcaaggtattatttcattgtcaagactcaagctgaaaattgtcatgaatcaatcagtatctttttagatgtgttgggtgctatcttacattattattctttacagaggtgcaagcatttcgagattggtggagacaagaagggcaagggaacatctcttttctaaactacctactggatactgaagttgtgggtctattgtgcttcatacttcaatgttattaggaacttaatttaagcagaccatatcatgtattcaagtatcatcgtctgacatttactctagcaaggattggctttctgctgaatcaagttttcttgcttaatgctcgtcgaatccaatgtgatgcatgtctttagatggcactgcaattgtgacttttgtcttatggcagttttatctccctaagtcctcagtgtctgtttttcgttatcttacccgagtttgcaatcctagagcgacccacgtaaacgaattcctgtgacatgaatccctgagaggctagtctgatgaacttccgtttttcagatcgaatttcgtatatggttaactatactatgttttgttcaatatcttcgtaacgagatggaaggtatggaatactatggatggaggtgaattgaaagataggccttggtcttgtgattgttatcttagaaggtcgatactaatgtttggtcttgtggcgttagtgaaactgttttcgtagcaatgtttggtcttgtgatgttattgaactgttttcgtagcattgtattacttgttccattcttcatgcatgatttggataggttattgacaattgtttatagtaatgaattaaatattacactcctaaattattataaaccgaataaatagcttaaagcgagccaggcaatgctgatgtagaaaatttctagtttgagaaccgtggtatgcatatcccgaagttcataagctgaaaagattgcaccctaaatctaatgtattgtagttttcctgtactgaaaatgctgttggatcggacagccgtggtgattggttgcgttcattttcaagttgtagccaagttaaataaagtatagaaggatatgcaagtagcaacatcggaggagtgccatcgcagtgatcctcccaaaaagcacgaaagaaacatcttcattggaacctaagcagctctggccttttgagcccagaaaagctatccttgattcaagcacaaaccgtcatttggttatatgctttctccaaatactagcatgagtaaattgcattggcggtacacgaacttgctaggtggaagcaatctagtacataaacttataaaacgctcattttgatacacgaacttgttaggtgcatgtgaatcaaggccaaaagaaaaaacaaagctaatcttattttagtgttaattaggatactacataaacacatgtgtgagaaaaatgctaagtacatatacatttgttcaataaaaaggggttaataaggcctaaagattgtatggagaaagacacaaaaatactgagaaatagtgcaaggggtagaacaaagaataataaagcacaaatgcatgtctcatgtccacctccatatgcacatctcgtcctaatcagtgtataacttagtaaaattgattatgatgtgtcattttgaccttgtttcacatgcatcgaacaaattcatgtaccgaaacaagtcttttacaagttcgtgtagtaaagtgcatccatctggcaatttactctactagcatttgaagctaaaaggctttggccttttggagcccagaaaagctgttcttgattccagaacagatcgtcatttttggggtatatgcctcctccagaatcctaaaattctcatttcatgtaaggaaaatcgcaagtgtccaacgctgaatccatcccagagatctcagtgagcaaattgcacagcgccagttgggactattcaaggattttcagggccatgccctgtacccatcatccatcacccagcaacaaaacaagccggaccgtagtgtgtcaagcatgcactgcttctgctctccgatctaaccggtagcccccaactcattctgaaccacaccttgtgttttggaccacatcacaaaattcagaagcagcagcagcagcagcaaagggtcaagcaaaaaatctaacagctttatttaggcagatccacctctctacatcatcatagtcatagtacaagaactcgacgaattcagaagaaacattggcagctacacctagagaaagaaaaatgaaaagaaaagaagatctaatatattacaagggatccttggatatatgctcatagcattgttacatcccgagcaccgagtcgcgacttgtggcgaaaacgggtgccatttccatgcttatgccattactgcttcgcctgaaaaaatgagatgttttttttttggttagagattcagacttatgttcatgaattggctcttttgtgaaaaatgtgatttggtaaaacatgtgcggaaaatctacctgagagtagatgaaagttccgagaatcgcaatggcggctccgagggcgttgatgggctggaccggcgtgtggaagatgatgatggaggcgacaatgacggagatccgcttcatggtgttgccgatgctgaatgtcagtggtgagatctcgtccaatgacatgtaggacacttggttgtacaagtggtagaacacactctgcgccgccacccacctacaaaaccacagagaaatccatggccacatgaatcagctggattatcacacaaaaatatcatcaaatcttttgatacttcttatttctctttcagaatgaactgaagaagatattgccgcttaggaggaaatgatagtgataggacgatcctatatctatattaattgataatggttctttttgtatagaatacttgagtgatgttactgaaagtacaaagtgttgcatgctgaaactgtttgaaagcttaggtcaagcacttatcactagaaattttttgcccaattgatacccaaaaatctcaactgacgtgatggttgtgacagtgaaacggtgagaagtggtacaaagaaaagcatgtgaggctcaccagacgaagtttggaccgatctcggcgacggctttttgccagccggcagcccacaccttgggcccctccatggcgaaggcgaaagggaggaggatgaccagcgagagcatggagaggcaggcgtagtagttcatcccgctcaccgacttgcccttcatccccttcttggagaatatgttccggaacacgaatgccaggttcgagatcatcgcccccatgaatcctgcatcgaattttcagcaatacacgatgaacagattgatgtgatgtgtcaggtttatgaacaaattgtgcactttttcgtggctggtgtatatttctttatctgacataagaaaacatatctttggttaatggacagttcttgttctgaagaattcttggagataatatctatttttttaatcaaaaagtgaggatatttctggtgtatctgctgcaagtatctccaggatttcaggtggagagacagagagatgcagagtgtttgctcactcaccaatcatgttgaaattgagctcggtgatggcggcgagggcgcatccgccgatgattgggaggagggagaagtagaccggcgccgggaagtgctcgccgaggaagaacctggagacgagcacgctgaacgccggctcgccgctcttgatgatgtgggtgaacgacaccgccaccttcgccatgctcaccgtcgccgccacgtgcccgatggtgtgcgcgatcgccacctgctcgtcccacaacgagcaaaaacgaatccccaaatccaacgaacgcgtcagagattcagaatagaacagaatcaagaaggaggagacgatggtgtccatggtcaatgcgatctcaccggagacagggccttccagaaatcgaggtcggtggcgggcgcctcggcgatcctggtggcccaggaggcgagcatgatggcggagccggcggcgagggagagcgtggacgtgagccacgggtaagggaacgcgttgagcaccttcttgttgtagatgttgaagatcacgttcagcgcccaccacgtcgcgaagtagaccccgatcttggcccgcctcgccgcctcctccggcgccgcgcccgccggtgcagcctccaccggccgggcgccgtcggcggtggcggacggcggcggcggcgccggtgacgcgacgcgcgacgccaggaataacgggtcctgctgccggtacagggggcgcgccgagagggagaggggacgtggcccggcggcggcggcggcggcggcgaagaggggagggaggtggaggggcttgaataatgccatcttgggcgccgtggcggtcccggccgtggagagcttgacggaggcggcggcggcgagcatattggcggcgggaatggtggcgccggcttcttcagttacagttactgtgttgtgttgtagccggccgtccgtacgtctatggcggcgatgggttgcggccatagagaccgctcgcatcgagtcttcttcaatccgactataacaaattgctagctagttccacgccctccaacgcccttttagggaaggaagcctcaaaggagggagggccgccgaacaatgtggttgaggacaatccaaggaaaagggtggagacgaagagggagctggacaaaagataagtggtagaggggggaatcctacagctagaagaacatcaaccgcgtcaacagggaaggctgcaagaatagtagccattcaagccaaagaaaaccgtaggcactaacataaaagacctgacctaatccatcaatcaaggagcatgctaaaaggagatctagagagagggagaggcactggcaaatcctaattgatggatcagagccaagcatgttatggcaaggagctcgttggctagctcaagggcgcctcaaagaggagggaggaggagggatggggatggaagaaggtgttgggcaaggtcaccagtcccgcggggagaggggggtccgaggccagagcctgccaccggtgccacggattcgaccagatccagccgctaggagcgcagatctgcacgccaccagtcgggggcgccgggcctagccttcatcgccggctgaggggggggggactataaggagccaagccgaggcccatcaccgccctcacggacgacacgtcgccagacagcaccgctggcgactgccctccgcggccaaggagcacgaccgctccttcgccgggaacagcacaccgtcgccgggacacacgccgccgcaccgcctccaccacgccccatcgcgccaccgcgcacggcattgttgctctcctccggccaggtccaaaagcagggtgcatttttcatgttatgatacatggttcctgttttcaggcaaaaaccaccaagaagattgtgctgaagctgcaatgccaaagctgcaagcattactcccagcaccccatcaaggtatttttgcaatgtgaagattcaagctgaaaattctcatgaatcagtatctttttagatgtgttggatgctcacttacataattattctgtgcagaggtgcaagcattttaaaattggtggagacaagaagggcaagggaacgtctcttttctaaactacctactggatactgaagttgtgggtctactgtgcttcatacttcaatgttattaggagcttaatttaagcagaccatatcatgtattcaagtactctagcaaggattggctttctgctgaatcaagttttgttgcttaatgctcattgaatccaatgtgatgcatgtgtttatgttgcactgcaattttgtcttatggcagttttatctccctaagtactcggtgtctgtttttcgttatcttacctatgtttgcaatcctagagcgacccacttaaacgaattcctgtgacatgaatccctgagaggttagtctgatgaacttccatttttcagactgaatttcgtatatggttaactatactatgttttgttcaatatcttcgtcacgagatagaaggtatggaataccatggatggaggtgaattgtaagataggccttggtcttgtgattgttatcttagaaggtcgatactaatgtttggtcttgtggcgttagtgaaactgttttcgtagcaatgtttggtcttgtgatgttagtgaactgttttcgtagcattgtagtacttgttccattcttcatgcatgatttggataggttattgacaattgtttatagtaatgaattaaatattacactcctaaatctattatataattaaaggaatagaaaaaagagcctccacgtttactctcatggcttagaaattctcacattaatcggagaaaaaaaaacagagtccatatagaaatacaatttagaaatagctgaaattcggaattaaaaaataaggaatattagaagagaagactagagttcatatagaaatacactttagaaatagttgaaatttggaattaaaaaataaggaatattagaagaggagtatagagtccatatagaaatacaattaggaaataatagaaattcggaattaaaaataaagaatattagaagtagagtatagagtccatatagaaatacaattaggaaataatagaaattctgaattaaaaataaggaatattagaagtagagtataaagtccatatagaaatacaattaagaaaaaatagaaattcagaattaaaaaataagaaatattagaagtagagtatagagtccatataggaatttaaaactaactaaaattcggaaaaaaaaaaaggagcctctacgttcgctcccatggcctagaaattctcacattaatcgaagaaaaagaaaaaaacagacttcatatagaaatacaatttagaaatagctgaaattcagaattaaaaataaggaaaattagaagaggagactagagtagttattacacattagtagttttgaaaagttattgcaaaatttaaaattatgttgtcattgtaatatattataataatataatgagaaaacatatatgctattatatgagagaaaatataatgatgctagccgcgcaatatgcgcaggccaccatgctagttattataaaccgaataaatagcttagaacgagccaggcaatgctgatgtagaaaatttctagtttgagaacagtggtatgcatatcccgaagttcataagctgaaaagattgcaccctaaatctaatgtattgtaattttcctgtactgaaaatgctgagggggggactacaaggagccaagccgaggcccgtcaccgccctcacggacgacacgtcgccagacagcaccgctagcgactgccctccgcggccaaggagcacgaccgctccttcgccgggaacagcacaccgtcgccgggacacacgccgccgcaccgcctccaccacgccccatcgcgccaccgcgcacggcattgttgctctcctccggccaggtccaaaagcagggtgccagatccagccacgggggcgccagatccgaagcttcgcgccgcgctgatgtcagcccccacctatcacgcgccgcgtcatcatcctcacgctgagccgtcgcgtcgccgaggaatggcctcgccgccgccctcacagttggccgcgcggaactccggtggcgcgctccggcggcggcgaggggggagaggaagggagggggcggcgggggctagggttcaccccctgtgccgctcgcgtgagagggcgacgcgggggtcgtgccggcttcgtactcttccaattgaggataagatgaactgatgtgataagtagtacgggattgtacttattttaaaacaaaatttgaatataaaatcatacttattttagaaggattgtagtatttggacttgggagtaattttactgttcttggtattagaaggtaccatttcttttatataaaacttggtatttctcgaggtataaaaaacatacggttaggaccgtaacgaactgtgttagctgtaggtttgcatctgttcccaaggtgatttaatttgagcaattgcaaatagctttttcttctttcactcggcagctgaatcttgcttggtggagtactcgggccgtgcacgttcatccacgggtttgatttgacattggtcatgagcgcgttttagtggacaaagtggtggttagcatagtgaaattgtcaacgcgagaagcagaaaccaattgctgttgctgtcgccggtaccaatactgtatggtgttcctgttccatcagaattcagtcgagtgcatggcagctcattcttgtggcccatcacacaattaatctccgacgatgtactgtacgtagtggagcatttagattagtaattctcgaatacattttcgtaagggttaagtgggcatatgtaacgtgttcactccttgttactatctctgttttcagatgagtgacatcatcagcatagtccgcaatacacattttatcatcataacaattttacactataaaaaacgatttttcgtgatgttaccctatattttacgctggcgtccatatgcaaaaaccgccaaaaaaacataacaataggtggggggctacggaccaccagcagaaaccaatttttgctgataaccacgctaagagaaatgcctaaaaaaactactctatttttcgagacgaacctcttaagtgtctgccagtttttcgaggcggacctcttaagtgtccgccagcgaaaaatctcattttcaccggcagtaggtaaggaggaccactgcgaaaaatgttttgggcgaatatataaatctactgtcccccacccccaccgctcccttctcccttcccccactgcgcggcccctccgccgcctctcttccttctctctcggtttcaccttcttcctcccttctccaccgccgccggctgccgtcgcctctaccgcctctccgcggtggtggggcgtggcctcctcctctccaccgctagccgccataagctcggggccggattcggccgctgcgacgatggtggaggccggatctgccgccgcgacgacgggggaggctagatccgtcgccgcgaccgccgcagggccactagtctctaaagactaaactatatatttaaaaaaacattaccaatataactttatgaaagagagtttctcataaaaaaaaatataccaatataacttttcatattttaaatatttttacgtctattaaatttttaaggtttcaagatttgactgcacttacaggagatactactatacaagaatcaacgagaaacgaatttttaagttgcgataaactggtagtagtaagattttgtgaacaaggataatgcatatctgtgtaaaaaaaatatatagtgcaaatcacatatacattgaaaatctagaaactattgtcacgagtaaaatttttaccaaccaaacggccacaatgtcgcgcagggcttatccggggcactactgcccatgggctgaaagtgcggccacaagcccacaatatcttgcggggcttagccggggcaccacggcccatgggctctatctccctcaccagtaaagccctagcctccaagaccgcacccgtataaagctgcagacctctctctccttctcctcccccgccaccgccgctcgcctccgaaaccctagccgccccctccccgcggccgcgaaaatggtacgcttctccctcctcctcctcctcctcctcccctccgccgcacgacgggaagatcgcacgcgtgcttgtcctcgtgccagtccacggctccgcgcgccgtctttctcatggtgtttcacaatttgtaggatgcgttctttattcatgttgatctgccgtagatggggggatcttgagccggaggagaggagtagctagtttctttgattatgcgttttggggtctagcggattttaacatgagatggtttctctttagcgacattttttttgttcatgttgatgtccacggtgattgttctagttatgtcatttttatcttcaagacttcaatgctttgaatcgtgggtatagaccagattattgtcgtgaagatcgacgtattttccgagctgaccctctgcatgctgaaaattttgtagtgggttatatctagattatatgtgtattgttgtcatttaattagcacttaaacttctgtagtatgaacattttcatcattttcctgtgaggacatgggatgagttcctttttttttctcttgttctaaaattgttcggtaatcttgtctggctttgactaatgggctccgatgatggcatgaaatctttgagacctgacattcttgtgatgacaaacataagcatatttcctgagacccaattgaggttttaaccattggtttgctgaatgtgtcttcactgttgaaaaatttgtacacacatttgcttcaaattatgcacatttgattattgtttataggcctgcgatgtccattccacattcagtatttgttaagctgagtgcttttgtttcaaatttgttttgtataggtgaacgttcccaagaccaagaagacctactgcaagaacaaggagtgcaggaagcacacccttcacaaggtcactcagtacaagaagggtaaggacagcctgtctgcccagggaaagcgccgttatgaccgaaagcagtcaggatatggtggtcagaccaagcctgttttccacaagaaggtactgtgacagtttatatatgattatgcagtgttgtgtgtgactctctgttcattagaaacgtacggtgtcatgattgatgtagcagtgatatgtgtctgtacaatgcatgtggcaataaccatcacgtagttttaattgcatgtggctttcagctgtgcatttttcatgttatgatacatggttcctgttttcaggcaaaaaccaccaagaagatcgtgctgaagctgcaatgccaaagctgcaagcattactcccagcaccccatcaaggtattatttcattgtcaagactccagagctgaaaattatcatgaatcattattttgctggatgtgttggatgctcacttgcataattgttctctgcagaggtgcaagcatttcgagattggtggagacaagaagggcaagggaacatctcttttctaaattgcttgctacctactggatactatagttgttggtctactgtgcttcaatatttcaatgttattaggagcttatttaagcagaccatatcaatgtattcaagtatcatcgtctgacatttactctagcaaggattggctttctgctgaatcaagttttgttgcttaatgctcgttgaatccaatgtgatgcatgtgtttatattttgctgcaattttatcttacgacagttctatttaccttagtcctcagtatcccttttctttttttgttatcttacctgctgtcttttgattagtagttagcaaacatagagcgacccactttaattacttcccgtgacatgaatatgacctcgagagattagtctagtgaacttcctttttcagactgaatgttgtattgttaactgtactggcgtttggtcagtatctttcgaaagagatggaatgtagggacgtaattttattgcaagataattcatttgttcttgtggttcagtatcttggaaggtcttgtgatattagtgaattcttttcgtagcattgcagtacttgctctgtc

SEQ ID NO: 5584 - DNA, 6881 bp, Oryza sativa
  unsure (1)..(6881): unsure at all n locations
tcctatatgtacagagagtccgtgaatgatctgaacaatctacttggagccacctatgctgctgttttcttccttggagcagcaaatttgctcacacttttgcctgtggtgtcagttgagaggacagtcttttaccgtgaaaaggcagcagggatgtactctccactgtcttatgcgtttgcacaagtaagttctgaacacccttacaagatatgcttatgcatttaccgatgtacgatgaacaaggtatatatgagccttcctccagctagaacctcccaattcaaagcaggccaaaaagaatgtttttttttttttgaaatgatgccaaaaagaatgttaagcagcagaggacaagtcgcttcccttctcgtatttgacatagtaggataaggaggcatgttgaaagaatgtcataaggagacatttaagagattggatttgattgtctgtcatcacaaatgcatttgcgttggccctaaatatatgtgtacatcagcataatctggattgtgaggaaaaactcccaatagtctgatttcaagagtagaaggggctcggtatccggattcatagtttagggtgggtggtggactttagtgatattcaacacagctagtattcacacctctggtttttgtagctggaccttttatttaggcgaacttttagagtatgcgcaggatgcatttcattgtttacatgtcaactgaagtcttaaaaataccaaaatatctactgaagcttctcccaaaaactgaatgatgtgcacagggatttgtcgagttctgctacagtgcagttcaaggtgttctttacactatcctcatctattccatgattggctatgagtggaaggcggacaagttcttctacttcctgttctttatgattgcggccttcgcctacttcacattgtttagcatgatgctggttgcgtgcactgcttcggaaatgcttgcggccgttcttgtttcatttgtgctctcctcgtggaacaattttgccggattcattataccccgtccagtaagtgctttcaataagaagtgatgctatcggacttacattatctaggctctcagcttgtcatacatctctgaaatattttctcttgcagctgattcctgtttggtggagatggttctattgggccaacccggtctcctggaccatctatggagtgattgcgtcgcagtttgcggacagcgaccgtgttgtcaccgttcctggccaatctaccaccatggtggtgaaggatttcttggagaagaacatgggctttaagcacgacttcctcggctacgttgtgctggctcatttcggctacgtcatcatcttcttcttcctctttggatacggcatcaagtgcttgaacttccagaaacggtaggaggccggtgtccagcaggatgtcaatccgaggtcacgtttttggagtgtaaagcaaatgtagcaacttaataccgatgctttttttgtgtagatatatagtctgttcgatatctgctagcttgtattgacacttaatgtacaacattatttactcaaatgttctgagtttatggtatattattctttttctatgttatcgccatcttgccattttgctttccttattccttgtgaagttctgcatgatccactaacaaccggatatattggtacacttggaagttgtcccgctttgccatgcctgttgtataaactgagaattgtacttgaaatttcgcaagaagatatatgtctattacataaagtgttttttattttgtaactcttttgattggtatttgagaagtgggaagcaaacaaagtgtgcatgcactcgagttgtaaaaatccaccaactccctaaggtttgaagtgtgcaggtcatcaggctaagaaagtgtgactagacatgactaaacctttgcatgtctaggttagacacgaaccaaatggccattgtattttttttttgaaaaaaaaaagacctttgtattgtatgttagcgacaacagtagggaacctctgtagcttattacaatttagatacctgttcatcagccatggatggatggattatcaacaggagtcccacaaggattgagtagcctaatttaactgaagcaagacactgtacatggtgccaaatgaggaattgttgttttgcatttggcctaaggccttttttttaatgaaatacgaatgaaagctgatggggatggataagttaaaatattatatattacgaatttagcaaataacttgggaaaaggtgatgaagatttacttttgaaaacttggcacgagtaattcggttaataatccggtggttatcagctagaaaaaggaaagggagggtgtatagttgaatgccaaactttaccgcaccaaagttggccaagtttaagggcctgtttggatggttgctgcactttgccaaacttttgagtcaaaagtgtggcatgttgtagtatttgcagtaccaaaatagttggccgtacttgtggcatattttggctaggagatgaatttatgccatgtgagatataaaagaggtaaagtttggtacaacacaagtgtaacatgtaaccaaacaaccacatcgaaaagttaatcttggttaacttttaggtgcgctaaagtttgccattcagctgaacaccctttaactttttgaggtgattgtttagttacatgacacatttgtgttgtgccaaattttactacttttatacctcacatggcataaactcatcttctagccaaaatataccatacttttggctcaaaagtttaacaaagtgcagcaactatcaaaaaaggcccagtactccggtactccctagtccctactttggcctagatgagtaagcaacgtgctctgctaagaaataagtttgcactgtcacgttctaaatcttaccaaattattgcaagccaaaatccaaacatatttggtaaagctgctaacgtgctttcggctatccctaccaaaaacgaatgccaaaatctccccaacgaaccaaacgaaatatgtgattaccaaatgtaggtacttaaagaaaacgtggactcgaaataaaactaggatgcaatcatgagaaattctcctagcaattttgtgcagaaaccatttgaggacatgtgcccatttttaggatcccagatcgctgaacaagtggagaaaagttcgagagatcaacatttccagtttccacattcgtccttccgcttacgccgatcacaaaccataacggtttaccaagaacttaaaaacaattaaaaaaagcttttacatatacattattagcaatttaaaaacaaatattacaaaaataaactaaggtaaaaaaaaccttaaaaaaacttagaattaaatctaatgttaattttaaaatccttaatacaccttaaaatcaccttctttttcctctaaggcccctttcgacatagcaactggtgaagattgagtacaggaacgcaaaatgagaaaatcattagtgatgattaattaagttatactaattgtttcaaacttgaaaatagatttatatgatgttttaaatcaacttttacatactccctccgtcccaaaataagtgcagttttgcactattcatgttcaacgtttgaccgtccgtcttatttgaaaaatttttatgattagtatttttattgctattagatgataaaacatgaataatactttatgtgtgactaaatgtttttaattttttcataaatttttcaaataaaacggacggtcaaacgttgaacatgaatagtgcaaaactgcacttattttgggacggaggtagtagaaagtttccgcgcgatatacaaattagtagcgtaaaaagcgtgctaatagaaactaaagataaaatccgtattttaatccaccaatccgaaatgattagagacgccaaaaggcccactttactgtagtgacccacgagtgctccatttcctttccttcagtgtctcagtcagtggatcactgtgtcagcacaggcagaggctttgctcttgctccggtccaagccaaggtgggcgccccgcaagatatcttcttcttccccaaatcgaggacccgattgcggcagctccggtggccggagcagctccctggtcgacgcgtcgccgtctccgtcccggtcgctgccggattccgcgcgcgtgggcgtccatcggatggcaattggcaagcgctaagacaaatcccttgattttttttaatccgttggacaggcggcaagatgattaattagcatgtttgtttgtgtcttcgatgatatctttccctattcaatttttgttgttgcagggtacccgcgctcgccgtttcatccggtgagcatttcgtcgagcagttggtaggcggggggagttcggggtttcttgattcatggggaggagctttgccgttgatttcctgcgctgaagcagttcatcgtccagtttcttgggcaatcgtttctagggaagcaaatgagatgtctctgctgctagacgcgagctctgttcctcgtttttaccattctcagaacttgacgattgagcatggcagattagggtcgtagagaaaacggtgttcgtgtcagcttcttgaggtcagagagccaagaagccatttgggtttttcttggttcatggaggaaatgggctctgctcagctttctgccctagctgtgtgtgtctgcattttcggatgcctagccatggctgatggccagaacgtcactggaggtgatggttcaaggccagctgagctgcgcatcggtgcattattcacatttgattcggttatcggtagagcagtgatgccggctattgagcttgctgttgcagatgtcaatgccgatccaggtgttcttcctgggacaaagttgagcgttataacgcaggataccaattgcagtggctttcttggaaccatggaaggttagggcttccttcttttccatcaatttttcttttatggaattgtccttaccaatttagttgtaatttacacattattctctcgctttcattgtgcatttgcaattagcatatttcccttttatcctcnnnnnnnnnnnnnnnnnnnnnnnnnnnncagttgaaaaccccaatcagtattgtttttaagtttgtggaggtttcctgtcaggattcttaatctaatccagattcagtttaacttcaggttgcaaagtcgtagagccatgctaaggtagctctacttccatgatatcatgggatgtgtgcaaattgaagccctaatgaatatctatgatctataaagaatacctagaaatcagaactttcctgtctttattttttcttcacagaacttcgcttttgtttattctcactaaacgtaagttgtcataagttatatttatcttgcactgaaagcttgtatatatgagattaacaacgattcttcctgtgcagcgttggagcttctggctaaggatgtagtcgctgtattaggtccacaatcttcaagcattgctcatgtcatttctcatgctgttaatgagttccatgttccgcttgtctccttcgcggcatctgatcctaccctttcttcccttgaatatccttactttgtgagggctacaacaagtgattatttccaaatgagtgctatagctagcatcatcaatcaatatcgatggagagaagtcattgccatctatgttgatgacgactatggtagaggtggcatcacagcattaggtgatgctctagcaaaaaagaagtctaagatagcctacaaagccaaattgccacctggtgcttcaaggactaccatcgaggatatgttgatgcatgtgaatgaaatgcagtctcgcgtctatgttgtccatgtaaaccctgactctggcctggcagtttttgctgctgcaaaatctttgggaatgatgagtactggctatgcatggatagcaacagactggctctctgcagtgttagattcatctgatcatattagcactgacagaatggaacttactcagggggttattatgcttcggcaacatgtttctgattctggcattcagcattcgttggtttcaagatggaacaatctgaccaggaatggaggtcattcaagctttagttcttacagtatgcgtacttatgattctgtatggttagttgctcgtgctgttgaagattttttgagtgaggggaatgcggtatctttttctgctgatccaaatttgcaagatataaaaggaagtaaccttcagttagattccctcagaagtttgaacaatggagaaagattactggagaaagtttggcacacaaatttcacaggggtttctggcctggtacaatttactgcagaacgagatctgatccacccagcttttgatatcttgaatattggtggtacaggtttcagaaccattgggtattggtcaaacatttctgatctttcagttgttgctccagaaaagttgcattcagaaccactggactcttcaacaaacaatatagagcttcatggtgttatctggcctggtcagacgtctgagaaacctcgtggctgggtgtttccatatcacgggaagccgttgaggattggggttcctctccgcacgagctacaaagagtttgtgatgccagataaaggacctgatggagtaaaggggttttcagttgatgttttcaaagctgcagtaggcttgttgccctaccccgtttcattcgattttattttatttggagatggtttgaagaatcccagctacaatgaccttattgagaaggtttctgacaacgtgaggaacatcccatatcataaaattctagatgttattgcagtttagtgtcttcacttgtactatatttacttatttctgtttctgtaccactcagcactttga

SEQ ID NO: 5585 - DNA, 16697 bp, Oryza sativa
ccaaaagtctcaaagctgagagcggagcacacagattcctttttccaggaatatgcaggaggcagtgtgctgttgtcccagtatggcacggatcaaatttatccatcttttttttcacctttactttttactgaaatttatacacatacccttttgaagcagagttgcatacccattttctttttttggttgctatacaacggaatctccttcagacgtgatgataccgattagttatcaagtcctaatacctaatcggtatcgggtgatacatatcaagtatcatacgattctaccacgtattaggtgatacttggttattcctattaggtatacgattcttaccacatagaaggtgatacttacgagatattaggtgatacctattaggtatcatgcgattcttatcacgtagaaggctatacttgcgagatatcaggtgatacctatgaagtatcaggcgatacctactagataataggtgatttctactgggtatcagaagctggacatacctgacgccgacgccgacgaccactaccgcccttcctccccttggctctagccaccaccgccgctccctttcctggctccggctaccaccgctgcccctccctcctctagctcttgccaccgtcaccactgcgttccttagcttcggccaccgacgcccctcgtctcttcgttgatgtatcccccgccgccggcttggccgcgacgcgccgctgcctcgacgcgacacagatggggtcctcgacaccacggcagctcaccacaaggggctcgtcgccggcggcctcgtcctcttctcgccgagcaggtcctcttccccagcccgcgccgaaggtcctcgccaataagcggcaaccacctcctcctcatggctcaggcgttcagctctcgcttctctttggataggcaaggaggacaaaggatcccgtcccaactggatcccggtgcgtagcatttccgtttctttttttcacattttttatgggtgtctatttcacatggtaattagacagctaattccaagcttaaaacctggcttaatgctactgctttttatcctaggaatctattttgatttctcaagaggatgtcttctcgtaagcttaaaaaccattcaaatggttataaaaaaaattctaaaaaaattaacaacactcatacaatttacttcctccgttcaaaaaaaaccaacggatgtgaccccctcctaatacagtaaatctaaacagcacttaatccaaatttgttatattaggagatgtcacatccttttaggttgtttttttggtgacggattttttttttacggagggatggagtatatctcacacagctctagcacgtactcctatctcacacagatttatcacaaatcatacacttttttttaatatcttctacactgcactttatgaatatctcatgtcctgtcttccacaggaaaaaaagtgaaatagtgaaaagattcagaattaggaagcatctaatcacctaacttgacagcaatcagtttcaagtggccaagtgccaaacagtttcaagattacttacaacttatccgttccctccatatatctctctcccctcttctccacctctcgctactccaccatccaacgtgcgagaagccatggcatccatcccgtgcaccttccagctgagcgcgagggcgtcgtcggcgtcggcggcggcggcggcgaggaggtcgccgcgggcggcggcgaggctggggtggctgcggccgtcgcggctgagcgcggtggtgccggcgagcgagagcgggagggtggggccgacgtgcttcttcaagttcgggaacaaggacgccgagggcgccggcatctacggcagccagggcagggacgacttcgaccgcgacgacgtcgagcaggtgagccagcttctcgttcttcctcctccccatgttgccttaggtgttccttgattgctccagtccatggggaatgtgctgacgaatgactgagatgctaccttaccactgctatattacttggtggattggtaattctgatcctaatgtgagacatacgaagtagttgattgctatacttgctagtttggtttgaggacaaatgatgcagcatttgatttgagttgaattaaggcatgtctttttccttatgcttatacttatcaaccaacatttgaattttaaatttggagttgatttagaggttttttcattgaagtatatttttcagcatttgcttttaaatctctaagaatatacatataaaagttttatttacaaattactttttatttgcaaatattccgtttcgcttgcttcgcttattccgcgaataagcaaaacgatggctcgtatcatagccagcagtagcaaagaggaagagaagaaaagaaaaaaacaacaatcacctcgcaatttagtctttgtagtttcatggacaaaatgcaaattgcagctgcagggtatctgaaattctgaatatgctaatcaagaattcaagatagctgtagactagcacattcagattgaagaacagcacctgaacatggaaagctctagtgacaagaaagattcagaatagtaactttgattcctgagatgagattctgaatgtatctgaatctttctgtctgcgcttgtagtacttcaactacatggggatgctggcggtggagggcacctacgacaagatggaggcgctgctgaaccaggacatccacccggtggacatcctcctcatgctcgccgcctccgagggcgacaagcccaagctcgaggagctcctccgcgccggcgccaagtacgacgtcaaggacgtcgacggccggacggcgctcgaccgcgccgccgacgacaccagggagttcatcctcggcttcgccgccaccttggccgcctgatcgatcgcttcgccgacgacgacgaccttgatgcctggatatgtttcggctatactagtatactacgtatttatcttttcttatttttttctttttcaagtttctccaagtttttcttgtgtttggtagagtttagccgggaaattcacaagttgtttacagttcaagaggaagtagcttcatctgtatctttcactttcttcgctgtgtgaggctatgctttgtagaaattgttgttacaagtagtatcttccactgtttcaatatgaaagtaagaagaagctttggatgcatgatactattggaattggaagctttgatgttcacataataacatgttaagatgccaaatcctaacagcaagcaatagcatgaacttcaagcaaagcattactgcaacagcaagcaaaacttcatcctttattgtctcagattaactgctatgtccatgttgccgtcagtacatgttctatgtactagcctagaattacaaacagcatttcgccgaaagattcacttgggggaaacaaacagtctgcgaccacagcctcaacaacgaaattacgagtataaactctataaaccccctcatgaatccgccagatcatattattcttttcttcttctatattcatcttggtatatatttctataaggactgtgaatgtactcctacctacaaaacattgggtaaatggcagttgtacttcaactttggatgtgaccggagcgcttgctggagcgccgtgtccaccgtcacgccctcgcggaacagcttgtcatacaggaggcagatgaactgagccatgtactcctcatcatcgaaatctttgctgcgatcgccatttttctccatgtcgctgtcttcccagtcactcgtagggctaacaggttccgcctcagactcggaagcctcatcatcggcaatgacaaacttcccgttctcaaggctgccatttacttccatcccatggtatactatagactgggaatctggaggctccatggccgacgagatgactgctttggcaccagaatccatgaatgctttgaccaggccgtgagcaaggccatacttaccactgcatacaatgatcctctccctccatgctccaacctgggaaacatgtatgtaatgaatcaacattagatagtgccctaaactctagatacattgcaaatagaaaaaggcatgctaacgatttcagcatcactagatgtaaataacacatctttactacagcattggcagcaattagagtatgtctgacatttggttcctgactaaattttttcagtaatgtgaggcattgatcattggccagattttggtttggtcaatagctggccagattgatcattgaccaaatatgctcttttctatgatatcattttgatggctgcaccatgagaaaaatatgaaggtttgatcttaaatttatagttgactggaggaatcaactaccagtaatgtactataccagaatttagttggaaattagcatccaatttcatcagatgtcacttgcatgaatattttgtcacatgtcctttctaagcacaattaacacactacataagaatagaatttgaagagcatttcagtggaagtgctagctatccaggctggcatataccatccatcgaacatcttcaggtgtcatatgagcagcaggcactgtcctcctgaacatataggcaccaatttcttgattatcttccattacctgcgacaagatagattattatatgcataatgatttgtcttggaaacataaagaaggaaaacagttcctacttgtgtttggcgccctatatagcggtggtgaatcccaccaatttcaaacgacggccactctgcaaccaactcagacaaacatgaaatctttgacaaggaatatgcaccctttctcttacatccatgcaacatggctgacaagctagttttcacacactggagaaacctgtctgcaagttcccctggttccgcaactacaaacacatcattctgccagctgcggtagtaatttttgcatcacataatcaaaactagagaaaaaagtaaacacactgacgcttatttcagtaaaagaaatcgtgataaaaaatacctcaatattgagccagttgaatcgttttgaagtgccatatgtatcacaccaacttgaggcatattttgcaacttatcatatagtgattgaacatgtacagatggctgccatgacttaagaggtgacgttggcggcgaggactttgcagttgggttgccatccaggctaagcggcggaaccaggtcaattcggccaattctttgggtgccctctggactatatagaagtggactagatggaaaactgccagtaaataagggagaagtaattggagtcggaagtgtggtagctgcctttccaaacccagaagcactgttcattagagtaagcctgataccattctgggagcagaatgtttcaagcgagcgggcatgatttactttcttcccaaaatcaggactatatgaagcctctacaagtaaaaccacacgcctccatcctaaggtaggattactttcactaaaacctgaattagaggattgaaaaatgaatcaaccaaatgttccttcgaatcattacacaaagtgcaaacctggagaagacaaacctgaatttgatggcttgaatcttgaaaacaacattgatttggtagtttcagatgacttttcttcctcttggtatcttggaactaaaagctcacaaacattcttgaaatcttgaaagtttttctgaatgtactcatcagttgcagcttccaacttaagccagacagcaggatcagtctcatctagttccataccacaccgctcatcaactgccacagtaacaagattcccattctttcaatatcaaagtgcattggtaaatatgtactagaactcattaaacagtacactatgatcgagttgctgttctgtggatttccttggaactcaaattacctggattaaagcggaaatactgcatttctgggagcattggtatcagtgtatccaaagtttcttcaactctctctacagagcatgaactttctattaaaacttgccctgtgtccaagtagcgccacccacctctccgactctagatgcataacacatggaataaatttatatatataagcaatgtgatagatgtatagctcacaacgagatcactggaagtgtaaacttaatgtaccatagaagttaacttttcaaactaaaaacaaaaattattcatcttggatcagtcaggtgtttcttctagtaatgtatgccttgacttgtggtttccaacagatgaggctaatataagctacagattatatgtagtgtatcgaattaatagatcccattcccatattatgtcacttgcaaaacaaaaaaaaactttaatatatgaaattgactaaaattttagcctctaaaatttactatcctggaacgatattgaacctatgaaagtttcagttccaatataccgacatattgtacatgtgttcaacgtattacaaaattgggaaaacaatatttctttaaaatgtgaggaattcagtaaataattggttttccagcacatggattgcccattgcttggaaggctgcccaacacttaacaggggcggagacaggaggaggcaagcagaggcctggactccccccatggctccaaattttacactaaatttattgtagatttagcaaattttgagaaaaaaaactaacactattggcccgattcaaccatttttttttttgcatttctgtctctgccactgatacttaatagttgtaatgaataatagtgttaacaaaagagtcgacaactatgatgtatattaccttagttggaactgaaccacaccctattgaaactagacaatctattctcgtatcaggccacaaaagttgtgcctctcttatcgcaaagattgtgggattgttggctacaatagctccatcctgccaacgatttacgtctgaagagaaaggaagaaaaaaaaagggctataagaactgcggtggataacaaatcttgaggactcaaacaaatagaggcctactgttcttgcacaaaacaatatccacaactaagtttaggaatatctaccatcagagaaatcatccagataatatggagctgcagaagatgctcttatggcttcccatatgcgatgcttgcagctacccatgaaagcaccacgtttaataccaaccggtgcaccagaaacagcagttccaaccgtgttaattggtttaataccgaccggggcaccagaaacgggcgttccagctgagccaattgatgggctttctgtcatgactgatgatacttccacagtgccaggtgggtactggaacatgttatgaggttaacagatggcccaatattcaagaagagaaaaaaaaacttgtgaatctgcactcttcttcagtttcctgactaataagcacaagcattgacatggtcatgcacagactgtatatatggtaagaaaacaaacctggtaatttcggaatatatatggttgggcaggcatgacactgactaaagtagatacagcaaaaaccttcggaatgccttttacagcagactctataaggaggtcaccatcttcatcagcacacatttcctttagtaacctctcaaattgatctgcactgtgctgtaattaagactttggtcactaactacattgtgtcacatgaaagaccacatcaataacaagttattatgttatttacctttgatccatgtacaaccaccctaaaactctgtgatgaacttttaaaaagctgatcaatcttctccttccacgttgcagcttcatccttgggggcaggttcagcaaagacaagtttgcctggagaaaccaacagttcacttggcaacacaataagaaaaatgtggaaagtaagagccaaaagacactcaccaagttttgtgtatatttcttcacattgatccagagtcatctgcttgactccaagagccatcgcaagcatgccacctgtcgatgtaccacatatgaggtcaaacatttcatgtatgcgtttcccagtcccttgctctatctgtttaagaatttggacagtcgcaaggcctttcatgccaccaccatccattgatagaatgcgcagacccttctttgcaactggtcttcctcttattgctcgacgcaagttctcgttctcacctaaaaggattgaagagatattcacaaactaatcaacacatatagttattgaatattcaggaaaatggatcacataaattaagattcagtaccaaaacaagcatacctagaattgccaaagcacgtgcagctgccttgctgacacgcttctcttgtgaaagagttaagcgaattaaaaggtcgcgcaaactttcagagtgcatgagggtgcgacgagtctccaagcagaaagccaaattgccaactgcaaatagagatagacgttgcacctagaaaatgggaacagatacaagtgagctcaccggtgggtatcgaaacaacacatcaaccagagtctaaatccagatcatcttgcctcagagttcttgtgtgcacaaagtgttttcagtgacttcagaacgtctttcgtcaacattttttgagcaacatgatcagaaacaaaagttaaggtgactacaacttgcaatactgattctaattcttcttcattaaatgatttcagtacagcttcaataggcttcatgatatcacacttaataagtagcatagctgatgaaatatctgatcccagtgatgaaagagcaaggcatgcttgctcaacctgcaaaagtaacttctaaattaaaagaaggaactgtgttgtgcttgaaatgagcattttgtttccacagaactttgagcacaatgaattagggagattgaatatgtaccacatgacgattatcactgcttatcatgcttataagctgcctgacagcattttcttctttgctaattgcaacttggttgctacgatcttccattattttggccaaagcagaggctagcaaagggtggtgacaggaagagaaccgaaaaacaagtgaaaagaaggcactaagtttgtgcctggccgcaacgaagtaggaattattttcagtctggaattaaaaccaaaatacacacttatcaaaaggattgctagtagtgaaacaacctagctaacagaataacaatgcaggatagtttaccaacctcaatttgtacagtgacagatctaagactttccagtgcttcaattctaatatttgcaagtgtgagatgcctaaggttatgcagtggcaaaatttctgggagaaactctagaggatttccaaacaagcgcaatacacgcaacttaggcattgacctgttcggaacaaagaatgaataattagcttaatagcaccaacaggaagaaaccgtcaataaaaaaatgcctctgtaagacaattgaataacctgaaatccagtaatgggcggacaagcttattattctccaacgataattcctccagcaaaacacactgtcgcagttctgctgcttggtcaaagggaaataagatattagattggtgcatgggctgatgggcagttgatataacataaacttgaaagaccacaagtcttcaagtcttaaatacgctgtgaaacataatttttttaagtttttaatttagatgcaggcatgatcactaaccaggtacagaaactagcatgttgttgtcgactgtcagcactatcaatttcttcaaatcaccaacttcaggtggcaaaactgacaatttgttgttgtcaagatgtagcttctcaagaagtgcaaggcgagttaattcaacaggaagcatctgccaagttttgcatagcatttcatggttagatcattatagcatctacatgtccatccctaagttttcatggcaacagatttaggggacaaacaaacaaaaaaaaaacacaattattaggtgattgctgcataattcaagcatatccatctttgcacgactaaaccaggacgtattatacagatcagtacaaatcaagaaatcaaacgaactccacaaaaccaaacacaatttcatgaaaataggccacccaggaggtctgtctgacaagagaacaacatttggacagagccacagaacaagcatttctaagaaatcttcagtggtcgtagcatgcacaatgtgtggtcaaacctgataatcagaatctctatagctaaaagtaaaggtatgtgaagcaaccaaaacatatgcccaagcctcctttatacacatccaatcaaattctcccacaaaagacgacaacactacaatgccacctcctagatcactacagcatcgagcaatcacggcggtaacataattctacattgatcaggcatgtgttaaaacaataggccgtacgggatggaatgttttcgcacggatcagggggagggggaagagatagagaaatggactcaccagcaagccgcagttgcagaggctgagcacggcgacggagcgccagtggtcggcgagcacggggacgcccgtggcagcggcaccgtcgacggccggcgcgggcgcgaggttggatctgatgagccgcgagagcaccccggcgccgtcgccgctcccggccgcggaccccgcggcccgcgccacgcgcaccgaccgcagcgcctcccgcctcctgaccacccgcatctccaccgccaccgcaccctcctcgccgccgtcgccctcccctctcggggacagatcgacgcagacggcgtcgtgcggcggggggagcgcgaccatgagctgggactggagccgcagcgcgacctggtcctcgtcgtcgcccgccgaccagtcgagctcgatccggaacccgaactcgccgctgccgccgctcctcctcgccgtcggcgaagacgacgacgacgtcggcgtggagcccgcgctggatggcgtgggaggggagcccggctgctgcggcggcggcggctgctgctggtgatggtgaggaggtccatccgcgaggtccccgtagtcgagggtgaggtggaagatctcggagctccgcttccagcccagcccccacgacgccatggcgggcgcccccgcatcaaatggcgaggtggcctagggctagggcgatgcgaggaggaagacgaggcgaggtgaggtgaggacgaggagacgcgaggcggaaggaaggaaggaaggaagggaaggaagcggaggaggagggcggagggggagaggcgttgtgttgtggagttcggtttggtttggtttggtctggtctcggtggaatttcattttgtgttttttttttgttttttcttttttgggtgttttggtcggggttttgccttccgagatccactaccaacagtccgggagggtgtggggtctacggcgtctgctgcacgaaaatttggcgagggttttctagaaggggtgcactgtgtcagcgcacgaggttgtactattttcctggagttttctcgggcttattttcctggagtggtagtatcgtacttaacactttgagattaaagtttaataattgggttcctataaaacttattcacgatagctatgatatatagagacataaataagatacgtctactgattggtcaatattctttttcttagagcttgttcagattgatatcatttcaaacccaatgattaaaactttcactaaaattctcaaccggatgattaaagctttaaactcggatatatagaacttccaactctataattcaaactttcaactcggattacaaatcatctggtcagattttgaaatattcatgtgaaaacttgaaagcttcctattcaaacccttaaacttagaaacccgattttagaagtttcaactcgatatttcatacctaatactttacacattcaactcattttcgaaaggtcatcttcgaaataaaaaaaatttaagaactttggcaattcatacaacatgcgcgaagaagaaagggtgctatgcgtcagatctgaggaaggtgggatggcacctcgtcaccgcccttgtaaagataagagataagtaaggagagtggtgccatcactgtcttattgctggagatgaagaatggggagcgaacgaagggggtgcgcggagccttactatcttcttgccaaagaggaagaacatggagtagagcagaagagatgcccgtcggcacgtcgttttgctggaggggcaggggatctttccgctacccaacgatgctagagaacgcgctcgcctgtagtctgcgacgtgaggtgaaacgataagtggatctaatgtgtggttcctggtgaaaaaaaggtaaaggaataaggtgtttgtcactttagagtctagtgaacgtttgcagttatgatcccatgatgaaccacctagtttatacaaaatcaacatagtgagtttcacctagactctaataaaaaaaaattaagtccaacactagttaactttagtaggatgaaatcatatttgtcaaatgtaaagtagagactacctcatatgagatcttcatattcttccttggtcgaaagggtattgaaagggtttatataaaaatattaattctacgtagttcgagtaagcttaatattttgattatccaatccctttatttcttgattttaaaacatcattagaatgtatgtcttggtcattagaataagcttaatatgtatatgtacccaagtttgattattcgagtattttatttcctttttttatttgacacaatgtttttttccgctgatatttgtcacagtgtttgatgtgatttttttcaataacattgatcgaaaatgggtaaagcttgtgttctaaattggtaaagtttacatcgtagatattgttttattgccaaacaatgacgttttagaagatttagttaaatggcaaatatttattattaaacttttaaatactactaaaggatttgatattttagctgtcataaagatttatgaaatcaatatagcaagagcaacgcatactaaggtcttatttggcactgctacagatataagatttcttgaagattggtattcctagctccacaaatttatggatttgattttctgatttcgttggtaacattagaatgaatcattttatttctattttaagtataaaattttgaaccactataatttgacatacaagcttcacttcaaatccaatgtgaatctagaatctgcatctgtgtcaaacatggcataaattagatctcggcatatttcttttagagtgcattcggttggagggagtttttaaggagggatggatctcttatacagattacttgtcaagaaacaacaaggaaatggaataaaaatcaaatttcagtgttaatcttaccactaacgtccacctctaaacttccaatacttttctacttcaaagaaaataatcagtgcttaaaagttttggttctgtcatgctcacaacatgtaaaaatgtctttatatgtgtatttaaatttgagtaaattttaagatatgtacagtaatacaaatttctacattcaacccaaatttcaactcatgagtcgtgaccgaacccatgaaaaagtcgaacacgaacacaagtaccggtttcaaccttatcaaattttggtaaggcaacaaactaaacacacttttaccattgccacctcatcaaattttggtagttttagaagctctctctcttaaaactctaccaaaatttgataaagatatgaaaacaaacaaaactaacactatcaaaagttgataatatcaaaatatgttaaaatttgataatattccctccgtcccaaaatacttgtcatcctagatagtttagcatggactaaggtttgagaaaaaaaaagactataataccccccacattaaatggtatatggttaggagtggactagtagtttaggggtagaaatgaaagaaatttgaatataaagaaatggatgtaacaactagtactttgtagtgacaagtatattgggacgaattttaaatcttagggtgtgtttggatggagggttttgggtggttggatggagggttttgggtggatagaacatggcggcccattttttatggctgtttggttggagggcgaatgtgggattgggcggcccagaggggaatattcccctcaaatgccggatgaagggatcagggtgatttgcccggatgcagcctcccaagcgctaggcgagctgggcgaggcgggtcgcgtcacccctcttcgctagcgagaatgatggtgacgcgagcgaggcagcggctggtgcgagcggcgagggcggcgaccagcgcgggaggcgagctcggcggctgacgcagaagagggggcgacggcgagcgggaagagaggtgacggcggcaggatgcgagggcggcgtagacgagggatgtgagctcggcggcggcggaaggcgaacttggcgggcgacgtggaagatggggcaacgacgagcgggaagaggggcgacggtggcaggatgcgagggcagtggcggcgagctcggcgtagacgcgggatgtgagctcggcggcggcggaaggcgagcttggcggccgacgtggaagagggggcgacggcgagcgggaagagaggcgacggtgagcccggagacggcggtggcggcggcaggatgcgagggcggcggcggcgagctcagggcccttcttcccgccttttttttctttgttatttttcttttttttctctatgtggatttgtagtagtgtatatatatatatatatatatgaatttgtgatttgttgggaatttgtgatttgtagtagtatatatatttaaatttgtgatttgttgtatatatgaatttgatgggggtatactcaccttctctaagtgagaggtgaccacacctgctcatccaccctactctttccaactaaataaaaaattggatcaccaaatccaccttcatctctaaaaaaaaaagaatgtatcaccatattcacccaactaaacaaaaaattggatcactacattcaacaaaatatgtaccgtcatatcccatccagttttgacggtaaatcaaacacacccttagaaatacaactattatggaatagaggcagtaaaaaaaaaaatcaaaatttcagtaacaaagtgaacaatccgaaactcacgacacctctctctctctctcccagctggttcgcgcggccaccaaacacatcgcctcgactccccccacccccacctccagcgatctccgccgccaccgtcctgcccggtaagctctaccgcccccttcttcttcctcctcgccgatcgttctatccgatcccttccccgccccccgaatcttcatcagcgcccccagatccgcacgcctccatgcgccaccccaagcccgcctcccgcccgcgccatcaccggtgctacggccacccccgcttccaccacggccggccagccggccggccggcagcgcccttatgtcccgccgccgtctcctcctcctcctcgtgctccaccctaatttgctactactactaggcgaccacctttcccaaaccctagcctcgccaactggctcgtcagaaaccaaaccctccctccaaccctacccccgaatccttactcggacgggtgggagcttcatggattagcagatgccctggaagaatgggaggttttaatgttgggtgtgccaattgcacatggttgcagtgagatcgatctggttatctgctcccacaatttaatttgttatactattttctttttttgtaacacaattcaaagccttctgttaagcaccgagttttactgtagtacaaatgttgcgaaaatgcatcatttgatctaggtatgaagttcagtaggttcaactgattggcaggtctccagcattaatgctcttcctcaaactcagttttgcaaaacagaaaggataaatagattccttttactaaaccgtgattttgtgttgattaagacgattcattactgcttgtttgttcaggaatggagaagtaccagagcaaggcccggtttgcacccctcagtgatgctccatttgctctccgcggtaaatgactcttgcatgaatatgtctatatgccttgccttctggtttgcctttgatatatcaatcaataatatgggcagccaccctattgttcataatgcggtagccaagtacattatgcaatgcagtaattgacttgtagctgacgtaggacacaaatttcttgcaaccacactagagtaagttattgtttttttttaagaaaatggaagtcgtcattggtttacacgagacatggttttcactgtttttaggttagtctctaattttttattgaactggacgctagtgtatattgtataatttgatgtacatgttttgcaactgcttcaaacaactaaataaatgccctcaccttttttcatcgttttcaggtgcccttggtagctcaaactcatccttcaacaacatagatcatctgagacaatcctcaagttctggacaagctaggagctacacatcttcacccctaggagctctgagaccaaagatgttcccatctggaaaccgactcctgcacacaagtcgtcccctgtcggctcctgttgcaaaccgcccactgtcaccccatctccctttgaagaagccgcagctgagtgctacgttctcaatctcacaccgtatttttggtgctgccctgggagctgtcattatatccattcctcttgccaccaaattcagcctcatgtttgatgtctg

SEQ ID NO: 5586 - DNA, 65816 bp, Oryza sativa
tggtcgctttggctatgtaggaataatgtggtttttttataaaaaaaaagtgatatctttacctttgcaggttatatattctcttatccattgacttcgtacatgggctatcctacagaagcctgaagcctggttcgcgggatatggtagttgtggcatgtcaacatttggagaaggtggtcaaggagttttttactcagggatatgggtggcgatctaatcttagaatttgtggcccttaaaactctatgcttttggaggagatggccaaggagttgttcatgggtggcaatttaatctttagattgatggtcctcagtactccatgccattcttttttccttttgagtgtggttttgtatgttcggctgtgtgcatcttagttatgcagaggccgaaagtgttcttagtataattgtatcatcttgatgtaattgactgagttcaataaaagcttccattatctaaaaagagccttagtttgtctaaaaacagattaaaaatatttgtactaacctcaagtgcgctgggcagatagatgatgccgaaagcaaaagcattgtcttgactcttgatttagatgcaaaatttcctttaccagagcatgtgaatcgtgaactacaagcagcggagaaagaaaggagttatcagagccagccaaaatattgcattttacaatgcaagaaatgagttggtgcaacgtacacagaaaatgagtccacgtctggagaatctgcagcttcaggtataaagattctgtacaatctttccctccacacagatatggaacgtgacaaatgttgggccagtcctttcccaatgtctcactgtggaatttgcgctcctcttccttcagccattcttctctctctttcatcagactagacggatcatctttgtttctgtccaattctttcttcagcttcctctccacccatgagtacagctcccactctcgctcaggccattgatctccttcactctgctgcagccactcttctagtggttccttcttggattcgtcttcctctgcttgctcgttcagactcgacgacttctccttttctataaacgactgttcttccatgtgctgcttcctcggccactcgtgtccctcctgcatcctctgcccacgcgaccaatatttatcactttgatacaacgactcccctttagaactcttcggcgatttttccctccagctcatcggtattcctagtgactcgttcttttgctgcatttcaataagcttcgtccgcccatgctccagcttcctctctcgccactcgcccatcttcctcttctgccacaactcaatcttacgcccctctggccgcgcatctcctgttggattctggcatcgtgcctctagttcaaatgagcactcctctatttgcaactcttttaggttacctggcaggctgttgggtggtattgaatacatccagtggcagtacttcagagtgcacctcctcaaggatgacagagaggacaagctcgatgggagtgcatggcacgaataaatctccagctcctgtagagatgtgagatactgaagccacttcttagtaatgcttgtatggccctgtactatgtcaaggcgcaggtttcggagggagggagtttggggaataacaaattccagacctactttttgcattgtatcgccacccaaggtaaggtgggtgagagaatgcatagtgcgatcgatttgagttggggattgcttgtcttcttgtgctgactcttcatttgaatctgtaactactgtagaacaatcaataatcagtatattcttcaggtttttgatataccacagtccacttttaatgcacacatctccaaaaccttggatatgtaggtactccaaggacatcaattgtttacatggaatgattaatttgcacctccggctaccacctacctctaaacgtgtcagaccgtttagcccttgcaaatacctcgagaacgtatcatcatatggatcacaccacttaattattatctctttcgtggctaaacccaacgactcaaaaggcacctttctcaatttttcacatgaaagtatcttcagcttttttaggttccgaatgaagtcactactccctgcatatgtccagctctcccaattctccatatattcaaagcttagctcctccaaggaccaaaagaccacgtttgaggttccacaaatatcagagtttatatcctttattgacggcaaaccatccaacttgagtttttgcagatgctcaagctgtccaagtggagggagaacgttcaagtttttgcaccaacttatctctacaacccgtacatgcttgagctgccccacccaatctggaagttcaaatcctgagtaaccatacagttttagctcctgcagatatcttggaggagacaaacacccaagtatcgacttggacagatcaggcaaagtataagaccatcttaattctaaagctgttatatagtccttctcaactatgttagcttgaagtgcctctgcaggatcagtcaccatctcaaggtgtgaaatacaaagggaaccacccaaatcgttcatgtcacttagctcagttatcccgtgaccttcttctgctttaatatggaattcatgtagctcttgcaatttagttagcttcccaatgccattaatttgagcaattgtgcctgagctagcatgcaagtgacgtaggttgattaagaaattcatgtctccaggtaatttaccaaatgtacagcctctcaagccaagaacctgaaggtggcacaagctgcatactgaattaggcagtttcgcgatcccagtaaacgagaggtctaaatatctgaggtgtttcgttgagctaataacatttgaaagagcggacgtccgtcccagccatttgtaactccttgaagagaaggccagtaagcgtaggcttttggaattacacaaaaaattactaagagggagatgagtttcattattgctgggttgatgactgccgtcaagcaacataaaagtgcgcaattgttcagttttaaatttatctggtagtgtatctagggcatccatgtcaactgataaatagcggacatcctgtgaaacacctctcaccttattatcgttaccatggtattcatcagaagacagtgcacttgcaaaatcccagaccaaatcatgcataatgtattcagttttccttgctgatggctgaagaaaggccctattgacaagttcgtagaaccattccccacctacatcctccaaccttttgactccactagaactgtccagctgaataaaaccattagctatccacatctgaaccaatttatctttttcaaacacatagttcctaggaaatattgaacaatagacaaagcactgccgcaaatatccaggtaacgcactgtaacaacttccaagagaagatataattctgattgcaaagttatcatctgaaacattccaccaccaactatttaagatttccctccaatcagcttcttccaactgacttctcaatgttgccccagttacctttatggatagaggcaatccatgtaacctgtgtgatatttttctaccaatttctttgagaccttccgtggacaaacttctgcagggttcaacaaatgcatatctcctgagaagtgcccatgagtcatcggattgtaaaggatccagaattacagggcctgcagtccctacaaagttagctacactgtacaattgagttgtaactaaaactacacttccaggtgctcctttgcttagtacactccttaaatcattccatagcacacatatctcattccatacatcatcaagtaccaggaggaatcttttaccttctatgatatcctgaagttgagagtaggcactgtccaggcttgtcatataactgatgttatccttgggattaaaagaatagatgatctgttctattgtaaccaactggtcagttctgtcagtcatatagacccatgcagatatatcaccaaagtgctcccgaacatttgcgtcatcgaatatgaatttggcaagagctgatttgcccactccactgattccaacaatgggaataactgccggattccgaaggtatgtaacagcactgtcatgtggatgacgaatatattctaccttgttgctcttttcattttcggggtgtggggatacttctattgcttgctgtgtccatttagacatatcaattttatgaagagtttcagtaatccaacccttatgaggaacatgtaacttctcagcttcttccctaatcttaagtgttatttctgttggtacatattgggcattgtccaataccatgtctcttatcatagctatttcctcatcgcgaccaataagaaagtcatcaccaaggaaagatttgtcttggcgagtcatggcaacagaagatgaagctatcttatcttccttttcatctcctaaggcactctcattcaggggtggtgtgtcaactatagatttgccttgagaacatgcactggcaagtttactaatgacgtataccattctaatcatgtttctgtcatcagaggagagccaattcataacatcagagattgaagagtcaggagctttcacctcagattccatgtcgtcaagaagtccctttgcatcttgtgcagccttgttcaggtcctgcagccatgcaggggcaggcttgacccgctgcaggctgtccagacggaggaagcgaagcttatcctccaccacatccagcttcttcgtagttctcttgaaggagtcgctacttttgcccagagagcggcggagcttctggaccacttcgctgatctccaccgagagaagcacagcaggatgctcatatccaagatccattgatgcggaaacgtgtttgtcgaacttttgaggcaagagttgggggtgcagggctaagctgccgtgttgaccttacctctagtatctgatggaaccaaactttttatttagagaattagagggggcgtggggcctgcttgtgttaggctgagctggaccagcacattgtccaagacatagcataatttatttttacataaacatatacccctctatccacccgtataagcatctatctattatatattattaaaaaaagccttgaaagaagacacaccattcgttatagagactagaaaattctcacattagttggagaaaaaaaagaaaaatatcttagtcgtcagatcatattgggtttggattataatggtatagattgattgatatagctataaaatacaattatatctacaaaaatataagttgagagttatatataaagtctactgcgttcgttgggtggagaaagagagagtttatttcgttttccgcgcacacatttcccaaactactaaacggtgcgttttttttcaaaaattttctatagaaaagttgctttaaaaaatcatattaatccattttttaaatttaaaataagtaatactcaattaattatatgctaatggctcacctcgttttgcgtatcttcccaatcttctcaatccccttctcctcaaactctctataaaaatagaatttaagagttaagagttatatatgaaatccatgaattatagaaatactccctccgtccaaaaaaacagtgaatggatgcgacatattctagtacaacgaatctggacagatgtatgtctagatttgttgtactagaatgtgtcacatccagtattaggttgtttttttatggaacggagggagtggaagctaaaagttgtatatgaaatttatggattataaaaatagaatctaagagttgtatatgaaatccaaatgctcatagaaatagaagctaagagttgtatatgaaatttaggggttacaaaaatagaatttaagagttgtatatgaaatccagatgctcataaaaatagaagctaagagctgtatatgaaatttaggggttacaaaaatataatctacgagttgtatatgaaatccaaaggctcatataaatagaagctaagagttgtatgtaaaatctacggattataaaaaatagaatctaagagttgtatataaaattcagatgctcatagaaatataagccaagggttgtatatgaaatccaaatagatttctacatgcaatgatatcttttggggcaatcctctagttttattataagagtgctaagttttgacttaactatcaatagcaaaaaaaaaaaatcataaaaattcatggcataaaaaggatgttgttagatttatcattaaacaaactatcctaacatgcaacttttttaaaaaaataaattatttttatatatattattggtcaaaatagtacattgaagatcgatcatgtgaaagtctaaaagtacttatatttgtggatagagagaagtgggcttatttgggaaagcttatagcagcttctctaaaatcaaaagctcctcaaatattacagcttttgtccacattctaaagctgatgtagttgcgtaattcaaagataaactagaagctagattcaccttagcttgctataacacaacttgccataacccaacatgtcataaaaaaccatccttatttaaacccatggataagatgttaatggttttgagatttaaagtaccaatagtagttggttttataattaagggatcaaaatcagacaagtttatagtgaaaggagctagatacatattttttttaattaattgacaactctgatgtcattgcggggaaaaaaaaagaaaagtcagattcatcttaattcattgtctgaatgtgtatttaatccctattgagaaaaaacaaatgtaccttatgccactaacaacgaaggtcgactactgtagcattaagaatgctcccactcagattccattagctggctatgacccattcgcacacatgcccacatttaggtcaatgactgaacacaccaattagctggccatgacccattcgcactcagattctattagcttatgagaacatctgccagtcctcttctactaggatgcaattctgaactctctttcctgttccgtgctactagttgaagccttggagttggaggggcgacctcgacatggttggaggcggattgaccatcggcggatggttcgcaggagctgtgatcgccaacttcgtgggcaaggcgcgttccatcctggaggagcgccatgagctgcatggtgacgttgcgggtgtttaacgtggaggcttcccttgttcatctgcaagcagtgcttgatgtcgcggagcgaaggcccgtcgtcgatgataatttcaccggctggctggagttgatcaagaaaattgcttctgaggcggaagagctgctggatgactttgagatcaagagaatacaaaagagccaacagaacaaggttagcggttttctggcatacatgatgaagaatctgggttttgttgatgatgacatatacagactgaagactctcctggcaaggctcgacaagattgccagtaagtctggaaatttttttgacttgttaaaattgaatgattctaaagaggatatggtagggtttcttccagaaatacaagtagtgttccatggtcgtgagaaagagaaggaccaattaatgagcatcatatttccaaatgaagcacaagctgaacattttccagcatccagaatgcaggaagagacacggggaactgcaactgtgaaagttgtatgtatcgtaggcgaggctggggtaggcaaaacagcacttgctcaagtaatctataaccaccctaatgtcaagaaggccttcaatcagagaggatgggtctctctctctcaaaggtctgactcagaggatttcatcaagaaaatattttgttcttttgcagcagaacagcatccttttgattctgaaatgggtctggaaacactccaagctagttcggaacatgatctctccaggaccatacagaacaagagattcttccttgtccttgacaatgcaaaggataacctgcaacgtgaatggaagactgtgagagcaaaattaactggagcagcagcagggagcatagtactggtgacaactagatcagaagtgactcatgccattccaggaggtatagttataactttggataaaattccaacatctgttctctcgatgattctgaagcaccacgcgtttggactcaccagaaaagattctctggaatcaattggtgacaaaatagctggtaagttgcatggcctgcccttatcggcagaggtaatcgggaggcttctcagaacgaagttagatgaagaccactggcgaaatgtttgtgaaagcaattggtggaatgactatgaagatctggtcatcactaatcctgctttaccttcagtaacgattgcactggaattcctcagaaatgacctaaagaaatgtttgggttactgttccatgttcccatccagttatttatttgacaaaagaaaaatgactcaaatgtgggtgtgtaattctatgcaacaacatcaagaatccgcatatgagatcacagacattcgatggcttgatgagctcttgaacaggtcacttatccagtcaactgtatggaagggtaaatatacagtgaatgaaatgatcaaaaaagttgtggcctccataaatcaaacaggatgttacacaatagacgatttacacagtcccagacaaaacctttccaatatcatccacatggcagttgacaaatatgatttcgaagtgtcattggacctaagaaaacaaagcaaggtacggagcattttattttttgatggccagagaacaaccatgctgaatacagcccttaatagcatattgcctgtttcaagttccctgagggtgttagacctgtcttgcattgaaactaagatggaaaggccccctgatgtcatcagtacatgctctcacctaaggtacttggacctatccttcactgggatcacaatgtttccagactcattctgtaagctactccttttacaagttctaggtatgcgaggatgtagattcacagagttacctagggatatgaataagctagtcaacctgcgatatttatatgcagaagcttgcacactctctttgatacatagtataggccagctatccaagcttcaatacttggaagaatttgctgtcagtgaaaaggaggggtataggataacagaactgaaggatttgaattaccttggtggccatctttgtattacgaatcttgagaaagtggcatgtgtgaatgaggtgtgtgacgcgcgtcatgctgagctgtctaaaaaaatgtacctccagaagttggctctaaagtggaattcacagccagcaacacttgatggttgcacggaaactgtttcacacctaaaaccaaatggacaacttaaggatctcgagatccactgctacatgggagtgaagtttccaggatggatagcagatgaccagcacttcaccacactgcgatacattaaattcagtggctgtaaaaaattggtagaacttccacctcttggaaatctttctcaccttgcggttctaattctacaaggcttggaacaaataaaagatatcggaaaggaattttatggcagttatgacagggtatttccatcccttgaagaactgacgttccgtgacatggaaaattggaggaggtggatggatatagcaccaacacaaattattccacggatcagaaagattgtgataaagaattgcagaaagctagttgatctccccaaatttgttcttgtaggatcccacgaactggtagaattgtaagaacagaagaagccgaggaggaaaacatgacatgtttaaaagttcatgattgtttggcaatcatgattgatctcccaaaccatttgttggcgtcaaccgaggtatggaatcttcaaatctgtgaagtgtgcttccaaggagagtaagaacataagcaactaagggaggttcttgaatcttgaccattattgattgtattgaagtgagacagaggaagaaaagaaaaaaaaagctagccttgtcttctttcttgaatcttgatcattattgattttattgattattgattgtattttttcttctttcctggctattgtctcctaggactctagccttgtaatttttctcctgctctattcaatgaatcttcgcgatgtctggtgcggatcgttcaacaaccagatttctggtgtgaatcctagtttttaagacaattagtggtctatgaggaatgcaaaaaaggtttcaaagctatcgactacccccttggcttcattttcaccccaactagttcgggcccacacctcacccaccccaaggaggcaaacaagtatgtttaccgatctccttaatagccgtaccaagggataaaacttgctatattttgggacatatgaagtattttagaaggattggtttaacaaaatatgtcttcacaaaaccatattttgcaggttagcatcttaatgcatactataaggtttcaccagtaatttttcaacaaaaaaaaaatcaaggccccttgcagtttacaatggtcaagatggatatgtcagtttcttctcaaaaacttagaaactacagtgctatattttggttggctttcccatttccaccacacctatcatccatttcaggagcaatgattttcttgaattttgcagttttcaggttactgtgtataatatattaagaagttggtggctaatcttgaagaacaaaacaattgagtgaagaggccacggtgtagcaggtaaacaagttccctgactaattgcaatctcggaccataggaagagcaagaggaaaggcaaaccttttaccatcagatagtccacttctgtttatgttctttttacattatgctgtaatctgatatctacaggtttcttattgctcctattaatatagcaaaagcactccactggattttcgaaaaaaaaatactatgtacttcctttgtttcacaatataagatgttttaggttttgaatagattcatgcatggatttatgtatgtactccgttcttcatttatgtgtccaaattaatatgtatatgtgcgactctagacgagagatggagaagccaaaatgtctaataatatggaagagagggagtattatattttctatcaaccttttagctctcagagttacccttttttcagaatcattgacagagtgaggtacaatgtacatgggaactgctagtctgtagattgttcgttatgtattcagaggctgcacaaatagacctgaatgtttgaactatctatgatttgaagaattcgcccacttgaaacatgggaccttctagcaacatgaacagggttcacgcggagattagccatgccacaagaaagataaacatagcccgtattaccacacagaatgctgcaatgctatattatacacaaagagccgaagaggacaatcatatttaatactgagaacggcaggcgcgcgatggggggcgtaccttaattccgagttactccatcagaaagataccactgcattgtcatcgaataggacggctgcatgccaccgcatgattgcggattcccggccacttcagatgatcaaatcgacgccttcatctgtccgcacctggtgcagagcgaagagcggagtcagggagaagtgcgcatttcgtcgagcaagtggcgagcaccactcacctgggcaaagagacggcccgcagaagcaaccagcggaggagaggagggggagctcgcctgcatcacctaggcaccgcctgcctcgtgaacgccgacacggttcaggagcccgtagaggtagaggtagagcggctagggccatcggcctccgccggcgtgtcctcactcgggactcgggagagggcgtgaggctcgccgcctcgcgcccttcggggaagatgcagaatttttattttatttttctgttctgacctttattgacacgtctcacgcagcaggggttaggccttgttcagataaaaaaaaattgtggcaaaaaatgtcacatcaaatgtgtgatattaaatagaaaaaaaaaccaatttcacagtttacatgtaaattgcgagacgaatcttcttttttttagaaacacaatacaaacgcagacgctcacaacgtgcgcacactcacccctataaacgcacacacgtacaccctacccctatgagcacctccgaaagactgagccgacatgtcttgaaattgacgaagtcaccacaggcgcctcgctgtcgacgggttcgtcgcctaccactgaaagaataattagccgtaaatgcgagcacccgtgtcaaatctaggatttgaacttggatgggctggttccaccacaaggaacctaaggaacttttgcgagacgaatcttttgagcctaattatgtcatgatttgataatatggtactatagtaaatatttgccaatgatggattgattaagcttaataaattcgtcttgtagtttacgtgcggaatctgtaatttgttttattattagtctacgtttaatacttcaaatgtgtatccgtatacttaaaaactttatacccaaagcactaaacacacccttaggatttctttcttttaactttacttgacggagttgcattgcttcagctcatttagccgtatccaaaatttaaaatttgaaattaaagttaaatttcacattgatgttttaagtcgttaaaaacacctataaaagttgttcctataaataatattttatcgctaataaatcttttggataatcagttctagacgaactgatggtcgactataaagaaaagacaattatatacataaaatttgtagtaattgaactacatactgagaaatttcggctacttcttaggtccaacaatataagcatttctaggttatttttatcagattataagttgaggtgattaatatggcaagtactcattccaacctaaacttgacttgtatttacagctaattttatatgttataagtactggacaacacgcccgttgagatcgaatgtctggtgacttcataaatattaagatatctagctcggtttttaaagatacttataaagataaaatatacatgtgtgcatttatagaagtttaggatcaccgtgcacgctcacttttactgattccagattcatatctgaatcgtcgaaagtttgtgcaagtcaaaatcttcgccgggcttgtccaagttgatttagaaatcatcacaatcaaaggcatgctaacatcgattacaatttacaaaacgccatttaggtgatctctcagcctgatgtttcctcagtcatgtacaacttttaaggggcggaggcaaggaggcaagcctagggcagcttgggcataagccctaggcttgccaccataaacttgcctaaatccttttaaatcaccatgtattttttttagaaagccaatatcctattagatgagccctacttaagccctaggcgtagaaaatttctggctccgccacttaatacaagtacaacagctctgcaaaccgcagtcaattccattgctcttcatcgattctttggcttttaaatcactcctggaacaaccatcagcgctatcagttagatgctggatcatgatcaccaattttacaggcgaatgcggcaggagacatgtcagatgttacatgggaacttttttcctgacgctttccaagtgcttcaggtgtgaaattaacccccgatctcctccgatttctgtggagaaagattaaccgaacaagaaccaacaactagctagcatgatgcgtcgatatagcttgagagaggagccaactgccggctatctcattttcagaagcccatttcaccagttcagtctggacaatgcctttgacactccggatatcagtcacgttacgtagctgcatcatattagttcctctgctgcaacgcacaaagacaccgttggttgtcctggacctggtacaacatcaattacaagttaattagcatttagcatcaacaatctccttcaaacgaaataaaaggcacctacaaatcttgaaggccaaatgttacttgatcatgtgtttaagataagctaagaattcatccaaagaaacgcattagattactagcatattgcccatgagttgcaaggatattttaattaaagaaaattattattaacccattattaacatatatcatcttttaatttacatatatatatatatatatatatatatatatatatatatttgttaccgacatatgtattctctaggctccacactatctttttttcctttccataaaaaataaggagttggtggtggtggtggttgacatatggaccatacatttccttttttttttccaaatagtagggagttggtgttgagagtggtggcagattcaccactcaccactactctctcttttacaggagtatcgatactgttcaccaacactagcacccattttacctgctctctgttttgttatttttgaacaagttgtgtgatataactacaacagcagaaagcactaaggttaatatcagctcacttgacacgcgacaagcacaatccaaattccagaatctacacaaatacaagcctataatgtgaattgtcattggtatatcgctggataatttgattgtcattggaatacacacacacacacacacacacacacacacacagagagatgtaaacaaatcatcaaactctaccccaaactaaaaatttatcaaattatcaaagcaacatatcattggatcattggatgtattccatgtttcttctggaaaatgaaaaatcaggctaaagttggttcattgtcaatgccttataatatacatccaagtcaaactccattgatgcaattatttggggattttttttcaaatttatttgatgaccacgtaattaggattggcatgataaatggtacagcatgtatgaatagtttgctttgatttaccgcagtaataagagggacaacaacagaagtagtcagtgacaaattgaataagactgaatcaagcagtactacagtagcatgagcaaattaaaggaagttaaaaagaaagaaaacgtactagaaaaaatggtcaaacacttctacacaagaatacctttacacagatttcggaaagctgcacgctgaagtttcacagataaaaattctgtataatatctccattcacacggatataaggaatatgagcaatctttggccagtcttcgcccctactcttgagccacacatcttcattattttccagttcatctgaattattcttcagccagtcctcttcttcattctctaaccactctcccttatcgttcagatgatctgtagcactctccacccactcttcctcatactttaaccacccttcccagaactcacatgttttcttctgtcggtactcgtttatcgtctctttatgccattcccctctcttcttcttcacccatgtctctccatcttccttctggcatcgtgcctctagtataggtgagcatcctaatatttgtaactctcttaggttacctggtaggcctttcaatggtagcgagtgaatttggaaacatgactgcatatttaacttcttcagggatgacagagtgaccaagtttgatgggagctgccttagcaggtagcaacaagagaactcaagctcttgtagggatgtaatctgctcaagccacttctcttggtgaagagagatcacatcgatcttgtggagacacagagttcgaagtgctgaaagcttgcaaagaaaattatcaagatctgaagactgggaaaggttatccattgtaaggtcagtgagatattgtaaagtatgcataaattcttctttttgcggagaaccgggaagggggagttctctcctttttgtacccagctctttggctatattgaggagtccacttttgagaacaagtgactggtctttgcccaaccttatttcccagttagaaaacagtcggttaatctcttcctcaactgtcgatatgattttgcggcagccagaaatatgtagatttttaaggttgttaagacgaagaattccaccctcaaagtatagctccttacaatttgaaagatgcagattctccaatgatatcaggttttgacatggaaggattaacttctgggagcaatcatttatgctcaagtgtgtgaggctagttagtttttgcaaatacctgaagactgtttcagcatatgatccacaacccgtaagagagagttttctgatagctaagcccaaggacatcaaaggtagttccctcaagttatcacatctattaatctgcagattttgcaggtttgaaaagctttcttcgttctgtgaatctgcccaattttccaacttccccatagactcaaaacacaggatttccaaagatttaaaggccacatttgaggttccatagacatcagaactaacatccttcatggagggcagctcatgcaaaattagtttcctaagatgctcaagctgtccaaaaggaggaagcacctggagttctgtacaatggcttatctcaataacttttatataccggagttgtacgacccaatctggaaaagccaaacctgtgtagccaaaaaattttatcgtctgcagatttcttggtggggacaaacactctaatatctccatgtcttgatcaggtttaattacctctggtggattcatcagatatcctgatatatctgaagtataattcttctcaactaagctagcttgaagtggctgcttttgacctctgtcgaattgactcaactcctttccatatagattatatttacctctagaagactgatttctatcccacttcagagctaaacaggtaacatactccttccttcctaagttagcctgaattgcctcttctcgattagccaccctctgtagatctgatatacaaagggacccttggatatacctcatgtcctttaactcaattaacgtgtgaccatcctctgctttaacacggtattcatataagtcttggagcctggtaagctgtccaatgccatgaattaaagcaaccgtatctgcatctgcatgcaagtgccgtaggccaactagtgagttcattcttcttggtaattgtgtgaatctacaacctctcaaaccaagaacttggagattgcacaagctacataatgaatcagggagtttggttatcccactgtgtgaaaaatccaagtatctgaggtgagtcaaatagggcagcatctgatgtgttgtggtgaactccacaaattgtgcaatgccatcttcttcaagtggataatcaccaatgcatgctgttgctgaatttgctctcaagttagataagctcaacaagcgcaagcttgttgacctatttagaatgctaccaataatgtcacaataccttttcaaaatgatagcaacgatatcaacttccccatcatcaaaactgaaagaggaccactcagaaatgttatcagcagtgtccttgtcagtagtgttataagacctctcagaaatgctatcagcagcatcataactgccctccaaaatgttgtaaatgttgttgaaacctttgctagagttgttatgacggaagccaccgaataatattaatgatcgcaactgtttaatgctatactcggtccatggtatattcatagcatccatatctacggacaagtgacgtacacttcgtgggagatttcccattgtacaatcaacaccctgatattcattagaagataaggcgattgcaaagtctctaacccaactatgcataatataccaagctttccaaactgtcggttgtaagaagcacttattgactagttcatcaaaccattcaccagctacatcctccagttttcttgcaacagtagtgttgtccagttcaacaaaaccattagctatccacatttggatcaactcatatttttcaaataaataatttctaggaaagattgaacaaaataccaggcattgcctcaaatatgcaggtaattcactgtgacaaattccgaaagatgatattatgtgaatgtcgaagctgcagcttgaaacattccaccaccaactttctaagactctcttccaatacgcttcatccaaacaatttcttaatgatgccccaatgaatttcgctgccaaaggagatccatgtactttatctacaatttttctaccaattggttctagagcttctgtactttgataactggcaaatgcatgatgcttaaaaagcttccacaggtcatcataatgtagataatccaaaaatactggagttgtagttcccacaaagctggccacactatacagattggttgttactaagacaacacttccaggtgctcccttcttcagtgcactccttaaatcgccccacattgcacgtatctcatcagatacatcatcaagcacaagcaagaacctcttgccttctatgacgctctgaagttggacacggaggctgtttagactgaaagcatggtccagcatattatgctcaggttgcatcgatacaaagatctgcgccatcggttcttctttcctgatgttgtcagtgaaatacacccatgcggaattaccgcggaagtgctcccgcaccctttcgtcgtcgaagatgaactgagcaagagctgttttccccactccacccactccaacaattggaatgacagttggattgcacattgaactgacagtgctgctctgcaccctggtgtatttcactctgctgcccatttctttctggtatgctgctgctgattctgcaggttggtttctctggtcagatagatctatgctccggagggcatcgatgatccatcctttccgagaaatctgtgatccatcagcacttgccctctcctcaaccgattcatccgccacgaaacgggcatcatccagtatcatctccaatatgacacctatttcctcatctcgcccaacaacaaagggttggtcagggccagggggcaaagcggcgacgtcatcccccggggtttccagtccatcctcgtccaggcccggcacgggaagaagcgattcgacctcggagcacgcgctgacgagcttgccgacggtgtacttcaccccgaggaggaggctgctactatcggaagctgcggccgccgcggaagcctccatggcgttgaccagctcctccgcctcgtcggcggcctccttcacctgccgcagccacgcggccgcctcttcctccctgtcggcgtcgacgccctgcaggctctcgccgcggaggatgctgagcttgtcctccagcagatcgagcatcttcatggtgcccctgtacttgtgggcgtcgctgctgcctcccaggtggagacgcagcttgccgaccaccctggcgatcgccgccggcagcggccatccgttatcttctactagctcctccattctcgcgattcgcgagttgcaggggaatggggaatttgggcggggtgacagtgataacgacagagtgaggctgcgtcaccgggagagagagagagagcaaggctgtgtttagtaggggaaaagaaaatttttgggtgtcacatcagacgtttgaccggatgttggaaggggttttcggacacgaatgaaaaaactaatttcagaactcgcctggaaaccgcgagacgaatcttttgagcctacttaagccgtcattagcacatgtgggttactgtagcatttatggctaatcatggcctaattaggctcaaaagattcgtctcgcgatttatagctaaactgtgcaattggtttttctttttgtccacatttaatgctccatgcatgtgtccaaagattcgatgtaataggtgaaggggaaaacttttgggaactaaactggccccaaaggtaagggcccctttgaatcgcaggattgagaaaacgtaggaataggaaaaacgtaggattttgataggaatgtaagtgtaaaacaaaggattgcaaaacacaggaaaaatacaagaatgactgtttgattgaaccacaggaaaaacacaggaattggatgagagagatagactcaaaggaaagttagcaagaggttgaagctcttgctaaatttcctccaaaatctctataggattgtccattccataggaatttcaaaggattggataggattcaatcctttgtttcaaagggcttcataggaaatttttctataggattgaaaacctctaaaattcctatgtttttccttcaaatcaaaggggccctaaaaatgttggattgcggtatgaccggcgttgacagcgagactttattttttttaaagggtgaatagctaagagcacccgcaatggtaaagtaaggtgctctctataaaacatgtacatctcagcaataaactcgattaatagtaaaccaccttaatagtatgtctacattggtatctatagctctctcatgcattgcctcgtttttctctatagactatctctaagttagtagatagttttgctctctctctcttcatttaataccttccaagtaggaaaatatgctgacatggatctcttatagagagcctatagataaccattgtgggtgccctaatatggttcctaaagtgctttgggttcagttcaatccttgaggtttcaaatcgtccaaagaaagtcctccaaaataatcatttgtgttaatatagtccttggaccacaaaaagtgacacgtgcgtatgccaagtcatcctcatatgcagtgatataaatgaaatggccattctactcttatatactatatagaaaagaaaagaaaaaaagataaatgtctcacacatgtatgatcgttttagaattgtcacttacgattgctgcagctaaccactaatcctatcttactataaagttagtggggtccttaagcttaacatgcaaagatgtcacatcatcatccactaattaacaagatgccacatcatcatccactaacaatcatcatatttaaacatcatgcaaacaagctatatctttatagtttttataatttaagagcttttcaaatagaaacatgttaaattatcatccaacataattcacataatgtttcaatgtatatctttattatgttttatgatatcctatatacttatatagttcatcctcacttaatctgatgttatctagctatcttacacgttatttttttattattatcatactaaatttccgcagcaatgcgcggggtttcacctagttgtataaattcctttgtcggtcaccctccgcaacaatgttgggcctggactagcctgttatttttttttctatttgtgtctttttttttattgtggtatataagggtagaatggtcatttcattcatattgctacatgcgaggatgacttggcatgctcacgttgcatttttttgggcccaagggctatattaacccaaataattattttagaggacttgtttggacaatttagaacatccaggactaaattgagcccgaagcgaaacttcagggaccatattggctatttaccctttttttttaagaaattacaaacacactcgtaacgcatacactaccatatatctccaaaatactgaaccgatatattttaaaattgatggagtcatcacgaatgccttactgtcgacggaactaaaaccaataaaaagaactcacctttgaactttttttcgtaacgaaaatatggaaaagtgtcatagactcttagtgtgtcgttaaaagaatgagtccatctcataatataagggattttgcccatataatatgtcctacaattttagggatttggatcccaaaataatatactccctccgttgtagaatataagaaattttaggattggacacgcttattaagaaagtagctagaactgagtggtcgagggttgtgattgaatatatcaactgttatattagtttattttttcaccaatcaactcttgtattaacttattctccatctatcaaatcttatactattttattcttccatctatcataatttatactatgttatatccttttactatatccttaatttatgtttaaaacgacataatccttatattgtgggacagaagaaatattttactaaaacaattaatagtaccaattgaaggagctgttaatacatgtgtattcaatttaatgtttattatcagtacttgtttgagttacgcaagccactaccctcatctttaaaagacttcatttttacttatggatttgaacaatttgctcgtaccattaggaagacaatcccttaaattagccataaataataccccattcgttttaaaatataaatatttttaggatttaaaatttatacctcaataaaaatatttctacggcacttatttcaatacaagaaaagtccacacatttttaattcaaattcaaattcaatcgtaataggtgctaaacaacccttttactcactttgtttcataatatattggatatgtttttcttctgtgcaaaaaattaagaaaatagtataagtaagtcatggtacaaaagttgacaagtgagaaataaataggaaaaaaaactaatataaaagttactaaatgtttaacaaagtttcttatatttcatataaacgaaaaggcacataatctcttatactataagagggatgaagtgttttggagaactagggagggaggtaggcctagtacataactcgaaccctactcctatctccaaaattatggccttgtttagtttcctcttttttaaaaaaaaatcattagacacatgcatggaacattaaatatagataaaataaaaaaactaattgtacagtttgtatggaaaagcatgggacgaatcttttgagattaaatagtccatgattagtcctaagtgctacggtaatccacatgtgctaatgacggattaattaggcttaataaattcgtctcgtggtttctagacgagttatgaaattaggtttttttcatttgtgttcgaaaaacttttccgacatccgatcaaacttctaacgtgacacccaaaaattttctcatcccgaactaaacaagacctatgtttattcataaattctgtagaaatcagtaattttcggcttcgccactatttagatcgtagagagtaaaatcgaaaagaaaaactcggattcgcccatggttttgcacggagccattcggtacgggctcgatcgtgggaaaaatggtattgaaagcgaaaaacccaaaccatggtggtgccgacttgaatccaaccatagcatccactgcgtcgcgggctcgcggctgcctgctttggtcaactgcccacttcgaccaccgccgagagctcgaggaatggtcgggccggagctgacggtcggcgggtggttcgccggcgccgtgatctccaacttggtggcgaaggtgcggtccgccatggagcaccacgccgccctccgggccgccgccggcgacatgctgtacggcgtggaggccgcgctcccccggatcaggatcctcgtcgaggcgaccgagcgcagggccatctccagggccagcttcgccgcgtggctgcagcagttcaaggacgccgtcgccgaggccgaggacctgctcgacgacctcgagacgcggaggatccgggcggcgctcagggccaggggcagcaagctcggctccgccacgtccctcgcgctcaggttcctcaggaacctcgtcctctccgatggggatctccagaggctcaaggacgtcctggccaagctgaacaggatcaccagcgacgcgaccggcttccacgacatactgaaactggccgacgacgacgtgggggcgatgcgatcggtccttccggtgccagccaccccgccggcggtcatcggccgggacgaggagcagcagcagcttgtgaagatgattttacgccccggcgcaccgccgtgtcctcaggatggagctgaatcctgctctggtgtttctgtcatatcagttgtgggagcagctggtgtgggcaaaaccactcttgctcagctgatttacagtgatccaaacgtcaaggaggctttcctgttgaggggatgggtgtttacctctcgtagctgcagtcgaacgggtctcgaacaagatatcatcgagtcttttgcgtctgagcaagaggaaaatctgcaaagaaagtcggtttcatcagaaagcagtttgattgatgtcgtacgaaacaagaagttcttcctagtcctagatgatgtgcagcataatctgcacagccaatgggattccctaaggtcgacactggcaagaggagcaaatggcagtgttgtattgctagtatgtcaatcgaaagaagtcgcaaatagtttgggagcgacagctcaggttccaatgggttacctgccatctccagtgctctggagagtatttgagcaccatgcatttgggaatcagaaaagagcttccctcgagtcaattggtaaaaaggtgctccaaaacttgcatggattgcctttgctggcagaagcaattggaaggcttctgagacaaagattagataaggcgcattggcaaaaaatttcctcgagtccctggtggctcttttctgaagatgaagacgatgttgcgctaccttcagtggcaattatgtgtgagcatctatgtgatcatcttagaaagtgtttgtgctattgttcaatattcccatctggttatttgtttgaaaagaatatgttgattcacatgtggatagctagtttcatgcaacaacatgacgggattgggatgaaagaaatggaaaaggaatggtttgatgagcttttccgccgatcattctttcagcccacaatctggaaaaataggtacatcatgcctgatatgattagaaagccattatgttccattgctggaaaagaatgccatgctgctagtgagttgggagaacagaaaagacggctccaagattaccgccacctagccatcagttttcctgattttaatgtgcacctagacttgagaaaggacaacaagttgcggaccattttgctttttgatggtcgcaaaacaatcaaaccacacgaagcatttgctaatattctgtcacacctaagtggcctgcgagtattagatttctcttacagtgaagctaaattggagaaggctcctgatttcattaacaaattcacacacctaaggtttctggatctctcctttactgggatgacagtacttccagactccctctgtaagctgcacctactacaagttcttggattacgaggatgtcagttcaaggagttacctagagctataaatgagttagtgaacctccggttcttatatgcagaagctcacacggtttccttgatatacaagatagggaagcttactaatctccaagggttagatgaatttcttgttggtagaatggatgggcacaaaataacagaactaaagaacctgaatgaaatcagtggacaactatgtattggaaatctggacaaagtagcaagcacagatgtagtgagtgatgctgaattattcaaaaaaaggcacttaaagaagttggtattcagatgggggttgacagcatgcaaaccattagccgaagctgatggtttcatgagaactcttgctggcttaaaaccaaatacaaatcttgaagaactgaaaattcagtgctacatgggagttggatttccatcatggatggcggaagagcagtacttcatcaatctgcggcgcatccatcttattgaatgcaaacaattattaacacttccacctcttggacagctcccatcccttgtagttttaattcttcaaggcctaacagcaattgagaaaattggatatgaattttgtggaaaaggatacagggtatttccatctcttaaggaggtgacatttcttgatatgccaaattggaggaagtggtcaggcatagaagaactacaagatttgcaaattcctccatttccacagcttagaaaggtccaaatcaagaattgtgaggtcttaattgacatgccagtatgttgtttaaaagcgtcacttgaggagcttgagatctctggttgtaatgaaatatttgcctgtaatccaagctgtttagatagattgacttcccttgtgcgcttgaagatccaccattgtttgggcaaaatttatcttccatgtcgattgttggagtcaattgaagttttgaatctccaaagatgtgaagtttatttccagggaggtaaagaacatttaatgaaattgaggaggactgtaacaaatgatgttcatgaattgaatttggatgaatcgaaagcaatcagtacagagctgttagttcttaaactttctgaaggtatgttcaattatttctttgtccaaaattactttggacaaataatttatgaaatagtatcttttatattcctgtgtctatattattggtttagaccttggaagtatagactaaagcttctttgaattgttttatattttcagggtatcactacttgtcttcatgctttcttaacaaatggaattttgaagcatcttcagtttcctgaaacaagttggtctgatgcaaagttagcaaggatgaaagaaagtttatgctactgcttttagggcatactttagtgggttcactctcattatacaagctaaaatttgtataggtgagcttgttgaacataaggtgcttctgcagggtgatctaggaggaacatgttggattttaagaggctaaagtggaggatttaggttttgttgaatcacttcaagtaggtttttccatgttgatagccaggccggacagaacttatcaaattctagggtacttattaagcattagttcattagggatgctgattaagaattctgcttattaaggttctggctccgatcagcacttgcaacaaatgctgcacattttagtaggtaaaggtgcaaaatgtgcatcgtgttgcctccgatttgtagttatgttcattacaatgaattagagctgagaagtgcaacaaagatgaaaagtatcaagaagttgaatgaagaaggtttgctgtttgcaatccatttttttatgcattgaaaaatagtttaaacaaagtagttgctggctagctgcggactgcggtcttgttatcgtcttatcctcttatataactagtataaatttagtacaaaaaatgcctagatctgtgaatttgcactttttcactctgacaacccaactagtgctaatttggtctagattccttcatctgtgaaagtgtgaatctgcccttctctgacgagcattttttttttttgagcaaagggcagagccctccatttccattaaagaaacgcatgagttcttacaaaaaaaggagtcttggaaaaccagaggggaagaacccccaggtgctcacaaaagaaacaaaaacaaaacgaaagccagctagcacaggccttagagtttaagctatctctccacaactcatctcatttctctccaattcaccattgtgtcctcaactaccagctaatcttctttgcctgatgcgccatccgaactgcgagttgaagacctcatttgccacttgttttagcagttgtgctccccattgcaaccttccttgtctttcccccgaattctgcaaaacagcccaatccgacaaaaaggaacaagcattgtatataatgtcagttgggttatttggtaagatttgatcaaaacaagccttatttcttgctttccaaatgcccaaattatagcagccacaccaactagcattagttgttttgtaatttgtcacaaggttgaatccaggaacttaaagcatgtctcaagtctttaatctgattcataccaaaagcacaaatcacaacattccaagtgaatctaactaagggacggtcaaaaaataaatgttgaattgtttcttctgacgagcatattactgttgatttattgcctagatgcatagattagtgaatttgcccacatctggcttcacatctcttaacaatcagttcgaacatttgcaggaggtggaagataatgtgttccattgttttgagcagggcagtaacatcgtttgaatttttttttattttctctttcctctgcaatttgctaactacaatttaccatgaaaaagatccagttcaccagcatgaacaaggaaaatccggaaattccaacaacattcaaccctgacccacgaagaagggtgcactggcgaaacatgagatgcgcaaatagcgtggcgtacctcagcctttcggcgttcgtcatgtcagggagagccgtggcctcagccgccgccaccgccagcccgcccgtcggagtccaattgaccgtcacgtctgagcattcggaatggtcgatcctcagcccacgcaaaacctgccatccaacaggcaaggttaaatggaaagggaggcgagagcatttcgtcgagcgattggtgggcacggctcacctgccgcgtcggaggccggagaggcaaccgcaaggaagtggagccgtgccactgcccacccccgacgcttgcgccgagtgcacctacccacgcgccgtcggactaccgaagtaagccgcccgccatccaccggacgactcctcgctccatcccgccatcgccgccttttagaagagagtcccggtgttctctgccagtagaaatctaaatttatatctagttttatttaggataccacctattaataatagaaatatgaaagggcataactgttaaataaaatatgaacgcggaaagctaaatttgtactactcttttgaaaactagcaatgcacaagtaaggatcttctaccctaatgttattatcattacagtcattaatatgtgtgtcatatttttttattgtactacatgtcagtttctgtaatgataataccattatattgcaggatgtgaatccacaatgtatgaacaccatccactcccctcgatcggagccgtcgtcaccgccgccgacgccatccattccttcccaatctccaattgcagtcgccgcctcgttgcttcgtttcctccggacaagggccatggaattggccggcgcatcgccacccacctggtctagtggtcttggtcagagttctgaggttttcttgtcacgcatgtgttagctcctagctaacctgcaaattagaattccactggcctcctcatccgccgtcgtcccgcctctgggccgaacgcgaattacgcacaagcatgcgttgtgtgcgtccgtgtacatgcatggtactaggatagatctggtaaaatctcctaccagaagaaatgaccattgtcaggtgcaggagaagcacagccaaccacaggtcatgttcagaactatctcattttgcaagctgaaacatgaaaattgaggttgaacaagcatctcgcttacaaatcataccattgaacttgcacaataacatagactacaaacaaagtactaactgattgcaggtactaaactgctattaactgataatacattatctaaagaaaagtaactgataataatctagaccacaaacgactgaggtggtgtttggatacatagactaaactttagtctctatcacattgaatatttagacattaatttggagtattaaacatagattacttacaaaactaattacataaatgagagctaattcgtgtgataaattttttaagcctaattaatctataattagcacatatttactgtagtattacatatgctaattatggattaattaatctcaatagatttgtctcgtgaattagtccagggttatggaatgagtttttgttaatagtctatgtttaacactctaattagtgtcaaacatccgacgtgacatgactaaaaatccgatccaaacagcccctgaatatcctcgaactagctttgcactagcactgggaagccgacgctgaggcagacgtcaggtgggacgccgagacggggaggtcctcaccgttgccgtggtgacgatgtcgccgcagggcctccgccgcagtcatcttatcgcgatgtccttcgccgcgtccgcgtcctcgccactggcctcctccgcgatcggctgactaccactgtcgtaccaagctagcacagccttaccgcctgctagctacatgcgcgggcctggccgcctcgactggcccaaccagcccaatcccttcggctctccgtcgactacctctccgcgctattgttcaaccccctcgccctcaccatgtggaagtccgtcggcgtgtctccacctggtcgatccctccgtgtcaacccccagcagcatcaacctccaccctatcgaggcaggcgcaccttctgtttgaccacgtgcgggaggacaccgcgacaagatgacggccgtggaggctctacggcagcatcgtggacgggaacctaacatggaggtagcagaaatcgaacaaggatcgaaccggaggatggtgatcgaatgatcgataaggtccggagagggcggcggagcaggggcgaaggcaggccagctgacgaagacagtcccggttaactgggctcggccctggctgctgcacagccaccgcggcagatctggggccggcaagcccgcgcccttgaggccttgagtagttgagtcttcttgagtctctcgactcttccgaggacgccgagctgatgagtcttcaccaaatatcttttttttttcttttggagaaaacaacttatatgtccaatatgatataatcatagaactatcatatagtgtaatgtacggaatttcagctcaactcgttataatgaagataaatttattcatgaactggtatcagttttttaaagataggtgacctatgaatttgtatttttttccccttactccttccgtcccccccccaaaaaaaaaaaaacaaaggccaatatggacagacctctctatttctaggttggctcttttttttttttggacggatgcagtatatgttttcaattgaaactagcatggttgcgcgggccagtattattatattttctctcgtataataatatatatatatatatatatatattctcaatgtattatttaaatatattaaattcacaacataattttaaattttgtactacctttacgaaactactaatgtataatattcatattgtattttatatacgtattagttattaattatttgtaatatcaaattttagttatttgtaaattatattcctatatggattctatactcgtctttcaattttttttaatttcgaattttcgttatctatatagactctaggctcttcttccaatattatttatttttaattctgatttttattacttctaattgtatttctacgtgtactctaaactcatctttaaatattctttaattttaaattttgaaatttagttatttgtaaattgtatttttatatgaattctaaactctacttttaattttattatgtttattctaaattttatacgtgtactctaaactcatctttcaatattctttaattttaaattttaaaatttagttatttgtaaattgtatttttatatgaattctaaactctacttttaattttattatgtttattctaaattttagttagttttaaattcttatatggactctatattaatgctgaatttctattatttcttaattgtatttctatatagattctagtctactcttccaatatttcttattttttaattccgaatttcaactagttctaaattgtatttctatatagactctgttttttctttttctccgattaatatgagaatttgtaggccatgagagcgaacgtggaggctcctttttctattcctttaataagttaataaatacgattacaacatgctatcgatttcaatgattatttaaaataaaaattaatcatcaaattgagctaaataaaattttatcaaagtaaatactttgtgtccaagtatttttagaaattttcttgaaattatttgagcactagaagtatttttcaaactttagaagatcattttgaggattaatttaatcagagaagtaattaaaactccctctcctttcgggtcagaactggaaaagtatgcttttcgtccctcctccaaccgacctagtcgcctcctctccctcccaaaagtccagccggcttccctcagcccctcctctctctggcgtttgggccccacacccacagtgcgtcgtctttaagctcgggatggagtccttatagcacccgaccccatctccaggcaatccgactcgattcggcctctctattgcttatcctctaaaattgatcacggaaaccaaatccccttgatctcctttcctttttccctcaactaatttcgaaaaatcttgaggatttgggagaatgaagaccctgatcggtgaaccaatccatgtgtactactaacaactaatgtactagtaccactgctctatcttttgctccaacaatacatatatatatataagaccaagcagcccaccccctgcgtgggccacgaatacggagaacaattttactaaaatgatgcaaagcctagatattatttcctggaacgtgagggggctcaattcggctgcgcgctgtaacacgatccatgagcttatggcagacacgaagtgcagcttggcatgcttccaagagacaaagctacagaatatagatgacggtctcgcccactttttaggaggctacaagctcgacaaatttgcctttaagccagcaagaggcacgagaggggggatcctcctcttatggaatagcgcagtctttgacgtccaagaggtccgagtcggccgcttcttgatttcggcgcaagtgacggtcatactcacaggggccacatttctgctcaccggagtttatgggcccacaaggcaccacctcaaaagcgccttccttcggcacatcagaagaataaggcccggccccgaggatggatggcttatccttggagattttaacatgatctatcgagcaagggacaaaaacaacagcaacgtcaaccttgcacgcatgagacgctttcgctcaacaatcgatcgatgtgaactgcatgagattcccttgcaaaataggaagttcacctggagcaatgaacgacgaagggctacacttgttaagttagatcgctacttttgcaacgagacttgggacttggccttcccccaccatgtccttcacgccctacccacagggccttctgaccactgccctctagtcctctccgacccccaatgtccatgtaggccgagtgccttcaagtttgagaacttctggacaagaattccaggattcaaagacaaggtcaaggatgcctggtgtcagccttcgtcacacacagagcctatgcaccacctaaatgaaaagcttcatcgcaccgcgacctgtcttagagaatgggcaaaaggaatctgcaccgaggccaaactgcagtttcacatggcggtcgacgtcattaaaagactagatgtggcacaagaacatagagacctctctgcccaggaaacaagactaagagcagccctcaagcgtaagatccttggcctcgcttccattgagcgggcaaggaaaaagcaagcctccagagtaacacatatccgtgagggagatgcgaacacaaagttttttcatctcaaaatgaatgcgcgaagaagaaagaacaccattcatcggctgaaaaaaagacaatggttgggctgtgacacatgaggagaaggaagcaacgatccatgaccattttgcgagcataatggagcggccggcgccaagaccaaatgagctaaattgggatgcccttgacatctcactgattgacctagccaccctaggggagcccttctctgaacaggaagtacatcaagcaatcaaggaaatgccaagtgacaaagctccagggccagacggcttcaccaggattttctttaaagtctgctgggaaatcataaaggaggacgtccttctggtcttcaactccatttacaatctcagatgtgcacacctgaatctgatcaactctgcgaacatcgtcctaattccaaaaaaagagggggccgagggcgtttcagacttcaggccaatcagcctaatccacagtatcgctaagatcttctccaagatgcttgcgttgcgactaaggcctcatatgcacagcttgatttcgatcaaccaaagtgccttcataaaagggagaagcatacatgacaacttcctcttcgtgagaaacatgaccagaagataccatcgattgaggcgggcgatgctgctattcaagttagacataactaaggcctttgattcagttcactgggattacctgctagccttgctgcagcgaaggggtttcccaacaaagtggatagattggctgggggctttgctatcaacttccacctcccaagtacttctcaacggcttgccagggcagcggatcaagcacggaaggggccttaggcagggggaccccctatcgccactccttttcatacttgcgattgacccccttcagcgaatccttttcaaggctatagagctcggcgcaatctcaaaaattcgggggagaacaactaggctaaggatctcaatgtacgcagacgacgccatcatcttcattaatcccacccgaggcgatgttacggccttcacggacatcctgcagcacttcggcactgcaactgggctcgtcaccaattttcagaaatcccaagtggcggccatcagatgcggcggcatcgagttgaatgaggttcttgagggcgtccctgtggtgagggcaaatttccccatcaagtacttgggcctccccctagctctgggaagactgcggaaggtggacttgcaacctgtctttgacaaaatttccagaagggtagcaagctggagaggaaaaaacatggcagcggctggaagaactacgctcatcaaatctgtgctaacggcgcaaccaatctaccttctgaccgctctgaaaatcacaaaggaatccctcgagcagctagacaagcagcggcgccgcttcctctgggcaggcacgggtgatattaccggagggaaatgcaaggtcaattggacaaagacgtgcatgccgaccagccaaggaggattgggggtcctaaatctggacaaattcacgagggccttgaggttgagatggctgtggcatgaatggaaggaccagaccaaaccttgggtggggctggagacgccatgtgatgaaatagataggaacctcttcgccgcctcaacaaacataacaataagggacggaaacacggtgcgattttgggagtctgcgtggattggtgggtgaagacccaaagacctcatgccacttgtctttgcgatctcaaaaaacagaggaaaatcccttcggcaaggaaagaaggaggacgcctgggtgcaagatttgaagcttgattcacaatcatctatcacagtcgacctcgtcgaacagctagtcgcactgtgggaagcggtccgaaatgtgcacttagacgttggagaaccggatcagattacttggaagttcacaaacaacgggcactacacggcctcctcggcttaccatgcgcagtgctgcggggcgccgagtacaaacttcaattccttgatttggaaagcctgggcgccggggaaatgcaaatttcatgcttggctcatcattcagaacagagtctggacttcagaccggcttgcgaccaggggatggcagaacaatggttgttgccctctttgccgccgcgagactgagacggcattgcacctcgttgccacttgtagatacaccaagaggatctggcacctcgtctctgcatgggtgggctatcagcagatggacccaacggaatgggaggaagcccggtcagtcaaacagtggtgggagaacattgcaaacacgcctagtgtcccgaaaaaaggacttcgatcgctcattctgttagtcgtctgggaaatttggaaagagaggaatcggcggatttttgatcacaaagaggtggcaacgaacttcctactaatgaaaatcaaagaggaggcgagcctttgggctttagcaggagctaagcggttgcgtgagttaatcctgcactctgtatagtgtactagtgtacagctatagtggttctccgttttccttttacccttaggggtttgtattttctcctgctctattcaatgaaaaggcactctagtgctgttttccgttcaaaaaaaatgtttttcttataactacttatctgatctacgatccaactacaacattctatttgtttgaatctttataacaccaaatccacgcctagatctagcagggaggcggtcggaggcggggtcggcggcgggcgaggtctgtctccgcatcggctggatctggctggtcgacgacacacggcggcgggagctcctatggatgtgacagccggtgctgtgggcgacggaggaagcggctggcggcgatgatgcgacggcgtggaggcacgtgcgacggcgtggaggccctggagaccgcgccagtggtggggagagggggataggaggccacgtcagcggcggaggtggcgccatgcgcgtgcgctggtggctgcggttggccggagaggtagaggctcggccgacagctcgcgacggcagaggtagcaccggcttgccgaaggagttgcggctggcagccgtgcagcgcgagtaggcatggccggcggcgttgaggacggccggcgcgtgatggatgcacagcgggaggtgatgttggcggaggcggagcccggtgaggtggctgcacgcggagactggctggtggggggcgccggtgcagtgtgcccacacaccggcggagtttttgatggcggtggagcaatggagttttcagtggtagattggcaggtggtgaacggcgggtgaaaacttaggacagcctcggccatactgacaatcaatggcgcttaaatgacattcccctcctgagggcattgtcgtgctgtcacaccctaatctggcaccaccgtacaacggcacctgataggagcgtgtcgtaggaaaaacggcgcgaaccgcttcctacgaaaccgcgatcacagtaccagtctcaggacatagcgctggtacccacagtgacaaatatgaaacattgcaatccttaaatttaatagaggacttatttaccttaacttaggttgcagcgcaggacagcctgagaatataaccgacgatgcggacgaggaaacaccaacagcagcagcagcagcggaaccaacgaactaacacccaacaccacaggcgacggctgggaaccaggacgaaaccctaatcttcaattcacttcatcgtcacttcaaggcagaggaactatatatatttatatagagcaagggtgagtactttcgtactcagcaagtcacgggaatttaggtgtttgatgcaagcttggaagagaggcaaggttgttttgcaaatcctttattttgaaatcattttgaaatcactaagtggtttacttctttctaagtttgggccgaaaagagacttgcgtctcgattcgactttaagagatgtttttcaacaactcattaggtaatgtaccgacctcccaggtcagatcattacttctcggctcccagagccatttcacttgattagtcggctcccagagcctttttcattttctgggactcctagagcccagctgcccagcagcacaacaatccgcttccactcgggaagcctagtctatgatgcccgtaaacatcccgaatcacacagattcgtttcttgaccactcaggttatccatctgccacataagctgattctggtaacgattcccaaaccacaacaacttttcacaaagcacagacaaacaaatctacgctacaggaaacacctcacatccgcccatgaccatgggcacggctgttcgaacagttgcggcatatgcagctgcgcaatatacaggcatatgcatgagatcaatctacatgcatacgaggacaaggactagcatgggagaaaaggaaacactacatgcatgcttcgatgcctgctagtaattaattagcacaactaataaccagaacccacagagttttggtctgtactctgtaattgattggatctgtgacttagcagtgttgtgcatatgcctgaccgattgatccgcacgcttcttgccttttgggggtaaaatttgtgcacaccatcggtgaatatattctacgtgttcaattcaaactgttgagaatctcatcgggttgatgatcagatcaaatggatatatatctgtttctgctttatatgagaatgagatagtgcatttggatagtaaagatgggcaataatgagctcatttttttactcagcgcacttctttttcctcaatataatatcaatactgatggtccattttctgctaaaagtatacctcagtagcatggccattaaaattttctttcctttgcaatggactatggcataaacataactgcatagctgcatatgcatgtcttatgaagtaattaaaaataactgatccagccatgaacaacaatgccttatgcgctgccataatttatgatccagcattagatctgagctaggaggtaatatctgaacatcacttctgctatttgatgaacatcatattttcatcatatatactttctttttccagatttcctggtatatattcacatatataaattgtgtagattttagtagatcttttcagttagagcatgaaaaatatcatggtttttagatggctgttgtaggtccaatgcttctcttacaacaaaagaaacctgctatatattcacatatataattgttatagcttcatgaagaagaaatcaaggctgtaggatgacgacgttgctgtgtaagaatcgtgaagaagaaatcaaggctacaggatgatgttgctgtgtaattaagagtcatgagagaacatgttgatataaagggggagaattttcaacaccttgctgcaaaaataaatttgaaggttcatattaccgtgacttgccttcattgcaatggcttttgtctctctttttttatttttttttactgaagtactcatttttcactcctgtttgcttttgttaagttccgccaccgtatagaactaattaagacacgtggttcaatatctggaactaatttgtaaatattttgtggaatgtcgtaaacatgagccaagcttttaatatttgtggccattaggatttgaactctggtgggtagagtcatgcacccaccactctaccaccacactactagtgctttcccacactactacaaaaaccatttttcgtggcggctattttgggctttcgcttgcggcatttggcgctgccacaaagcaaaggccagtgaaaatgtagcatcttcgctgacggcgataaaccgctaaaggagataacttttcgctggcagctagctaaagacagccgctagagaaaatcatcttcactggcggctgccttatgtgggccgccagcaaaaatagccttcgatggcggctgccttatgtgctcctccagcaaaaaatagtcttcgctggcggcttcattatgtgggccgccagtgaaaattattttccataaaaaaaactaatccccaaaatctctttttgccaaaaaaaaagaaaataaatcagattttcgcagcatgtacggattcaaatccacatccaaattttcgagcatcgattcaaatcctcatccagagttcattagattcaattaacatggaagtgagcacagcatacaagcattttgaacatgaaaataaaaagaaaaacagcatcaatagaaaagaggaaggaggttgtcggcgccgtcgccgaccgagcagcccagccactagcgagaccgtgggggggagggggaggagctcgccacgccccctgtcgccattgtcgtcccgtcatcgcgcccccgcccctcgtcgctgttgccatcccatcgtcgtcgtgcccccacgacagctcctcccgttgccgctgtgcatagtgtgtcttacctagtagtagtaggaatactttaatccctattgcctcctcttctaccacattgtggatgcctcgtgccattgatcccatggatactagtacgagctgtccgtgtaggttgccttcttatatattagtatattcatgtgatagaggttgcgagcgcagtaaaggagctagagcaaattagaggatgtgcaccactattttggtattagagtactcaacggtaataaaataagtacatctattaatttttaacatcgataatttgatataagcaacgcaaataataatgtaagaaataaaattatagcgatgaaagtgattatcaaaatgggaaacccaaatgataatattagttagtatagtttagtgaaaaagacaatagaaatcacaaataaatggttacccaaactgaaaaactatacaatttgacatcattgtcttagaaaaaacatagtttaatgttaaaaaaagggaatatccaataagataaatacgatatatttaatttgtttattatatatatattactgatagctcaattacatgtctatataaatattacatattttaaaccgtgtggctagtaacacaaaatcaatgtagcgagtgaggagacggcaatgctaaatattcgcccccatacttaccgcattaaccacttaggtaggatacataacttcgagtcatgttacaatattatacctcgtcatattatttatccttattagatctcgccatattatctacccttattagatctgacataatcattcgatcttgattcgatcagtagaggtgacacaatcattcgatcaatagaggtgacacagtaaaatagacggtagtggcggcggttgaggagtcggcagaacacctaggcatccatgggctttggccgcggtatgtgccgttcgttaaatgttaaatgttgtgtgtcacctacaccatagctgcgacgacttctattgcagtgaagatcagcgtgcccttttataaccgtttaataagattaaattattacagtctttaataagattatctcaatttgtattaaattattacattaacatatattgtcccaaaatgtagatatttttgaggtgaccatgagtattaagaaaattggtgaaaataattagaggaaagttgtgattggttaagaagaggaagtaggtgaggaaattaaatgaaaattggtgaaaatgattggaggaaggttgtgattggttaagaagagcaagtaggcgaggaaattaaatgaagaatgattacgattagttgagatctaatcacaatcaaattctgttgacgcacgtgaaaactaggcaataaagttataacaccgagcattttgataaattactttgctcaaactgggacctaacatcaccagcagtaaatttttgaaataacattcatctataagcaaaattacttccaaacatcactttggtcgttgatgttaaaaagaagcaaaattattttcaaaagcattgtttcaattgctgttaaaaatataaaaaaaaacttttttttggttcacacctactcacctgaggtacgttttatcaacttatcatttaatgcttttttagtgagcaacaactgtaaacagtaggctgtattgatataaacataaccattattgggttgagatgtcaaattctgtatgttctcttcaaaaaaaatatgtatgttgcattctgtattaaaggagtgtgttcttatctgagatgttaagttcttcaattttttgttcagtatgggagttttcacagcagatggttaatggtttcaaatttttggggtattttacaggtgtttgatggctatggttatacatatgaagtatgaaggtccatggttgatgcttggttgacttccccagcagcatccacaatgtaatcaggagtgcattttggcaggtaagttctatagcaagtatctcaaaatgttattctggtggtactcataagattcagagggtttgacctcagggaccataggatatgtcccttgtgctgccgcatccaccgtgagggggagaagggagggccaagcaggaggagagcgggcatggcctggtttcacgacagacgccaggaagaaggaggttggagggcgaaagggtttatgatggccgcaacttgatgccttagcgacagctcaagcagtgtgatggtggtgtcatggcctccagatctggagcgaggaggttgtggtggcgcctcgggttctgaccttctgtaagctccttctgcccatgtaaagtttatgtaaagttctctcttgtgtgatgtctattcaggtcctcctccccatgattctttgtgactgtgttggatccactcatttttgttaaagattgattctgttggccgtgttaagatttattcgaggcacaggctcttgcttcagtttatgtgatgcagaatgttggagaaacaagaatcagggtcctccctccagggccctggtgtgtcgttggctgtatatttatgcaatcgatttggcctaacaaaataataacgtaatatgatataaaatgtgttcccattgcaacgcatgagtgaaatttcacatggtattcaagaattcaaatttgaaatagtaatatcgatctaaatttgataaaaaaatgtatcaaaatttggtgaaaaatgtcatatagctcagggttggcgtatgacctaaatcgaaaaggtgtacctcggctacaaaggcttagttgtgtctggattatccaaaattaatcatgccatataattcatttaatactttatatcttttaatttgtaaacaaaatatcatttggtaacaaaatactagctcagtagctctcagggctcatatttatctttgatgaatcatgaaagggctatcggcggggtaaatatcgagctttgaacatgatttcttttgattcccgttgcaatgcacgggcacacaactagtaaaaggtaatatcttgaatgttcttatttatcttaatttattgattgtattgtactttttatgtgattaaaatatataaatataatacgtgccgtgtttggttgtacttatcgagcgaacatatccgccccatcttttttataaagctgcgtccgccactgactagggagagaggaagcctatgcacacgtggctgggtgactggagaggaagcggatgtgcgcgtggcagagagaaagaggaagcagatgcagatctattgggttcgatggcggtggtgggtaaatttacataaaatttgtaaaggtagtgggtctttagctacccaataatatataaaaaaagcatgtttagaggagattgccagattatacttttctagtttatatattatgataatctatcataataatctacttgtttgttttagattattgcgaataattcatattataataatcctaagctgaaaaaaaatactcttagaattaaaacgacaagtaatttaaaatggaggaagtgctacttcaatatgaatatatgttctaccctaaaaaaaatgaatatatgttcgatgcccagacctgtgtgctgcaaagattaattttgctaactacgaaatcatcatctattcatcgcgagcactcgttgatgcattgtgggctgtgcgacgacgaggacgacgtgttcgtccgcgtcagcgaagccttggttgtttcgcctgccataccgtctgattgacaagcgccgccatccctgcattgcgatgcagctgttccgtcgccgtcgccggccacgccgtcctcgtcgtcgtcgtcgaagagttctccgccttggacgtacacgccggcgagcctcccgacggcgagctccatcctgaccttgttcctggcgtcggaacgcagccaccctgtcaccacctccgccgccgccctgcaccgccgccgccgccacggccacggcgccgcccagcaccaccgcgccgccttcttctccgcctcgacggccgcctccatctccccgacgaggtcctccagctcgttcgtcgccccgtccagccgcagcttccactccaaccgcgccacccgcacgtcggggtcgtcgtcgtcgccgccctcgccgcgcccgccgccgccgagcgggagcgcgcggagctgcgcctccacgatgtccagcgccagcagcgcggactcgtacctggcgtagtcgtcgccgaggaaggcgcgcagcttcctcgccgccgccgcgatcgcggcggacaccagcgcgccgaggtcgtcgcccggcggagaaggagaaggagaagccatgtcgctccggtcgctcgtccgtcgtcgcggcaaaccacctgccgattccggccttgactttgatttatagcagcggcatatgcaggggtgagtgcacgtgcacctgcgcgcgtgcacgtagtacgtgtccgagctggttgctgatgtgatccacttccaccatgtttcggactcgatgatgggccgcgcgaggggggcggagtagtgggcttgatgggctgcgcgctacagattgggctggcttggtgcgcgttgtgagaggcccagttcggcttaggttctatctatcgaataagatcactttgggtccctctatttgtcgcccagtccgattttcgtcccttgaccacaaaacccgggtatgacccgtcccccaacttacgaaaaccgggtaaacgtggtccctcggcggttttgaaggtggttttggctgacgtggcgtctacgtggcttgtttgacttggttttcgtcccacgtgccattgacgtggcgcttacgtggcaattatatctcggaaaaataataaaaagcgtggccccacatgtcagctgcacaaacaaaaatagtttttaaatggtggggcccacatgggccccacatgtcagcctaattcatctcttcttccctctcccttctctctcttctttcctttccccctctctctctctttttctccttcccaggcaggggacggcgcgggtgggcggcggagcaggcgagctccggcggcagcggcgggcgtggtcggcgccgccccccaaccggagcgccggcggtccgcgtgaaggcaggtccggccgtccggggaggtccggcagccggtgctacggcggcggcggccggcggcgggagcactgggcgggcagatgaacggggcggcagcgggcagagcggcggcacgaagccgaaggagtgccagcctcgtcatcgtcttcttccggcgcatagtcgtggagcggcgggcggagggcggagcagatgggcggttggtggagcgacgacgggcggagggcggagcagatgggcggttggtggagcgacgacgggcggcgggcggcgtggcgagagcgctgcgagggaggaggcgaacttgtcggggcggccggcgggagaagaggccgcgcgcgccggtcgatgggagtgagggggaggagcgggggtcggtagccggcgggagtcggcggtgcgacgggcggcgggcggcgtggcgagagcgctgcgagggaggaggcgaacttgtcggggcggccggcgggagaagaggccgcgcgcgccggtcgatgggagtgagggggaggagcgggggtcggtagccggcgggagtcggcggtgcgcgggggtcaacggttagcggaggtggccggaggaggtcaccggcgagcgcgggctccacgtcgtcggctgctccgcccgagatgcccagcagaacggcgccgcccctcctcgctcggtcgccgagcgccgcctccctcctcgcttgggtgccgcccgccgcctctcctcgcccggccgccgccgccgacgtcctcgatggtcacatccgggttggagccctccctcctcgcccggtcgccgagcgtcgcctccctccttgcccggccgccgtgcgccgcctccctgctcgcccggctgccgcgagcggcccctcctctcgcccggccgccgcgcgccgcctccctcatcgcccggccgtcgtgcaccgctccgcccatcgcccccgctgcgccgccgctcaccactgtaagggagagagagggggatagagagtagagggggctgacatgtgggaccacaggggccccaccttttcttattatttttgtgtagctgacatgtaggtcccacatttttttattattttcttaagatcctattgccacgtaagcgccacgtcaatgccacgtgggacaagaccaagtcaaagggaaccacgtaggcgccacatcatccaaaaccgggcacaatactgtcaagggaccttttttgcatggttttgtaagttgagagacccgtcatacccggttttgcgaccgagggacgaaaatcggactgggcgacaaatagagggacctaatgtgaatttattcctctatctattccccgggaagggttttttttattaattaccaggaaaaaaatacccgtgtgttgtaacgggtgaaggttattttaatcttattattgttatacggtttagttaaggtgaaattcactatgggaattcgcctggatatatactttttttagaaaatcatgatcaatttagcatgcgattaggagtccaatcgtctcaatttagcatgcgaattttttttaagagatttcttatacgactcctatattttcaaaagcgaacggatttaaaaactgactcaaatacgaacatgtatttgcaaaagtgaacgaacttaaaaaccgactcatacacggatgacgtaccaaattacctgtaaaaacatttttaatttttataatagtagagatttcggcgatttttttggtctgtgattcgaattgtaatatgttgttactcctccgttttatatcatattagttttgacttttttcacgtttaatcaagtttatagaaaaatttagcaatatctgcagcaccatatattagtttagataaatgtaatattgaatagtatattttaggcaatatatttgttttatgttaaaaatattgctatatttttatacaaacttaattaatcttaaaaaattctaaaaatattaaaacaatttatataatatgaaacggaggaagtgattatttaattaattaatcccctcttaagtaagcagcggcgaagccatacaaaagtagtaactaaggctgtgttctttgctcagtgttctccaacccctctctctctcgtattcctcgcgcacgctttttaaactgttaaatggtgcgttttttttaagaaaaagttcctatacaaaagttgcataaaaaattatattgatcatttttttttagaaaaaaggctaatacttaattaatcacgcgctaatggatcgttccgtttttcgtgcggatggaatgagttcccaacctacatgaacaaacgcagcctaagttttgtctaaaatggagtgatcgaatagtactactagttattctgaaattttctgaaatgaaattcgaataaagtttcaataatgaaatgggcgttattagcagtactccactaccgcttgccatgcacgaacggtgcttctacgtactactagcctttacactttccacttctcaagttttcaccctcgtccctcagacttgatgaattttttttagaaataatattattttaatagaaaaatataaaagtagaagctgatcggctaaaattacaagtttaatgccttgtcgaacatccacagttcaacaggggtacatacagaggcgggcccagagggtagtccaggtaggcccaggactaccctagaatttggcccagaaaggagcatatattcattttttatggcccataaacaaagtctggcccaacaaaaaaccctaactttcctactagcctcctcccggactcccagtcacacgcgcatgcgccgtcgctccgacgcctgatgccgccgccaccgctcccgtgtcccgtgaggccgcgacggcgcaacggcgctctgcccctcgcgcggcggccagccggcccccttcccgagtcctgacggcgccgcgacggtgcactgcccctcgcgccggcggccggcctgctcgccttcccgagtcccgacagcgccgtgacagtgcagcggagctctgcccctcgcgccggcggccggcctgcccgccttcccgagtcccaactcgcgccatcgcggtcgcaccgcctcctgcctcctcgacgcgcatcggcgcgcgcgccctacctcggccgccggcacccgccgcccggccggcatcccacatccggcggccctccccctccggtgagcactgcgccactgcttctctggcagtccggctctcctctccctcagtccctctactctcccccttccagtagtcagcaggcagtactacctccttctataatcaagttctttatatccatgattagctaattggggatatagtaatttgtatagattaccacgaaattgtgcgccgcaatgaacctcatatggcatttttgcatggtgtgatggttgttaggagattgaggaatgaagaagtcgagcattgtatttctttttcagaagcatgaagcaaaaaaagttgcatcttgtgatctaccaatcccacctatttgttattttctacttgtattgaaccatttagagttatatacccgtatcgtttaccagattttatatcgaatcatgatgtattgcatttagatttttttcgctaggcctaccctgggttcaaatcctgggtccgccactaggtacatatcgaacaaccacaattcgacagagtacttgttgaactgcggttgtttaacagggaataaaaaaatatcttaccgaactgcccctgttcgacaggggataaaaagtgatagaaaaaaaaggagatcaatcagtgcgcactgtacactaccgtgcatgcagatctatgttcgataggcccctgccatgctctttcttgtcctttttctattttttaagtgaacaacaatcctgtcgaacaactgcagttcgacaggtacatgtcgagctgttcgacaggtgttaaatttgtaattttagccgatcaatttctacttttacaatttttctattaaaataatattattttaaaaaattctaaggtgtccatcttcttcttctttttttttcacagttcaaggtgtccgtcttgggaaactattctaatccctcgaggggatgttccctcgtttgctcaaaaaccatctaaacaattatgaaaaattttggaaaaatttgacaacattcatacaacacatatatataactccacaaaatcttaagtccaaactcaactcacacgtcgagatataaaaaagacaaattcagcatatgaatagtagcgtactgtttatatataaatttatcttttttgtttctcaatgtgtagatcgaatttgaacatgaattttggtggactagtaggtatcattatactctacattgtcaatttttttcagaatttttcacaactatttgcatcgaatttagaagaaaaagatatacgagggatgtcccatcgagggattagaatccactcccgtccgtcttggcaagtaattaaaccgtactccacacgtggcaatgtttggaattaccatagcgccatgcatgcaagggcgcccaagtcgtctccactaactctacgtgaaaaccaaataacgcaacgaatgtgatgcgattaaaaacgacagcaatctgctcgtgcaatttaattaattaacgagattgatcaattgatcgttgcttcttctaggcagagtgtatatatattaatggtccatgtggagcaacttgaactgcaattggtaattaagatcaataaaaccatcgccttctgaggacaagtctaataaaagagtaattaagcagccatctattagatgcttacatgttatttttatataattaaagataatataaaaattaaccgagccattattttttttctcgacgtgggccaagccttggttctctctcgtaggctatctaccaatcacagatgatcttttcatgtgggcccaccttaattatctctcacctaatttttttcaccaatcaatttagtcgaccccttctctatctccactccctctttcttctagcaatgcaaaataagttgatatcaacggctaatagtaggcatattttccctattacacttgccctaacagatcaggataattttctaacggagaaaatacgtcaaaaattttattttttgagcgaatagaaaaattaatacgtcaaatttgtgactgataccgacaagtgactactgatattttatgctaaggccagctatagcaggaaacagctagagagagaagaattctcgtcgcatacgacattggaaatgaaatggaataatggaagaagctccgcaggttcatgggattgatgactaccagagaggcacggaaacaccaccggttcttgctgttgaattccaagcacatgctttctagaattccagaaccccatgagagcccagttaagttgagttgatctcgacgacgacgacgacttctgttgatcgagataaaacggttgggagatattccgagattgagtagtattcaaagctattgatatgctgatttttcgtctttgaccaccttgggttacttggaaaagtattggggtttcatctactagctaggttgtttgttttagtaggagtagtactgtagtagctaacttggtggctacgcagggcatatatgcatgttgctagaagatgattagtgtgtacacacgttttaacgaaattaattgtgcaaattaacgaagatcatcacttcattagtactccagtagtttataatcaatagagtaactattggtttctaacgagacaaaatactcaatgttttaaagcaaagagagtactgtattatattttctctcgttgaaaaacagtcacaaagttgtttttgatgcgctcacgtgacacgtgtgcactttgcatcccgttcgttgtatccgaaaccctctgaacacgcatcatgtctggaacaatcattgactaatctttccgattaccttggggatcaccacccgcgtagccgcctagctctgaaccccagcagtagttgaatcgagtcattgctttatgatgcactgccgtcatctatgtatcttttagggtggtcaaagtaaacaagttctgtcgttgaataaatatatactgctgtccagttaactgtaatccttccgtttcagattataagtcgttttaactttggtcaaagttaaactactttaaattcaactacatataataacctagaaccagataagacgtatcccagtacttgcatattcgtagtactagaatacgttctatccgattctagtttgctatattttgggatggagggaatataacctaggtacacagccaatggataattgacaaaaagaatcctataaataagaagaaaatgtatctaccggaaaacatatcatttctaaatagtcactgctaaaaaacgattttccaagaggccaaaagtggttttcgcgtgcggacctccggtccgtctacccgaaaaggtctgcgaaaatccaaattttccgtgcaagtggcacacccgcacgcgaaaattagtttttcgcgtgttgatgcttatgttgcccgcacgcgaaaacaaaaatacgaaaaaaaataaaaatcgcaaaaattgagctgctgtcgtcctcccgctgccaccgacaggctcctctcgccgccgcggccgtgctcctcccgacaccgccgcccactggatctgcatgggggatagccggcagcccgttgcccaccaccgcgcgccccatgctgccttcgtcgctctcctgttggctgccgcgcgcgccagcctctacagccgtcaccccacgccacccttcctgataacaatctggcccaggtggggtcggccgaggcccaacaaattaaggttgcccggaccccaacaattctttggcacacccactcggggaaaggcccaatctccctaaaagactagttcaataggggaagggtggctctcccttttaaggtggcttcctcctcccaagctaagtaaggtgggattattcagttcagaggctcacacggtcgccgcccgactttgtcgtctttgccagtggataatagtggaggatgtcctcatcacttctgccggccactgcgtgcctctgccgccgtcaccccacgccaccttcaccgtccttccgccggccgctgcgcgccagcctcttctgccgtcacccctcgtcgcctgcactgcccttccgccggccgccgccactctcccggctaggagagtttgagagagggagagagagagagagaaagaggagaaagtaagagacaaatgagagtggggataaggatgagtaggtgagagagatggagaggataaggatgaaaattttgaagtgatgggaggaaaaaatctagagaggagggagggtattttcgcgtgcggttctctcaagaggtccgcatgcgaaaattcaattttgtgtgcagccctttaagatatctgcctgtaaaaataggctaatttttgtgtgcatacccttaagagacccgcttgcaaaaatcgaatttcacgtgcggttctcttaagggtccacacgtaaaaatgggaggacgatttttgtagacccgaccagttacggttcgtctgcaatataaagaggtccttgtacaagaaaatcatttctgtagtagtgaaccattgcgacaattagctagcggtttctcaacatgaagatgtggtttgaaatcattgtgaacattcgaaagccacccagtaaacaaaaacgtgagacattggttggggggggggggggaatagattcctcaatctatcatcgtcgttggcgaaaggaggaatagatgggtgtggctcactactgttcgtccgatctaacaagagaaagacccttttttgcagtgacgactggggatcgagatcgaggccttcagctgtgaacgccagccgtcaaagtgagagctgaaataattcaacacttttgatggtgtggccaaacatacagcaaacgtacgttagttagctagccagtattacaaaatacatttcggtcgctttcaagttaattaatttcaacggtgaatatatagcttattccgtggagtctagctagtgtgaagaagtaatagcttttccatacgttgacaagtctccagctattcttcttccttcattgttgctaaattataggagccatttctagaagcagaccctggaaaattggacttagaatagcgtgtattgagaatatatggcatgcctgttagataagttaggttttatctagtcatgtgtccccggcatcttcttaattcttatctttatctaaaaaaaaccttcttaattcttatattaattatattgttgtatgcaaaacagcataggtcttgactgaagaaactaagaaagaaaacctgacctagtttcaacagatttatttttttttgaaaaaaaaatggtcatgcatgactgatcaacggccaagatagaagtgtacgttcagtacgtacatgcaagctagttaagcttaattactcgctatatatgaactctagaaaaaaatagttaatatcaagagtcaaaattttgattacgtcccaagcatccagaatagtagaaacaatctacaagctagctcttgtaattaattaaaagcaccattctagaaggtcaaaattaattaagaacagcggattcccctacacacacgttcttaactactattaactccaagatgcgcgggatggatggtttatctagagcatggattcataaatttttgtgtacgtaatctcgtatattacgacatctttcaaagctagatgtactataagtaagatcgatctctgactcatgaggttttcattatgaatttaacatatgcattaataattaattaatgcactaccacagtttaagcaataacatcacgtatttttataaaattatttggcgagataaatccagcaatatatcattcagtagtccatcacaactaagtactatccccgattttaataattggtgtcgttgacttttaaacgaacctttgatcatatcgtattattcaaaataataaattgtattattatttattttgttgtgagttgagttatcattaaatgtgctttaaacatgatttatatttttcatatttacattgattacattgaacgagacgaatgatcaaattcatgttcaaaagttaactgcgtcaacgatcggcattccttgcatttccaatatcatcaaaacatctttctcatgctactcctagtccttggcactcacctcctgtaaatcattctaattaaccactgaaccttcctacgtcgcctcgagccaattaattataattcaattgatttgatcaattaaataacgacaacgtgcatttatcttcccgttaattagttcgttctccaggaccaggaaccttcccttcaaggcttcaaatctgcagcgtattatataacacatccggaaaattcacacggacaaatgctgacgtcgacgtacgtaaggtcactgtacccagtcatacggtgcggctgattaatccaactccctacatatataaaccccccatctcccgccaagcctagcaaccacacggcgacggtcagaacgaacgcctcgccgccgtcgatcgccggcggccggaactatctcgcaaagtaatcgatcgaaggtatcaaaagcatcatctgagctgagctgagcggcggcgcgatggcgggggagataaccccgtcggggagccggcggagctggctgtcgtcgggggcggcgtcgctggcgcggtcgctgcgcgacggggacgacccgttccggcggtcggcggcggcgagccggcgcgacgccggggacgacgaggagaacctgcggtgggcggcgctggagaagctgccgacgtacgaccgcatgcgccgcggcatcctccgcaaggcggtggacggcggcggcgacggcgagggggccgggtcgctgttcaaggccgacgaggtggacatcgccaacctcgacccgcgcgagggccgcgagctcatggagcgcgtcttcaaggccgtcgaggacgacaacgagcgcttcctccgccgcttccgcgaccgcctcgaccagtaagcataaaaacttttcttcttcttctcagagaccatatttacgtgaggactgtggaggggatacgagcgggtcaactcacgaacccgtttataggcaaaatgagtggataacccgctggctggcttgcgggttacctactaatttgatatataaatgggtttatagttgatccacttgcttctctatgacgcggcaagctgagtcatgacacgaaaacccgtagattactctttatttaacatataagtaaattcgtgagtcggcccgcttgcatccctgtgaattttaactatttgaatcaaaatttattgtgaatttgcttcgttgatttgtagggttgggattgagctgccgaagatcgaggtgaggtaccagcatctggacatcgaggcggacgtgcacgtcggcaagcgcgcgctgcccacgctgctcaacgccaccatcaacacgctagaggtatatacacatgtacatcgctcagctcagctcagctctctagtgtgatcactcaacaagttggatgtgaagatcagtggcgccttaatacttaatttggggcgtacgatggattttactgaaattttaaagggattaattaagaaaactgaagggtatgaaaacatttttgtctcttaaaaaaaaagtcattggatgaagccactagataagtacatcaatcgaaacaagtcaagcatgcgcagtacaaaaatcaagaccattttattgtccgactctggagagagagattagcttaatttggagctagtagattcttgtacgatgtccactagcttagctcacgtatgactgtggggtccaccgtagaatcttgataaatagtaatgcgtaaaacggccggtcgcgggttctcgcggcctgcaaatttggaaggaagctcatgtgttcatgctgatgagtggcgattagtcgccggttagtcaaagcacgtttttggagctgtgttcggtcggtagtgtttggaatttaaagccctcacacatgtagaacagttctagtgactccttagcttataattaattaattattagttatttttttaaaaaataaattaatatgattttttaaaaacaactttcgtatgtaactttttttaaaattgtattgtttaatagtttaaaaatcgtgcgtacagaaaaacgggagaaaagtttgggtggtttcgacctttgaccagctagctgttagtctgttaatgcccacgccctgatcacaatgcgtgatagaatttctgacagacaacgacgcctatagaatacacaatgcgtgatagaatttcgcggctagcaggtcgtcgcacacccgacgaaaagtcccacaaaactgcacacgcatggtacgtacgtagaattagttagtactagtcagtaaggatcaggtttcccagaccgccggcggtaagcacgattatcacgcggtaaccgtaaaaaaccgtgtaaaatttatcaaaaattcaaattatttttcaaatttatttaaatttaagggggttatcgtggttttttattactgtaccccgcggtaagccggtaaccgatggtaatgtaaaccctggtaaggatagatcgagttgtactcggctcgagatcttctagaagttatagtgtactcacgagatctttcagatgtggtaagtttctggtgctgggtttaagttttcgcgtctacgcttacgcaaacgacaccacacgtacacacaccggccggcagaaaagtttatgagatttccatatatatatatatacagtacttgccaatctcggttggtatagtacatgtactaagatcacggaaggaaagggtgtcaaagtcaaacacatgatgatttccccttgaaacttgaaagtgcacgagcaaaaatttcaaaacaaaacaaaacaaaacaaaaacgtgcacgaacacgaagatgtgggcttttaccaaaagccactggttgaggcctttccaccggcctatatagcggcccacttcttcgcgagcccaggcccatcagaagagaagtcggcccacaaatggtggaccttgggcctcgcctgccgctctggactctccctcctcgagcgggcgatgggcgatggcggcggaagcatcccgcttccgtcgccggctcgccgccgctgcggcggaggaacggcgagggcggcgcttgtcggccacgcgcggtcagtggtggtgcggcctctgcagctctgctcccccatgcgtcggtccgcctcgccttcgcctcctccagtaggagccgtcggttcgtgtgtttctccccccattccgctctcgatccgttcccttctccatgcgggaggggggaggggggggggccggttgctgacgccgtagaggcagacggcgccaccaaaaggcctagttagggtttggttgattgatgccatcgaacattcccacacgatgtggctatcggtttggagagggcgtttcgttggtactaatactagtaatctgaactagcaaagttcattggtaatttttttttaatctccagttgttaagttttgacgagcagactcgattttgctgatttgtggttgtagtggcagaagttcgatgagatgctacctaatgcttagcgtcgcttacttgttacttgctctggctcaaacgttgttttttatgcttcatgacagggtctcgttagcctatttatctcgtcgaacaagaggaagcttaagatactcaacgatgttaatggcattatcaagccatcaaggtacttggaaattctttgatactcagctatggaacgttttaatccaatcgttaatcatttctagtcttaaatggaactttatgtttttaagctgcattctaattctaactagtttgataaactatctgtaatttattaagtaatttctattcccaagtgatacagatatagatatgatctctatgatttatgcagacatggttactctgcaatttaacttttttccccttcataatagatttgaagcatggcctgaaaattcagaaagaaaaaacgtatacatgcaaacatcatactgtagtaattacccacaaaaaacagtgtaaaaatatgatcctatgtctactgcaaacattatctgtcttatttgtgcagtgcagatatggtcattaattaattttaaattagtgataactaaatggtttctcttatattggccatcccttttcccatcagtaacaaaatgaactatctcatacattaatacatatcatattgttccaattgctattgctacagacctactatatccttcctaacaacaagttccccctgtcccctctagcattcttgctaaatgattggttgaactatggctgataagccgtagaaatataaaagaagaaaccaaaaatattttgaactttttgtctgtattattcatggtttaaaagccatgctggaaaatagactgcaatgaagaaaaacctcaaaatcacctataaaattatgtttcaaaattcaattttggctatggatgataaaccatcaagcagacaataagagttatttacaattgttgcattaaactacttgtgtcaggatgactcttcttctcgggcctccatcgtctggaaaaagcacacttatgcgagcactaaccggcaagcctgataaaaatctcaaggttttgatatttcttatttagtttaatgtagccacctctaacagtagagtcgtaccacatgactaatcactcgatggctacaggtgtctggcgagatcacatactgtggtcatacgtttaaagagttctatcctgagaggactagtgcttacgtcagtcagcatgatctgcacaatcctgagatgacagtaagagagacactggatttctcgagacgatgccttggaagtggtgccagatatgatatgctgtcagaattaacaagacgggaacgtaatgcaggcattaaacctgaccctgagattgatgctttgatgaaggcaactgtagtagaaggaaaacagaacaatattgtcacagatcttgttctgaaggtaacactgtttgactttttacatgttaaaaaatggttatttaggccttctagcctcaattatccatctgcttcttctttttgttgaaatattaaaaggaagctatgtgagaatctattttctagtacaccttttttacaggaagtaatatacatgtatgtatttactttgactgtgatacacaagtgaaaccttaatacttctgtttatgatgaaaactgagtatgaattctaagtcaatatttgctgtgctgattgagtttataaatcttcacaggcgcttggactggacatttgtgccgatactattgttggtggtgctatgataagaggcatttctggtggtcaaaagaaacgtgtgactactggtatgcatgcatatgacatacattaaatatatcagtaattaatcatgttctccatgaaatttacttcaatcactacatcataatcataataattataacttaaatagggataatggattttctaactggaaaagttatttgtctcaaatcatattgttcagaagtcagtcgtgttccttttctcctgtggagcctggatttagccttagccttgtggggtctacaccttagccttttttatgctaaatcgttagatttatcaatatactataacagaatccaagactgaaagacaactcagccactgttttcctctttaaaccttttacactaaccggtacctaaaattttctagataaaatgttcatgagatcctggcaggaacaaattttgttctttttcgtacatggtcttttttgtactctaagcttgtcgtcttgtgcacatagaccatgtacaaaatggatccccactagcccatggacctgttgggaacatgttcggagtgggcctaacagtaacgagcaagcacatagatctattactgtcgatgcttggtgaatggtgattgatagtagagtcatgttgtagtactgatcataaatattgatggtcttgtaaatcaacgataatattcagcattcaataatttacagctgcatgaggaatcttgatattacattactgacacatttacatcctaagattggagttctgtcattgttttgttgcaggggagatgctcactggaccagcaacagctttgttcatggatgaaatatctactgggcttgatagttctagcacatttcagattgtcaaatacatcagacaggtgacccatgtgatgaatgctacagtgatgatgtctctcctacagcctccacctgagacctatgctttattcgatgacatcgttcttatagcagaaggttacatagtctaccatggaccacgggagaacatacttgaattctttgagagtgctggttttcggtgtcctgaacggaaaggagtggccgactttcttcaagaggtgacttctaggaaagatcaacagcaatactggttccttgagcaggatcattatcgttatgtgtcagtcgaagagtttgctcagaatttcaagaaatttcatgttgggcaaaagctgcagaaagagcttcaagttccctatgacaaatctaagacacatcctgctgcattgactaccaagaagtatgggttatctagtctagagtcccttaaggcagtgatgtcaagagagtggttgctaatgaagcggaattcattcctcttcatattcaaggcctttcaactgtttgtccttggatttataaccatgactctgtttttgagaacaaagatgccccacgagaaattttctgatacctctaaatatgttggtgctttaactgcttctttgattacaatcatgttcaatggttttggtgaacttcaattgactatagataaactcccgatattctacaaacaaagagacttcctgttctttccagcatggacctatggacttgcaaacatcattctgaaggtgcctttatcccttatggaatcatctctttggatagttttgacatattatgttgtgggttttgcacctgctgcaggaaggtaacttttctattttcttttgctttcctaggtatattatttttaatattttctataaacagaattttctactagtgattgacttgatgggtttgtctgtgatctgtctactgatttcaggttcttcaagcagtttcttgcatacttttggacacaccagatggccttggccttgttccggttgctaggtgcaattttaagatcaatggtggtagctaatacatttggcatgtttgtgctgctacttattttcctctttggaggatttctcgtttccagaagtaagtgtattgtcgtttgaagtgtattttaattcttttgtccatatgattagttagaagcattgtgaaaccctggaagattcattataacgttttccctaaggtttatatcttattttctctgaatattcgaaatattccagtctgaactactaacttatgtttcttattttcgtttttgacatttatgttaaaagaggacattaaaccgtggtggatatggggctactggacatctcccatgatgtatagcaataatgccttatcagttaatgaattccttgccagtaggtgggccattgtaagttttctgtcaacacaacccttttctttccagaagcatagtattttctttgcatagaaaaaataattggttcatttgcaagtctagatttttttagtatatattctcaacatcaactaagtttgatcgcctctaattcctagacatttgacaatatcaacttttaactgcagccaaacaatgactcaagtatcagtgcaccaacaatagggaaggcttttcttcaatccaaaggctacttcacaggagaatgggggtattggctttccattggagccatgataggatttatgattgtttttaacattctctacctttgtgctcttacattcctaagacgtaagcacttttcccttacatggtattgtcacttgtctgtaatgcatgcctttagcacttacacaatacttctacagctattggcagtgcaagcactgttgtttctgatgatgacaccaaaagtgagctcgaagcagaatctaatcaggaacaaatgtcagaggttattaatggtaatacagcagtcaatgtgtctcacatttcatcatcggtattgtccattcgtatcaaattgttcttgttgtcggccctgtttggatgaacattcatcaggaagcttacagaaacagaacatctatattgctggatgtttgatttattatgagattttatgagaattcaaatgggtcctgaattgtgttatagatggattctgctacaaatttcatagcagttgattctagcatcatgaagcatgttgtttgtttattattttaatgtgtatttgacatctcataatttatcctgcacccacatcattatcttaggtacgaatggaacagaaaacagaagaagccagagaggaatggtcttgccattccagcctctttccctttctttcaaccatatgaactactacgttgacatgcctgctgtaagttgatatcctaaaaatatatcccaacttacataaccatgtttgcaaagcttacgggacaaaacatacctcaatatcgtaattaatttcactttattcttcttatagattactactagttcttgcagtgatttctttttgcaattcaacataggaagtttgcaaagcttacgggacaaaacatacctcaatattgtaattaatttcactttattcttcttatagattactactagttcttgcagtgatttctttttgcaattcaacatagaaagtttgtaattctacttgctttacttagttctattgttctacagaaatatgtagtagctatacgttgttgaaattaacaatgtcctttatcatataatctagattgtctgactgttttccttattatatcattggattggtatcatactgtacatagtgattgtgatggcacggggttctcttgtgtcccctgttgcacttagatatttaactttgttaaggattaaatatgtgtattttatctagctgataaattactagttgtcattcattaaccatttattgaactaagttagtagtgatttaatcttgaatcaaggggtgcatttcaagtatgaacttgaaaatttaaattctaccttgtaggaaatgaaagcacaaggattcacagaaagccgcctccaactactatctgatattagtggtgcattccgaccaggtgttctaacagcactagttggtgtcagtggagctggaaaaaccactctaatggatgtactggcaggaagaaagactagtggaacgattgagggagatatcaagctttctggttaccctaaaaaacaagaaacctttgctcgcatcagtggctattgtgaacaaactgatatacattcaccaaatcttactgtatatgaatccattgtttattctgcttggctgcgcctttcctcagaagttgataagaacaccaggaaggtatgtgttcctattatttttgtggtggatgccatttagtaaactcaataactcatgatgtttcttggggggaaatcagaaaatcgtgttaattgtagttgattgtgtgtactgtccattaatttaatccacttattggtcactaattatatattatcacctaccaaaagaggccacacgattgtgtaggcttgtatattacccgaatctcgtccacatgcaagacacacttattcgttgagttcctaggaacctgacagcacactaaactgtcatttgccattttttatgagtactaacaaaatgaccatgctttgctatggataaaataaaatatattatcatatgtaatagataaaaatatttattgaatatgttagtattcacttgtttcaaccaaatatgtagactattccaaaatatcagaaaatatcaggggccaatttgtaaaaactgtaaacagcggtggggtgccaccaccaatagagacttttaaggagtatacatatacaaggcatttttgacaatcatgatattgaagaatagatgcaacatttttttatcttgtgaagttgaaaatactaattatttctgatgaaattaattccactgtgtaggtgtttgtggaggaagtgatgtcactagttgagcttgatgtattgcgtgatgctctggttggtctccctggtgttagtgggttgtcaactgaacaaaggaagaggctgacaatcgcagtagaactagtggcaaatccttcaattatcttcatggatgaaccaacttcaggtcttgatgctagagctgcagcaattgttatgcgtactgtgagaaatacagttaacacaggacgaactgtggtttgcacaatccatcaacctagcattgatatctttgagtcttttgatgaggtccttgctactttgctcttgtttgtttgtccgttagttctcctttcagcgctgtaaggttatactgaaaaatggattgtgttttttcagcttctgttgctaaagaggggaggacgggttatatatgctggccagcttggtctcattcacaaatactagtcgaatatttcgaggtgaactgtctttgatactatatttcagtctctatgataaccaatttgcaatatgttaaccatctgtattgctaaaatcagttaatacttctcatctattgtgacccatgaaattccattgggcaaacttggatggaattagtagcccgaagacatgcattttttttaattagtgaatgtatgaatactagttggtaatctatcaactattgaaggtcgtttaggccctttctagtgatgcacaaatgttcaggcataaatttcattgtccatgactgtatcattttagaacatgtgcagttaaaaccttccatcttaaatcaatagcatatgcaaatagacttttcacgagaactactttcatatagttacatctttttaatgatttttatatgattacaaaatgcaactatcaaacatgtgcattggagactctgaatgcagaagtaaaaaataatggagggagtagaacacattattgttggaactcataaatatttttttctatagtactaaggttgattcttcaaaactgcttgtacaattgtgcaacaaactctttttaatgacattgaggcaaagggcaactataccacctcaaaaactaatatctcagataaaagtaatttgtaattgtaaaactaaaagatatacaattctgtagtccctctttttacaaatgctatttcagaatatgtgtaacctgtaatctattgttttgagcaataattaataaaacttgaataccaatataagtgcttggatctatcgcacggaaaacaatattagtgtatttctcatcgacagtatttatataccgttgtgtttttttatttgctaacatataattagaaaagtaacgttcaaatgtttagtggagactatctcaatgcctagaacaaatgtttattaaaagagcatggggaacatgcatggaattaagagaacttgggtaaccgtattcaatccgagactaaataagaaagaaagaaaggctacttgcttctaatgtatatcgttctcctgcaggcaattccaggggtcccaaaaatcacagaaggatataacccagcaacatggatgcttgaagttagctcttctctagctgaggctcg

SEQ ID NO: 5587 - DNA, 59101 bp, Oryza sativa
accaaatgaaaatattttgtgttagaatcaccctctaaaatatccttagatttcgccctctgataccatttaacttcctcttctctcagaattgtagataatctatttctacaaaaccatctaaaatccaattcctcctgactcaaaagcatagtttctgcctttttatctagcaaatccaacttatctaaaatctccttttttttttcttttttgtacaagccactagtatgtttagaccaacccctaagatgctgtcttaaacgacgaattttcgcctgccaccgctccatggcagaattgccttcatcaacactagaccatatctcctttaccatatcaacaaagtcatcacgtaaaagccaaccaagttcaaacttgaaactatgttgagcattactcaaagaagaagtgtttgtatttaaaagtaaaggagtatgatcagaaatatctctattaagagccaccacagaagataaaggaaatttatgttcccactccgtggacattaaaaccctatcaagtttctcatatgttggattcactaaattgtttgcccaagtaaatttcctaccagacatctgtaactcccagagacataacccatcaataatagcattaaaaaggaagggccatatatcatcataattatcattattcttttcatcagagctacgtagaatattaaaatcaccgccaataagaattggtaaggtttcatgactgcacatattaactaattcagcaaggaattgatccttaaattcactttgtgctggcccatacaccagaactaaagcccacttaaacttatcaactttattacataaatgaaacttaatgtagaaatctccctcatcaatcaaaccaatatcaacattaattaaattgatgcccaaaagcaaaccaccggacctacctctaggaggtttgcaatgccacaaaaattctttgccagcacatagatttttaagaacagccggactaaaatctttcttaatagtctctgacaaggcaataaaatcaaggtgatgttcctttgttaaatcagaaataaacttatgttttttcgggtccttaaacccatcacaattccagaacaaccctttcatttaaaaatattcttttttttctttccccttttagtctttttcttactattaggagaggtatctaaagaatttaaagtggtctgagaataattatcatccacagcactaaaatccatcacctcctccattaattcaccacacaaatgttgaagtagagaattatcatccacctgatcatctaatatctcactatcaacatttgaagtatgtacctgattaacagaagaactaacatatttacttaacctcttttcctctatactctttaaatcatttttaacatcatctaagataaaattcgtacccaaagtgatcacaccaagattatcaagagcagcagaaatttgttcatttgtaaattgtaaaaaagaaacattatcatgaaagttaccttttgcctgcaagttgtccaaattcttatcagccttcaatttctcagctctttggagaacaagttgatcactgtcacttgcccttctcttgctcttcctggagggagaaattactgcttcaggaatagcagcgagcttttcccctagactttgctgggtattaaccttcttaaccattacagaatcctcatctaagccatcaaattcctcatcagatacagtcaagccatcagattcaggtatcagactcaaatgagcagccggtatagaaggaccacccctctcactaacctgaccaccagaacctattaaggaatcgttaccaggatcacctccagatcccttccccaaatcctggttcagattcccctcctccttctccaaagtcccatcatccagattctccatatccattggtacaggctcgtcagacccattgtcaggctccactataaaagataactcgtacaagtggtccccaataaccacatcaaccacatctgggatcaaagatggatctaggaccaaaacttgtaaacgagcaacatcataccttctagtaaagttcataaacggtatatcgatctccttctctatctctggtgagttatggtatgtagttccataaacggctgtgttgctaaggtaaagaccttgttgtggcaattaacaggtcgtgagagatcgattaaacccgtacaatcctgtttttttttctatttgttagctaagcagttacataaatcttaaagcaaatctagctaaatagcacgatctaatctagttaaatattagcacaaatcctggagcaactcatgagaccaaaaaatcgtgtgatttcttaacgaaaatcacccctgtgatttatagcaaaaaaaccgttcacattatgtttagttcccaacatagatcattctctcggcttatggggaattattctactctcgcgaggaaacatcctttatcgtttccatgttactcaaacggatatatttttaaaaaaaaatcaataagattaatataaataaaatcatcactccataaacatgcgatgtcaaatttaacatgttgtaataaaaaaacaaattttaatgtgaatatacgttaagtatttatttatttttaatttgtagaagttgaatattaacatgtatgtttatgaggtgatataacacatattaatatatcctctaatttttgttaagatatgatatgcaaataattagaaagtttaaaatccaggctaatagtctcgagttatttagttgtgaccatcatttcgccaacttatacttttcgtctgtccacgtcgaatatggatcagaatctatccactctctgtaggctcacacgccgcgccacgtctatatagagagagagcaaaattaacgtgactccataccaacgaatgctgttttagaatcaagtagtccccacgcacctgatcattgtctaagtacgtagttagggtgcaaatggccggagcaccgacgagcttagggttctccgtcaggcgccgcgagcgcgagctggtggcgccggcgagaccgacgccgtacgagttcaagatgctgtcggacatcgacgaccaggacatcctccgcttcaaccgctccggcatcagcttctaccgccacaaccccaatcaggacggcgtcgatcctgtcacggtgatcagggcggcgctctctgaggcgctcgtacacttctacccgctcgccggccggctccgcgagctgcggcccaccaggaagctcgtggtggagtgcaccggcgagggcgtcgtgttcgtcgaggccgacgccagcttccgcatggatgacctcggggacggcacgtcgacgtcgtcgccgctgcttgcgccgccggtgccgtgctacgacatgctgctgtgcgaggcggagagcccgacggcagatgtcgtcgaccgccccctgctgtttgttcagatgactcggctggcgtgcggcggcttcgtgttcgggatgcacatatgccactgcatggcggacggctccgggatggtgcagttcctgacggcggtgaccgagttcgcccgtggcgtgccgggcgccccgacggtgccgccggtgtgggagcgcgaggcgctcaccacccgatcgtggccgccgaccgtcacgcgcgaccacgtggagtacgcgcccctgcccgtcgacgacgacgacgacgacgtgctgctctccctctccccgtcgaccaacgcgtacgcgcaccacgtcttcttcttcggagatcgggagatcgcggcgctccggtcgcaggtagtggcggcctgctcgcggttcgacctggtgggcgcgttcatgtggcggtgccgcaccgccgcgctgcggcacggccggggcgacgtcgtccgcctgaacatgttcgtgaacgcccgcgtgaggaaccggcccgtgccaaggggctactacggcaacgcgatcgtgttcgccagcgcgtcggcgccggcgggggagctgtgcgggaggccactcggccacgcgctgcggctgctcgtggaggcgaaggcgcgggcgtgggaggacgggtacgtgcagtcggtggccagcttcaacgctgctcgccggaggccggcgttccccaagggcgccaggacctacttcatctcggacatgacgcgggcagggatgacggacatcgacttcggctggggaaagccggtgtacggagggccggcgacgacgatgctggccacgtttcacctccaggggaggaacgaggctggcgaggcaggcatcgtggtgcccataagtttgcccagtccggtgatggagaggctgatccaggaggtggacaaggggctcaatgccggagctgctgccgtgctagacgacgcaaaagcaagggtggtgcctgatgaaggctacgttctagcaaaattgtaggtctcatctcgacggagtacgaaccacggactgcatgtacgccacgaccacagcagctctcaataataataataataataataataataataataataataataataataataataataataattgtattgttgataattgggggcaactatgactagatgcccgatatttgttaaatagcggccggtgttgcatcccatggttataaccgtttcagatgtttcattacttagtacaaaatgtttcagcacttggtaaaatgtatttactttaacaaggagagaatctactccatgccactgaacttgtcagttgtcacagttcaatgatttgtcgctaacattgtctctttctctaatataccagtgattttatcaattgttttacaatatacattgggttggactttttttaaaaaaaatacccaaaatacccttagagacatacaagattaacaattattttttctcattagaagtttcataaaaaatatgaaatttttaatgtagcttccttacaaaacatggaaacttgtatataagtttcaagtttttctaacatatttattttctagaaaaattatttttgtgtggtatatgagagagagtttgcttacacaaatgatgatttatattaaaaacaccaaaaaaatattttatatagcatattacagataagttatatttttgaaaaatgtagaaatacaaacttcatattgtgtaaggaggccatatgaaaattttcatagtttttcgaaacttctaatgagataaatcaattgttaatcttgtatctataagggtatttttgaattttttaaaagaatgtccgatccaatggtgcattgtaaaacaattgataaagtcgtcggtatattataaaaagagataacgtcaatggcaaattattgaactcgaataaactcaatggtatagaatagattctctctttaaaaagttggttgcaacaccgttatatatgttgttgtgcatacatatatagtttcttaattaaaatataatctagtaagatcttgttctaaaatttaattataacaaatatataaccacatcatgtaatagaatctaaaatttctcaaattgatcatcatataaccatatggatacggatttcgtcagaatacaattaatggagtatgggagaatgtgtgtatgctagggtataattggcatgaggttttaatccatgcatgcattgtgggagaatatatgcatggtgtcttgattgatgtaatttaaattgtccttagtcttggtgtataaacttatatgatgatcaatttgggaaggagagagtaatttagaagaaaacaaatcatttcaagccattcaatatttaaaactacactctattggatgctcgcatgtgcatcccttcatatgtgagactgatggctgtttcatacacattgggtaggcaccgtctgattttatttttcggcgtcgtaggggatcgattttcgcaggcgggcatgtaattcggagccaaaaccccgccggcaaaaaaagtacccggggtggagtgggcggtccgcctgcgaagatcgatcttcgcaggcgtcgcttatatggcccgcctgcaaagatgcccctatatagtcttctttctccccgagccctgttcattctccccgacgtttctctctcctaaagtgacttaaatatagggggaggttttgaacttcaaatcttcgggggatttttctacagtacttagatctactcatttccacactaggtatgcaattttttaagcttttagatcttaatttgtgatggatttatgcatccaaaattgtgaaggaagagctccatgttttttaattttatttcttttgatatgttgatgttagatgtatgtgtaatacttgatgcctcttgttgtagtggtttaatgtggtaacataaattctcgattttttttatttttgctatcacatccaccacctagttctagatctagatctagatcttgtcatatatagagagagaataaaattttaaatgtctatttattcggtgcaatcaaaaaatagttatagtattttgtaatatgccgatgatatgattttgttagattttcctaatgtactgatttggcatgtctatgtaaaaaaaattgaaataaactttgatttttttattaatttacacttaaccttaacctttagttaattagttttgaatagcgataatttttttcaataaaccctacaaatttggtattaattgtgcaaatattttacgtgtatttttttagagatatggaaagtcaggaatggatgtatcattggccgaggtttttgtctccatatagaatcgaagtggctaaatttattggtattgccaaggcacacgctgagaagaataatatgaggaagataatttgtccatgtgctgactgtaagaatgaaatagcctgggactttgacgatgcttttaaagtaaaggagcacttagtaactcgtggatttatggacaattacgaaatatagacacgtcatggcgaagaacaagtggacgggccagaaaatgtagttccgacacaagttgaagacatggtgcatgacgatggttctgttgaggacaaaatcgacctagagtaaatgttacgtcatgcagaacccgaggtgctgatggggtcggctagagggttaaataactttgaagctttacagaaggcagcaaaggaagttttgtacgatgagtcgaagggctgtgatagtgagttcacaacactccggtcagttcttgaacttttgaggttaaaggcgagacatggatggtctgataccagtttcgacagtctgttagaacttctgcagaaaatgctcccgaggcctaactcactaccatccagcacatatcaagcaaagaaactcatatgccccctttcacttggtgtggaaaagattcatgcgtgcgtaaatcactgcatactgtacaggaaagagtacgcttctttagatgaatgtccaacatgcggtgcaagccggtacaagtcgaatagcaatactggcctagaaccctctaaagcaactgagggacgatagagaaaaatcccgcagcttgtgatgtggtaccttcttgtcaaagaccgcattaaacggatatactcaaacccgcgagatgcggaactaatgcgctggcatgaagaagggcgcaagaaggatgggatgattcgacacccgacagatgctcgtcagtggataaactttgatactcagtatagagagtttgctaaagacccacagaacattagatttgccctgagtactgatggagttaatccttttggagacatgagcagctcacatagtacttggccagtgcttctcaccatgtataatcttcctacctggctttgtcaaaagcgaaaatacgtactactctgtatcctcatacagggaccccgtcagcctggtattgatattgacgtatttcttgaaccattgttggaagatatggttgatttatggaaagagggattgaaagtgtgggatgagtacttaagggaatacttcacagtaaaggccatcatcttcgtgaccattaacgattatccagcaatgttttcagtttcaggtcaaattaaaggtaaaataggatgtgtgatctgcttgaatggaacgtactataggtatctcctgggttccaacaagcttgtgtacatgcggcaccggcggttcctacgcacaaatcacaagtaccgcaagatgaaggcggagttcgatggtactgaaaagactgatcctgcaccaaaaactacatcgggagaaaaggtgtgtgcaatgacagagaaaattgtttgcgagtttggaaaaatgactaagaaaccatcaaaggggacagcgcaagaaacccgagaagaatacgaagggaggggatagtaagaagcaagatgacagttcgaagccagatgataaactccctaccccattcaagaagcattccatattttttaagtacctctcgtactggaaagatctagaggttcggcatgccatagacgtcatgcatctagagaagaatgtgtttgacaacatagttggaacattgttggacatgccgaagaagactaaagatggtctgcaatcaagaatggacctagtcgagatgggaatcagggaagagttacaccctcaagaaggagaaaagaatggcaaagtatatcttccaccagcctgtttcacactgacacctgaggagaagaagtcattttgcaactcactccgtgatgtcagagtgcccataggtttctcatcaaacatcagtcgactagtttcaatgaaagatttgtcggtatctggttataattcacacgactgccatgtcttgctcaccgtgtttcttgcaattgcaataagggccataaaaccggagcatttaaaggttgctatcacaaggttgtgctactttttcaacgcagtgtcatagaaggtcattagtctcgaagagttaggaaatctccgtatattcgcacatgagacacagtgccaacttgagatgtgtttccctccgtcatttttttgatatgatggagcacctcattgttcacatagtgccacagatggttgcacttggcccattgtacctccatcaaatgtggtcatacgagcgttacatggcggttctgaagtgttacgtctgaaatagtgcacatccagagggatcaatggttgagggttatagtactgaagaggttgtcgagtgttgtatcgattacctcaaatatggatatgcaattggagtacctgtgccccgacacgagggcagattgagtggcaggggaacgataggaaagaagagattcttcacccatgatcacaaatcattccaagaagctcacttcagcgtgcttcatcagtttgctatcgtcgagccgtacatcgatcaacatatcgaactaatacgagctaacaataagggtcgcaccaccaagtggataatgaaataacacaagcgtctcttcatagattggttgcgagacctagacttacctgagggacaaactaccgatgaaataactatgaagcggttggcttgtggtccatcacctacagtaaattcttggcagggatatgacattaatggatactcgtttagcacaagagcccgagataataagacctgtacgcaaaacagcagtgtctgtgtgaaggcaattaatgaagccagggaaaaacaattatacttcgggtttattgaagaaatatgggaaatcgactatgggcacacaatgcaattccccatatttaagtgccagtgggtaaaatacccgaacggggtcaatgttgataagttcggtcttactattgttgacctggcgagtgtgggtcacaaggatgacccttgggtactcgccaatcatgtggcacaagtgttttatgtgaaagacccttcaaatttgaagaaagatatagtgctaccagggaaacaaaagatattgggagtggatggggttgaagatgtcgaagattacaaccaatacgatagtatgccactttatagtcagtttgtacagaagattaagaatgtcgagacatctactcagaagaccatgaagccttacatacgcacggacggtgtgggcaaaaatgttaaagggtaatgattgttgagtggcatgtaagcatctaagaagttagtagttatgtaatggtggtatgtaaggtgatgtgtgatcatatcgcaaattgacgaacaattgtactcaacattttgcatattaattagtttgtactaatttttatgtgcaattaccatttgtagtgtaaaaattttgttaaaaaaattaaaattagtaatatttgaaaagtgtaattatttttatgtgcaattaccatttatacatttgaaaagtaataatactaaggtttgtacattttgtaataatattaagatttgtatattttggaataaatatattcaactctgtacaaattttttcagtcggacggcccgcttgcgaagataggaaaaaagatcttcgcaggcagacggcccgcttgcgaagatagtaaaaaagatcttcgcatcttcccaggcggaccgcccgcctgcgaagatcgttgcccaatataagggcaagcccgcggcgccaaaatttctaagtccaggcgggaaccctagaaattttggcaccgtcaggctgccgaaatttttcgccgccgcacgccttcgccgtcctccgccgccgcccgcctgcgaccttcactctccgaccgtcgtcctccgccgccaccgaccgtcattgtccacgcgctgtcaccgagaccgccgccccttgccgccgctccaccgcgcgcgacctccaccactctgccgccgccgccgccgacccctccaccgcgcgcccgctccaccgccgccagctcctccaccgccaccggcccctccaccgccgtcggccacccctccaccgccgccggccgccacctctccctctatctcgctcgcggccgaacggcttaatcggccgatcgttgtccacgagcgaagtcgtcctcggccgaacgacgtcttcgaccggtcgtcgtccacggccgaacctcgtcttcggccgttcgtcgtccacgaccgaagccggtcgtcgtccacggccgaacctcgtcgccggcccttccttcgtcgtccacgaccgaagctcgtcgtcggccgttcgtcgaacacggacgtgtgtgcatgtgggtgtttctttttatatgtgtgtgcatgtgggtgtgaatgggcatgaggggtggctgatatgtgaatgagggcttatgttgattgtgaatgtgaatttgggaatgtgggtgatatgtgaatgaaattgggagggtacgttcaattttgcaagatatgtgaatttgtcaaattttttaaataacatgttggagggtatgttaacatttttttaaaaaaatgtggaggatatgtttgccttttccattttttttaatcaacatgttgatgaaataaggaagtcaattagtgcactacttgataataacatatcaaattttgtacaaatttgtttgtagtaattaatttagcataatagtaagtagtcattagtttcgcaatttaaatttgtttgtattaattaatttagcataatagtaagtactaattaataatatttcgcaatttaaattagtttgtactaattaatttagtataatagttaaatttggaaatctcagagaatttaaatttgttcatacgacatattgttaatatacagtttatttttgtacaaagttgtttatactaatttgagtaatttaaaatgtggacgataactctttttttttatattagaggtttgaaacgatggccgatagtactaaagggactgaagagaagggtttaggggagcaggagctgtcccttgctgttgtggttgctccggaaccaacggtcccaccgaaaggtagttccaactgcgacgttggtgatgaagacgaggattactcgtcgccaagcgatccttgtccaagcccaagcccgaagagaaggaaaaagggcaacagtgaagaagacgacaaggactacattccccctaaagaaggggtaagtaaacttaatatgtaaaatgttcaccgtgataactattagcccgagctaattcgaaacttccatgtataccttctcgtaggaaacggcgccacggcgatcaaaacggcagccgaagaaaaaagttccgtccaaagacgacgacgtaccagctaacacaaccggcacaaagaaaatcgaacggttagcaatcacgaagaaaaggaagggcgagagaagcgtgaatagaaaggatgaagggttccatgttgttacccatgtttcgcctaaaggagagccgctcgcccctaagacggcacgtgcgaaattcagttcacagtgtggcataatagtaagggaaaagatccccatcacggtcaagtactgggattatgtatcgaatggggataaggaagtcctatggaaagagttgaagaaaatcttccagttcccggatggatcaaaggcagcagtaagaaattgtgcactgcaaacaatggccaagtcttggcgtggttggaaaaccaccttgaacaagaaatttgtgaagactggacgcacaccattttcgacgtatgccaacataacccccaatcagtgggacgactttctgaccttgaagaactccccagaagaaattcaaaggagccaaaagtatgcagagttggccaagaagaacaaatttcctcatcgcttaggctccgcgggatacgcgtggtgagtggaatggtttagaagctttgattcttcaagaatgtccttacggatataatgttcattgtttagcccaccaaaactaggtacgaaatgaaatccactcctaaacttagttgtattggtattggcctgccactggtggagcagtggacaaaagaggaggaggaaatgaggaagaaggggcaaccggtaccaatggaggagtagacacagagatcaaggaactgggtaagagctagaactccaaagatcacggatgaaggaaaagtatcgtttgaaaatccggagctgcagagcgttgccgataaaatagaaaatttatccagttcacaaaagaaaggatatttcaagcttgaaagggagaaagatgtgctaagtacggcgctgggtactcctgagcatgggggaagggttcaaggtgcgtcgagtaagatgagttggaaggaagggttcaaaaatgacccctacaagaagcgtgaagcgtacaaggataaacttagagacgaagggactgcggagtttgaaaggcaaatgatggatttctgcgtcaagcacatgattttgcctcgccccgaaaccaaagaacctgagccagattaccccttcgataacctcaaggagaatacaccctgcagattgcacgttcccattggacgctccgggaaaactcttgaggccgctacagccattgctatccctgggagaacatacaatgaagagttcatacccgctgtgtatgccaaggtgcagccgcaagtggtccacgaagggtttgagtcctacgacattgacttcccgactgcagatggtgtatccgtacttggggatgcagtcgatcttgtaattctctggcacaagaatgacatatcctttggattgggcaccgacgccacgcaaaaacctgtggtgcctaaaccggggttgggaaaacctccgaggcctcctaagaggaaggtgactgataaggcggaggaaccagagatgtaaaaggaaaatccagtgccgaaagtgccaccggagattgcattgccggaggcagccatggagattgcaccgccggaggcagccatggagattgcaccaccggatgtgcccatggagattacagtggcagaaccagaggtgcaatttgtggcatcagtcgggtcagacaaagaagaagtaccaggattggaatgggacggtacagagccagaaatatttgaagacccttctcctgcgaaagaccccgaggtgccacgagtgcttaggagccacgactccaagtccaaagatgagaacaaggagaagttcatggtaaccgtcttcagagggggtaaagaacgtgccaagctcagagatgacgacccccagaaagctgctgaactagccgggccaacatacttcgcaaccgatgattgcccggaaaagtacgaacatgggaaagcactcttgccggaatgggcactgaaagaagcaccatgggagatgagaaggttacataacttctacatggaggccagcaagaaaggcttaggcaatataacagctcgatcaccggcagattgtttcagcgaagaaggttacgtatggctagatttctcatatctccactccatatatcgtcgggataagatggacgtcaactgcgtcggtgtttggtgcatgtgagtatgagttttaattaattagatgaaaaatatgtacaatacaaatccatctgattgttactaacaaacttcttctgtaggatgcaatacatggatgctaagaagaaaaaagaacccatcggcttcttggatccaactcggatctgccaaacacagcatgccgtgacgctagcaccagggtcaaaccagctgaagggcaagaatccaaaagagatagcagaatacaagaagggcttgcataaggagaaattgattactgtcgcacagtacattggacgagccttcttgcactttcaaaataagagagtcgtcatggccacttataattttaagtaagtccaatacatttatcttgtacacatatatcttattttagctagtactaactaactataatgttgttaatatgtagcgatcattatatctgtttactcatccaccctaaagacggaaccgtggtagtcttggaccctctcgattacagtcacaagcaatacaaagaatttctaacaatcttacagtagtaagttattatgactcttgcatttgtatatgaatgtattataaataaatatcctccttactgtgaaacggtacgacatccatacagtgcataccaatactacaagttcaagggtggagaacagacccgaacacgggagaagctgctagtacgtacctattggccggtaatactccactcacttaatgtattccaattgtttcactaattgcaaattttaactacttttttctataatatgtcctgaagtgtcacaagcaaccgcgaggaacggtcctttgcgggtattatgcgtgcgaattccttagggttaatggacggtacaggactaacgcggaggatgtaagtctctatactatgtactagacagctccacatatttatgatactaatatattgattaatttcaatgcatgcagttgccaagattagaatgtcgaacaagctttgacgatacaggtatcacaaatgtccagcgtgatctgtgccacttcatccaccatgagtgctgtcatgtgaaaggagacttcttcgacccagagggtgccctagcggcaagtgacgaatttaaggatcttcgagagtagaacactgctatgccataatgtaactagatgacgttatttgaagtgacaatgtaaaaaaatattgtaatatatatattttggcaacacttttgagttatgcaatatatgtagatttcttagtaccaaatgcttgataatcttccaatatatgtacataaaaatctacctgcaagaatttctattaaataatttaaaagtaatttacgggcaaattattattaaatttcaatattttctacctatcttcgcaggcgaaagtttttttgttttcaagcggacgattcctattttcgcaggcagaccggactagccaacgtccgcctgcgaaaattatctttgcaggtggacggccgccccgcctgcgaagattggagatcttcacagacgttggcttacaggcggacggtcgccccgcctgcgaagaccctttttggccgcttgcgataatgctttttttaagtagtatttcagtcaattcctaattaaaaaattttcactttgactgccttaaaatagaccaaatctaattcgtacccctcacccacataaccggatatgacaactcctcaaactattaaaaccagtgcaatttgactcccttgacggttttgctgatgtggcagtgttgacctggtgtttgtctcacgtggcgcttatgtgacattagaattaaaaaatatatgtgggactcatctgtcattcacataaaaaaatatattgtaggacccactgactgtgggtccacgtgtcatcctctctcccccttgtcccagcgtgtgggaaggagctcgccggccgaccaacgttcgtgctgggaaggatctcgctgggaggccgtgcgctaggaagcgtcgtcagctgggcaagcgggagaggagctcgctggccggacgtgcacggagtaggagtccgcgacaccattgtgagcggggttcatcagccactgcctttttgtgcttgttcagggacagcatgtccacgccgcgcctgctttgcggttccgcgttttcgatccacgggttaggtatatttttgctaaatccccctctatctatacacacacacacacaaattattaaggaaaagaatatatcaaagatctatccggtcgtggttgaacctctgcaagcagttcatctcccaacatttaggatacatacaaactgcatttcgcaccgatgatgaactggcagccttatgatttctgaccagtgagcatatgtattttgcgagatcccgcgaactgcattttcaagttgtttttgggctgtttaaatgtatgcaactcgtctgcatttctggatctctttcgtccatgcaaaggctttagttctttcacaaggataggaaatcagggggctcctaaaggcttgctcgcgcagccgcgcgcggggccctcatgcctagcgctaatagcgttgattagggctaatgacgctaattagtgttaatggtaattttaggagtttttcttaaaaaatacataagtaattcagttaaaagtttttaaaaaatagttcagttcagttttcaaaactttcacgtctaaattttttgaaaactttcaacccgaatttaaaatttttcaacccaaggtttgaaactttcaacttaaatttgaaaactttcatcttaaaattaaaaacgttcaacttaaattttaaaaactttcaaacttaactttgactcaaaattcacgcatattaaaaatatcaacaaaataatcacgcgaaaaatttttaaaaatcgggtaaaaaagctatatacacatatgattaaaaaaatcacccggagaatagcctgtcacacaaggaagccacacgcgcgtgtactgattttcactagcaacgtgggttcacatcctctaccataatggtactatcatggtatctacgtgtgggacaagaaggttgagatccacgtaccggtgatgataatgacattatggtagaagatcctcaccctagttacatgtgggacaagaaggttgagatccacgtaccggtgatgataataacattatggtagaggatcctcaccctaatggcacatacgcgcgaattatcttttccgaagaaatcaaccgtgccaaaaaaactgcattgcaatgtagtgtaccaccctggatctctttcggccgtgcaaagcaagagattgtcttctgggcgcagcacagggctgcaacttactcaggtgaatttttttttaggagtgcgactaaaaatactaaaaataatgatagcattataagggagaaaataaagcatttactgtagttgtaactactataataaaaacggcaataagaatcagtgtcatacaaaatgaatgtcaaacaaaatgctgacgcttaccatttaaacggcaaaactgactaatattgtaccaggaagcagcaaatggttgagttgctgcaaaatttaatcactccataaaacgatgggacccaattccgcttttttttccggaagaaaaagtgacagaccatctcattccattgcttaaatgaaacataaaacctgagttatttctcaaatgaagcgttataaaactgtacaataacatacaagacatgttaacattgcggtctggtactatttactgtttagtaaaaagtacattttatatatggtttcaacattttgacgtatcaaagctttacaggttacaattttaccactgccttccctcgtcttgctaagaagcaaaacttgttcactccagttgcgccggggtacatatacttttgcaaaaattccaaatttttacattatgcaagccaatagcgtggcggggatcacacacaccagggctttgcactaggattgatcattcctccagaaaccgaccaggcccataaagatttgctgcaaatctatgctaacgtcgcaactgaccacagaccagttctctaaactatttctcgaacatatagatgaatcagacatattgcgctcacataatctctgcgaatcttctcactttgacatcagtgcaggggaagacggcatgacatgataaagaaaaaaaggattcacttggattttcataagcaattgcttgtccattgttatatgttagcagtttcccatttggtgtctaaaacaactggaagaaaagacttgtagaaccatcaccaaatgaccgaatatcagcaggctttaccaatgctctacacagggggcaagtccgttctcgctcaaacctaaaacagaaccaggaaaaagctgtcatttcttgatacttgctcaaattaaggggaaaaaaaggaaaagctaagcattgaggcacttcatctgataaggaatttatgttcatgcaactgaattctcattagtcattttaggaatatatcttctgcagcatcaccaaaagcagtagtcatataaaaggcaagactgtgacaagatgccacagaaatatcactccacatcctcttctcatactataaaatctaattgccattcttagattgcttcacgccaatgttaagaataaacatgaatatgttgccatatccaacaagataccttgctcaattcaaaacaaaggcccaaagaaccaaataaagcatgtaaaaaagtataaaataagaaaagaatttaccattcagagacacagtcctcacagaaaatatgtttacagcggaggaggacaggaacatgcatcttttcctggcagatggcacacatatcaccagcagcaattacctgcaccaggttccagcaaaaaacaagttctttaaacaagatagagtgagagttcaagggggtatcctgctaccaagtaccaactagcgaatacgtgttaaatggacagttggctccacaaataagcctgatggctgaaagctgtatggtttatcgataaaatgatagtatcttattgtactattacaaaatcctacaaatgcttacgatttatcaatagttatggcatattgcatttttaagttgagcaacttgccagtagatgaacgtttacctgttctgctgtcgcataagacccataatgcacatctttacgtgacaatgctttcactgcagccaagaatgactgaacctggaacatacagtcaacaatgagaaaataagcatgcatggaatggaaaaaatatatattttataggttcacagcactaattttgtatgtgagctacagtaactagtaaaagtagtaccttttcaactactgaagttaacttgaaggtcaggtacagtccagtggttaaagatgagaaaagactcccatattccttgttcagaaagaaacggtaccaaacaggagttggcaacaaggcacgatataggagcagaaggtattccacaagggttagcatttgaccctagcaaaacagaaagtttgagcctcagaagtcagaaccaactactaagcttgcaactataaaaggatctaaaataagaaataagctagaattcaagataatgagacatgcacctttagaaccaaaataaaataacaaagataaagaaagtaacaatggaaaaactagtcacttcatgcaaaagaccctcataagttttttttccaaaataagttatatcctagtgttacttgcgaacacatggcacatgaagccaacagaactataggaatacatgatgtatacttgactatttggtagtgcatctactaaactatttttcaaactgtttcagaattatggagaaaaaactaccattcttagctaagtatttgggatatagaacccctttctagtggacacatttgaagatgtctaagcattgagctgctacacagactaattcagtagatcaaaacttaaggggataaaaataattgtatagtcatagacatgcagttattaaataaagatagcccagcatagaaatacaatatcattcagcattcagttattatgattagtttctagtcaatatatactcagtattggatatgtggaaataaagataattcagtgtgggagaaagggtgctgtcacaaaagcacccacatatactaagtgttggtacttttgaattttgatggctgcgatcacttcactagtttggctagatctctacaatctctaaccagcatagtaatcactgcattgattatcattagaagttaggtagaaccaacaactaaaggcaagatgctataaacatgatgataaaatcacaaaataaatttatgacaattagaaaaaaatgtcacctgcttacggtagttacgacctctgctattcttatagtacataagtagcatgcacttaatggccattgctgcctggcgaaccattgtatctgcaagtggcatttggttagaaatgccaactgcaacatgaaataaattgtgctaacagataacttaaaatgtttttccctgcaatcctagaaaacatacttctttaagtaaatgaagatagtgccatacagctaatatgaaccttttttggctaaaacaaatctatgttgcctgtgtaattttagcagtttgaaactatgaattgaacaccataaattttgtgccattcaggcattcaaaaatttctagcacatttaatgatctaagtgtacaaataaatttattaaatgattagttttcatcacacatttaactgaagagcatctttaaatttgctgggaattcgaaaggctaatacaaaccgagaaactaatgagttcaacacaaagccttgaattaaaaagcagcagaaagtgaagtaaaaaaaggtcattttgaatgatttttcatgatatgaaaaacgagacaaaattgctcattgtacatacatttacaaagggcaataaattttaatctagcaggtcaataaaggtacttctatgtatatggtcagagttcactatcagataatggagaaatgcatgcgagcaaattcaagaaaccctttaaggaagcatcagtaccattgaccatgatgataaaaatcgcatgccaaaatggcggtatttcttttggcggaagcatgaacagaggtctgagaagatcatcattcctgtaccaccaatagacaccaaacacatgaatcatgaagattactgtaatcccgacaagcacagcaatttttctctcgccctgcaaaaagagttggaaatatgaaaaatttgctattgacaagtattttagcaatttaacaagtagcttcaactagtttcacaacaaatatggtacataggttgacctaactgttactagagataggatgactaacctgctactagattaattaatggtaaatgtgatccaggaaaagctaagagtagataaaaatgttattctctttactactttccaaactgggtaataaagtgctgtgtagttcaggaaattcatcatttcacaatgatgtgatgttcactgcattagtacaatgcatgattatattgttatgtagtcattggcattcaaatttatgacaccagaaggaaaggtctggccagtagtcttctgattctgttatactaaaataatttcattgcaaaattggaaagtgatgcatcaagaaataagaccttcaaagcagtttgcttccgcaatatatcatttgacttgaacattacagcagcaatccaaattgtgacaaagaaacctgcacaacaacccttcctttagtgtgtattgaaatgcttacatggcaatcattgcacaagcaaaaatagatatgcaattgaaagatggatttatatgttaactcaatccattgacctttcttgacaggaaaaaaacaatttggttgtagtggcagaaatgatagagggcatgcactttgaaaagtaaaggatagtatgaatggataaggcaagatgaatataacatccaagattgtgaactgcaagtaattgaagcggtgcataattggatacaactagctgctggaatattaatgtatcatcattaggccttgccaaaaaaatggttggcacataaacacataaattatgagttgattggtgcggcctccaaaggaataaatgttaaaagctaagaacctgatatgatatatgcgtcttaatcatcatttcaagaccactaggagataatcatgtagcagaaaattcatgtcatggtaaacaactaaacgcagatatgtcatctgatccataacttaggagttaggactggtacccaaccacaatatcctccagataatgtagcacaaagagaagttccaacctaatataagaagccgggcttgagcaagtcctgtttaaagttagggcagctaactagcaataccaagctataaatatctccccattaggttcatctaataaagcaggctaaaacccactatatgagataagtcgactataatcaagtgatcatattatcctctaaaccataatgataaaaaaaataacaaacaaaatagtatcccaggaactcaaatggttaacatagatgttaagttaacacataataataatatagaccagcctaatcacaaacattaactcgcctaagtcaaggtgttttactcacaaaatcactttccttttttggttaaacatttgtaataaacaatatatggacatcaacatgaaggaaaatcgattttgttttggacaagtcacaccgcttataatcacacaatggcacgagcacaagagaatgagtattagaccttggagatgctgccgtatgaagacgacgagcagcagcagcgagaatggcagtatctgctcgatccacctcgcgacatggtgcacgtcataccgctggtaggcgcggtccccacccccgttcccggacgcgccgtccgcgcccccaccactcgcctccgcgtcggcgccgccacccctccccgcggcagccgaggccgggtcaacgtccccggcggcggtcgcctcgatcgagtcctcccccgacgaggccgcccccgcgacgcccgccgcgtcggcctccccggggccgccctggatccggatcgagacctccccgtccccagccgcggccgcggagagcagcccatcggcctccgacgacgacgacgaagaagacggcgaggacgacagcgccgagggcggccccgcctgcggggcgccggggccggaggggacgacgccggagtactcgagcagcgcagcgagcggggcctgcaggaggctggaggcggagaatctgaagccgtagcggcggaggcccgacggcgaggcggccccaccggcgcccgcgccggtcccggcaccccggcgatgatcggaggagcctcccgccggtggctccatcgccggcggcagcggcggcggcgaaaccctacaaggcggaggcggaggaggaggagacgaggcccctggaatggggagattcgagagatccccttgcttgggttggtttactttgcctgccttccttttggtttctttggcttttttttttcttgcttctctcgccccggtgccggtggtggcctcggcctgtatttctgttcttaattcttatgctagttttattttgatttagaccctctttgtttaggcttagggttattggtttagttttttaagtcagcttattggcttatatgatttataaggcagtgaatttaatatcctaagtttagtagtagagtcatacatctaactcatataagtcaaaaaagcttctccaacctagcttttggcttaatagtgtaaaagtggcttatggcttcaaaaaggccaaacgaaaacgctgcttatttgtttaggcttagactttttgacttataagttggcttataagcctaaacaaagaggaccttagtgatttagaattagtcttctggttatatacgtaaccgtaacacatatcactactaagacacatcacatgtgcatgtaacatcatgtacatgtaccgtatacggatatttataacctcttaacattttctaaggacgaagatcatcggtaaatcttcggcctcatgtttaacaagtaaaataaagataagtgacataatagctaggatattattaagcaattgcgctatttgcatgctaaatgccattggaaaaaaattcaaacattttcattagacgatatcctcagatcatgactaaagaaattttgaataattatacatttagattgaaatgtgcatttgatctctttttttaactagtatatgataccccctccctcctcatctttcacccttttctaatcatgatttgattattcagagcctatcctttttctcatcacacgtttaacaacaataaataccctactactctctccttccctaaaaaaccaacatagtactggatgtgacacagcctacgtatgtccaaattcgtattattaagatatgtcatattcagttctagattccttttttagagacgaatgaagtatgctagaagagtaaatctcaataaccaactcctaatacctctttagtcttgaatcctaattggtgttgtccccatcccttttttttctcctaaagttatttcacattatgtattattgagaaagtagaatggtattccctatatgcatctaataaagtgtacattaactagcatgaatataaggatattactgttatgaaaatatgacttaggcatccttgtgttttttaaaaaacaataaaaggtgatgatttatattggtatctgcatatgaatgagtatgatataatggagtgaataaatatacgaataaaaactctgtaatttgagtgttatgtttggaaaagaatggacaagaggcaaaattgtatattttttcaccatctatctatgattatattaagagagaatcccttatatgccactcgaaattggccagttcccttatataccacttaaaattggcttcttccttttatgccactggttcaagtttttccacccttttatgccactcccaccactattatgtttgttgactgttagtcaaatgttagttttttcttaaatgaccaatatgccctcccaactaaaaaaagtgtaaacttcaaaaattcataactaatttattttaaatcctttttgagtgaataaaattttgtcagaaccagtgaaaaatgctctttgtattaaaaatattgttgggaagctttatgtttcatgcttatattaaaaattcatttgttatggtgatggctaaaattgcacgtgataaaaaaaataataatcaatttttatatgttgtaccaacttctctatcaaatgaaaaatacctatcattggttgtataccaactctcaaaggcaaatacgtctttttactataaagttaacggtcaactgacggtggagtgacgacaatggcttaaaagggacgacaaacttaaaccggtggcatagaagggaggagccaatttgaagtggcatataaggaaccggttaatttggagtggtatataagggattctctcttatattaatgggtatgcggttgcacattgttttgtctaaacgacctatgatccaaaaataaatccttggtattgattcgcaaataaacaataaagttaaattactaaaacaatatatcacattctatattcatgcaaagtttaaattaacctaaacatttatgaggaaatttagggtataaaggatcaagtccttttgtctagcaataattgtttaattataaaatagttaagtagaagagggttcagggaatgtaatgaaagagtagcatctacttgaccgtgtctgatctctaggttgagatatagagggtagccctagcttggtatgctcaaatgggaaaattttgattaagatgctacagagatgaagataagacataatacattcataattgccttattcttacatgatatcctacttaagttgatggggggctatttgtataaccgtactaattaggaaaagaaaaaaaaacataagttgcatttggagccctaggaagactttgcctcagcttgcctgtcttgatcacctcgtctcgtaaagcgagcttggtgagaaacatacacactcctaataaaacgtctaccatgaatgtgaaatagcatcatagttgctagatgaataaaacgactgctcttttaaagccaatttatccatgcctttaagaaaaattccatgacctctcatcgatacaaattctgagtaggcatattacgccgttgtatggaacatcataaatcacatgaactttataggcataaaaattgtgagcgcttcaagtaggtttttcttgccttacatgcttgacatatctaccacgataaaagcgttcgcttgtatgggttccttgtcaattgtcaacataggtgataacaaagtgcaaacccttttcatataattttctaaaatgctctaggcttaatgaaatattttcctaatgccttcagaaatgaaaagcatcgcctaacattattctctaccattagttgattaagaccttgtcgagcgagcatgccaagatatatcctctcagttaacatgcaagccagagcatgacattactaacatgagagcagagacaatggatgaaaccaaatagagtgggcatgacaatggccaagatcttgaaaggtggtatgatgactagaatattgaaatatggtataatgaccaagagtggaggccgaacgaccttcttgatgaaatattgttatgaaccaaaagactcatttcttggtaaaagccgctctatttgtccgcaattagcaaggttacaaaagtgctcaggaagcaacatggggctaacatgtggctgccatgttttagcagcattagaacccttagatcttaaatcaacatttataatggtaaaaagaaaagttgtgtgtgaaagtccaaataatttcattaaagtctaggtcattgcatcaaaaccaatgcatatggctaaataattatagtatatgtcctaattttcacccagaggttatgggatatcatcctaaacttttatgatatttgtaccttttccttgttaaattctttgtgaaatttcctccattacgctaaacatcaccacattatgttgtgattgtcaaattgtttatttggatcggggtctattaaatactgtgacactgaaataagtctgctatggaaattcaatatactgctgcaacgattcacggtaacactttcatatgcctggtctattttacaattcacattactgtccatcactccatctcatgttctctgtcttcacatcaccataaaaattccaaactttgcttgtcctagtgcagtgtcctgggttctcccttaaaactggaatgaagtatcaagtactatgagttggagaaacttttggaattatgttgcttcagtacatggtccttcatgcaacttttggaggtacgaagaagctgttatttattataaacagtaaaacacgggatatgccataaacacggttgctagatttgagcttgaactagaagaaaagctgatcagttgctacggttaatgagtttaatctcctgcaaactaaatggtttttatccaccagaatgagttcagatgtacagtttgtccattttaccctaaagtagatatccatcaatcaataaagcagatcttacaataactttgccagtaatccagtatagtaccacctggcaccataaaaagttgagtaaaccagaacttgcacaccaccttttttttctttcaaggttggcaacaatccacggtttcaggacgaacaggtgaaaagacaaaaattaaaccggtatatattccatgcctatttccctttgatttgttcatacaagggaattcctcaacctgaacggtaataatttttccattcctgtatcatcattacactgatattacatgttctacaactgtaccagcaaagaaaagaaaggttatgtgactgcttctggagctgagttgcagtagggagtgtgcaagcaaatgaatctggtcgacatcaggcatacagaggcaaaggcgaaacctatcaaaagcccacagatgctcttccgcatgtccaaccttagcgagcgtttgaagactcggccaaagcttggaatcaaagcaccacaggcaatgaccatccagtagtctagtccactgtagtcaatcttcgcgaggattgcactgatggcagcgcttggccctgcaaagccggtcaaagcagcggctgccaaggctgcccgccaactatcagtggcaccatatatgcagctcgcaacagcagcacctcgtggtagaccatgaagggaaactggaagaaccatgtagcgccctagaccataagccttgcgcgcagccacaccaagttgaagaccttcagcatatgcgtgaaggaagacagaaccgcaagcaaggagcgattgcagtgtgaggacactaagtgagaggcctgaggatgatgtaattacattaacagaagatttcttgcggttaactagctgaaggatgtttgatgtggcgacatggtaaatgagagaacctccaattaggaggaataaggtggtaaatagacccatcttcgatgacattagaagttgtaaaggtctccatgctgcgagacggaaggctatgcctgatgctacaccagtcaaaagagggtgtggcatgctgaaagtaagagagaatgcaacaagtacaattcctccaaaaagaggacctagtccaaatacaagtgataccaaaaagcctgctgtatcttctgagctgcagatcagaagaaattaataacatcaatcagaaattcaaagtacccacatagtactccggaattgtatagaggaaacttacttgtggccatcagtaaatccctgaagcactgtacccaatgtttccatgaaagcaacagcaagcgttccggcagaagcaacttgagatggagcagcttcctgcatgaaaaggaaaagatgagcaaaactgcatttacaaatcaatggaacagaagattcagccattaacagatcttctaactaaatgattagagttcaccttaaaagcatcaggaagaacctcagcaattacaatccatatcatgcatccagcagcaaaaccagtacaaaagggaagcaccttttgaaatgcatcggcacaaaggaatgcagggacagcaacaattggctgtattaaccaagaaaaatgaacacatggtcagagtagtgtggaaggcaaaagaatgtcagcaccaaaatgtagcttgaaaccaagttggtatgctgttgcatacaagtagacaaacatttcgctcacaatgaaatactgacaggaagttgcactattggcaagtaaaaggaaaataatagtggcaatccccattaagggcttgttcggttgggccgttctcggccgggatcggagcccaatccccgtggaaaatcccggcgtggaaaggataccggcccacgcaagtataggcgttcggttaagcccaggcgagattttatcccggcccaccccggtgttttcccctcgtcataggccgggaaatattcagcttctctggtggcgaggaaaaaaatcctctcgacgcagcgacacaaagagagggggcgctgcagcggggacagctgcacagcgcagcgcgactccgacgcgacggcgacggcacgctctctcctccggcagttgactcctccggtggccaccttctccccggtgagttccttcacttcctatctcccctagcctcctcttctagtgttagggtttcttgcgcccgtggcctcgtgctactgcggcggcgcacgacggtggcaggcatggcgggggacgccgcagcatcacaccccctcaccatggcgccactgaagctctaagcgctatggcaaggagaagcaggaagacatggatctgttctttgttcctcacaaggtttcttgatttattcttctttctcccttgatttgttctgagtaatattcctaacttagtctgaagctctgatcatgtccttcctggatctgatcctctgtttgtagtgccctagtgagaatatgctgattctcctggtagttgagtagttgaaagaccacgttttctgattcttattgtgagttgttttaaatttgtacataaaggttatgaaaatggtttattctaaaaattagttggcaggtaatagtaatgccacaaaaacatgcagtgcgtaataatattgaggcatcagaagtgaatgctgttcatttttcagaaatactagacaactgttgttcatcagaagtgattccaacaagttgtctgctcttgtaatctcacccatacttgacagtgcccataatacaagtagatcaatgagccattccacatgccatattttctgaacaaagtacaaagttcaaattgaagtagtaagaaaaatgagtcatgtgcagctttagttcaggcctgtaaaaagctcttggcagtcggcagaatacaacttacttaaactgaactattttggtacatggttcaaatggtctaaaaattttcctaggttggtccatttttagtagatcttttttagaaccatctaatgaagaaattctggatgtaaaacatgatttttgcagctattgcttgcttaatctgcagactactgatttttgcttctactgtagctactattgaattcagttttttgcttgctcaatcttatatgtgtcctaatttcattttgatatctgaagcactgctagcagtagtctcatatgcatgtccatgtttctagcactgctagctattaggcaaagcacacaatacagcttacaaacaatcacttgtcaaactgaaaacttggtaaaaatgttgcccaggatcaatagttggctggtttcaggaaatttgagacaattgctcactgcacgaaagcattgcctaaattattgcattttacaactgaaaactgaaggaaacttctttcttctgtacaggctttgggaggaagtctgagaggatggtagttcagatacagagtgaatgagcagacatgtacaagatgatggctttttgcaggagcaacaaatgttgatctctgaaccattgtatattgctgatgtaaccatttggtctaggagtcctggtgtggcagctcacatttatttttatagctcaagtgaatcatgacatagtttcatctttttccttttttattgtcaaatttcacttctatgactgtatttagttgtctctgtattgtcaagtgacctcaagctttgttgggtgatgcctccttgccttaaaccggatacaggccttgatgatactgcaatatttttgttttaatgattaatcaatgtggttttcgcgtaattgatgaggttactgcaatatttttttactgaagtgtaatttcattcatgttgcacttttcacttatacaaaaatatcggtttgcaatatttttttgctattctaaactgccaacctgaaaatcaattttgctattctaaactcaatggacagcgtgcaacgttgaagcaggaaagcaccagtccttctgttgttgctgttgcctattgctgccttgacacgggatttaagcaggcgcaccaagccaaaaccgaacaaacgttttgaagacagggattaggaaaatcaagggaattcatcctacagggattaagtgacatgggagggatccactcaatccctccctggataggttccccttgggggtttaatcccaaggaaccgaacatagcctaagtgattatctatggctttgttattttccacaatatggtcgtgatatttcatttaacacttgagatcctttgtgatgcgccaatattatctctaattttgcttctttgtgatgttactgagctaaatttcctaaaatctacagaagtatgcataacgagctagtgataagtttgatggcttctcacaagtttacaacctcccattttcaattagatgacactttagaatgcgtgcaatcaaatctcaaactcttaattcaatgatatatgcaaaaacattaagatttaatatgttaaaatgacattaatagatttgtcacaaaaaagtactttcatgtagttatttttaaaataattctcatgcatatatgatttgaaaaggcaacaatcagacatgtgtattggagaagtgttgatgccctgaactgcaactgaaaaagaatggaaggagcggtagagaggcattcagcaaaagtttctaagtcttaaatgctgattttactcgaacaaatgttaggaccttggagatggccatgttttcttatttatcaggttagggcgtttaagtcctagcatgtccagcttcacagatggccaccaaacataaatgaggaactaccagatatgcaagcaagataggaaattgtgaagagtatgccaccacaaagaatgctcccttcccttgctaccattattataattgcactaataagtaacgatcatagcaatggaagaattccaatttaaaaaatcagtggacaaagatcatcatatattattcataaaagtaactccatttcacaaatgcgcatgcatgcaccaatgtgctatgctgcacaaaagaaacatgagtaaattacattggtggtacacgaacttgtcaggtgggtgcaaactaatgcataaacttgtacaatgtttgtgttggtgcatgaacttgtctggtgcgtgcaaaccaaggccaaaaggacaccataaggctaatctcatcgatttaagtggtgattaggatgcgatgtaaacatgcaagtgagaagacgcaatatagacatatatatgttcaataaaaggtaaaataaggcatgattgttgttagagaaagacataaaaaacctgagtaatgatgcaagggtgtaaacaaaaagaaggttaatgtaggaaccgagtttataaatatagcatatctcatacccatctcatatgtgcatatcacgtcctaatcaacgtccaacttggtaaaattagccttgctatgttattttggccttggttcacaaccaccaggcaagtccgtacaccaaaacgagcattttacaagtttatgcactagattgcactcacctaacaaattcgtgtaccgccaatgcaatttactgaaagaatagcacatgtacacacagacacaaaagtgaaatagtatagtaactaaatttatagaaaaggaaattcagattgtagcccctttgcaaaaggaaaaaaactgatttcactttttctggctacaaaacatgaaccactataagtctataactaaaaaatagagaactcttcatgttgactcaagaacaaggacatttatcaggtaactcatatttcagttcaaggatagagcaagtgcacctgtggtaaagatgttatgatactccatatcattgccttttgtggggatacacccctggatgatagcaacatgcttacagctaagccttcaggtatgttgtgtacagcaatggctatagtaactaaaagaccttgagagaatccttttgagccagcaaaggaaacacccacaccagagccctccccaaaagaatggagtgtcattattccgacaacaagaataactttacttgcatctgcaccttttatatcgagcatgcttacttctccatattgctcaagaaactgtgtaaaatgaaataatacaaaatatctaagtaagagataaataacaaaaatacatgtaaagaaatatattgacgacaacccaaaacacaaccatcaaaccaaactggtacgatggtgaatgcacttaatatgcaagtacaatagtgaatgcactttcaacatgtaatattgaatattgcacgccctcaatttattagaatctgattcttggattcaggagtcaggaataagtaggttaaatgacaacgaaattatgagtatgccaacatatattaggacagaggaaaacccttttgaatgccagtgttctaacatagaagctaccacgaaccacaacaatatgtgtataagtgaattgcaatcttaattatgttaatgtattgatatgtacattgtacatgccatttaaatgaacatatgaactgaatgggtctttatgacatccatgactagctccgtcaagtttaaatacatttgtacatgatttgatatttgtagattagtgaaaatgctaatgtactaaatagtactccataagtgatatcacagaaaactgaagagaatgaaacaggaagtaccttcttgcaaagccagatgaaaaaccctccgctcaaaatcccaaacacaacccagctcccactgccatacatttgcccttcctgcacaagatcaaagctcgccgctaacatcacccctgccgcgagtccattgcaaagtcccgcccactgggcctctagctccaggaaaaagaatggcagagcacccaaaccggtggcagcggccattgcaagcgtcgaccacgcgaccgtagacaccggcaccttcccgctcttgaacccatcctgcccgcctgcgccctcaagcttcctatcaggcgcttcctgcacgacgcgcacaacgccaacctctgtctcagcgaccgctgagacatcgcggacaaggacaaagagcaggaagaataggaccactccaactcttgagtccatgttcactctaatggaaggcactcattcagattcagagattcccatgccccggtccaatcaatgcaacacggtcagcatcggcaagaatcatgaagcaaagcaatcgtctcggtccagcaaaacagaccagcagttcacgattcctgcatggagagctgctccagcactgcgacagaaaggagcacaaacacacacatttagcacgattctccgcaccaattaggaaggaatacaacagaacacgcaagctaacacaaaaagaacgcatagctacttccgtctttttcccccacctccccgtacgcaacgagctaacgacagcaacaaggaaagatccaacccgacatcccccgccccaatccctctggggtgagacatccgacgacccaaccccaaggaggatccctccgcagaggaaaccccaatgactggagcacgagaagactgacctcgattcgatataccgtcgccggcaggccgacggtgaggggggagagggagaggggcggaggaggggcccgattgggattctctcctgtggagatctaactcgcgctgagaaggaggaggaggaggaaagcaaagcagggtcgtcggtgatataggcggcgacgggggcgaggacggggggcgcgcccgtgcggggcggcgcacacggattttgggtgtgggggtgggggcgggtttcgttttgtcgccgaaaccgtcacgggcggaggggagaattgtatatgtgccactgttaaaagctggtttcgctcgcttacattttccataaaaataactttttctcggaccgttttgcccctgaccaaatctcaactaaaaaaaccaaaaaaaatgataagatttgatcgatgggaacccccagttcaggtctccatatagttcttccacattgccaacttcagaagaacgaaagtataaatttacatcgtcggagacaagatcgatccaacaaaaaagagagaccaaaagaaaagcaaaacacaaataaaacaaaaccaaatctacagcgaaacgatcggagcaaaagaatcgaacttttcgacgggatgagcatagcaggtcgaggagatcgattggaaggatgagagagagagccttccatggcggcggagttcactgggtggtggagaggagaggcggcgcggtgggagaagctgcgccggcgaggtggggaagaagagcggcggccgacgtgggggaagacggcggcgcgctagctagtggatgcggcggcgcgccagccgggcgccggcgtcgtcgccatctgttcttcctctcctcgatctgtgtcttcacgcctggaacagacgagagaacgatactggtagagatgttgatttggtccaggggcaaaacggtccgagaaaaaaatattttgatgaaaaaggcccaagaaaaaaatattttgatgaaaaatgttttgcaattgcaacaaacgggaaaaatggcattctagcgaacgcccacatcttaacagtggcattagagcgaatcccattttagggatggcattcgagcgaagccagtttttaacagtggcatatatgcaaattcctcgggggagggagggtggagtcacgagatcttgtctggcgtggttacgagaagtccatcgtgccatgtcatatggtgtgcgggtgctggtgcgcgtcccggttgcagcaacatatatacgatctgggctcgaagcagtggaactgggaagtgtaggtaggcagcggcaacgcggtcagattgcaaatcttttttttccataagctaaaaataggaaacaaattaaataaataattatgttctaaccatatttaaaagcataagatattctatatccttcgtagtgttaacctattactatattaatgagaatactagccgctaataacgttagagtgcatactcctactaaacaagagtatgcatcgccgccaaagacttttcgcaagacgacttatcgagttcttccccatcgatcgaaaaagaagttattctttagactactgggacaaagaatctgctctaacacaaacggttacgaaacctgatcgattatggggcatgcaaccacgtatttgataagcgctagactttaacaagatatacattaagaagcatttgactctcacgtaaataaaataaaaacatttgactctattactgctaggccacacgtgcagttggggctaacggaggtttttaatagaaatttaaattgtgacgaggtggcactgttccaattccctcaaattatagcggcacatagccgatatcatgaatagtagtgatattttttcaaatcagcaaaattgcatggcatggatccaattaaccctttgtaaaagtagccctcgatatttctaatctatagtccaatgtttgtgtaaaataagtgaataccatatatttaaataagcaaacaagtgattctaacatatttaataaaaaaatgtatttttgtttataacatattataatatagcattttcttttacccatagcaaagcatgagcattttactagtactcaaatatatgtgagtaacaaccaatccattgatgaatggactattgaactctccaccccctcttttgagggttgatgttcatgcaagtgaaacctattgtagccacatcatcaacgtcattccctacccaaaagatagttatctgtcaccgaaagatccaacatatcataaatgatactcatatttaacagtttattaccatatgttaatctaacatacaacatcccatcctatcctatagttcacacccttatgctagttaaaaaaaacatcccaaatatcaccctaagcctcgctcttggtttgctcgattgaaccactggctcaacccggttcaactaaaatgagatatgtactaaaatcactaacacatacatggcctagtggtggaagcatgcctccagagggaggttggggggttcgatacctgacacgtgcctccttggacagctatacgactcttcctcccaataagtggtataatagtccggttttacccggttttctgtggatccgattgcacactgatcttttagttggatcagacctgccggtttaatcagtggtctaatagtccagttttacccagtttctgtggatccgattgcacaccgatcttttagttggatcaaacctgccaatggtcgcctcatagggtttgattgtgtttattttctttggtagattcgaagtgaaaaagatgctcaacacgatcaaggtccattttttttgaaagatgtgtctagagtcgtattcatcaatagaaatcatataacatatgtaaaagagaaaaataacacgtgaataatgataagtgaagagaaatatcaaataaatatgagttaggaggacctatttgtaaccaatcgttttataggggaatctcatactttgggaagcagatcgtctgacgttgggcggccaatgtcagagagacgtcgggcgtcgatccatcgtccgatcgacatctcgcagtgctgctgcttccttcgttccgtatcgcacgagcgcaacgaataaggcggtcaaacaggatcgcagtcagcccacgccagtgaaaatggcccacaagcatcctcattgccgtgtgccgccgccgttcattgctctgtttctggagggaaaaaagggcaccaatatactcggatggagggaaaaaaaagacctttcggctgctgttcttatggcgatgaagatggtgaatgaacaacaagaagcttttctgcacttaatcataaaacttcagggcttttgaagcttttctgggctaggcagcagtggtcaccctttctcctgtttttgtgcggctcttggcatccctccgacgtgggtggtggtgaacagcttggcgccgccgccgccaccgtagaagccgtcgttgtcgaggatgccgatgcctaaaagctctcacgtgggggaggacatggggccgagggctatagaggagggcgacgtcgaaggagtcttcctcggtggtccgctcctcccacacccgtgtcgaggaaggcggcgagcctcaacggagcggcgggcagccatgctgggattggtttttcttttctttttttttgtacgacagtggacgagcagtctcgttcgtttttctccctcttctccctccacggttgcttgtaaataggctgaatgggtcgtcctcgctgcgctcgtgcgatgcggaacgaaggaagcaacaacgccgcgagatgccgatcggacgatggatcgacgcccgacgtccctctgttggccgcccaacgtcagacgatctgcttcccatactttgatatcttgggcggtttttgcaatttttgctttttttttaggaaaaagtgcatcgaaggtccctcaacttgtcgtcggattacaaaatcgtccccgaaccacaaaaccagatataagtcatccctcaacttacaaaaccgactcactgtaggtcctcaggcggttttgaccttggttttatccgatgtggcaactgagtcagcgtgagacccacgtgggccccatatgtcaggttgaccacgtcatcactttctctctcttttttccctcttctctcccttcctcctctctctcactttttcttcttagtccgggcaagccggcgcagcgagggcgccaggcaggagaggaggatgtcgggaggccggcgaccggcggcggccgcgacgacgtgagagcaggagggcctccccccacgccgccctcgccgctgcagccgatagtgcggacgccagatctacgtccatggatgacgacggtggcttcctcgcgctcctagtcggcggcatccgcgtccgcctcgtcctcccgcgcctgccctcccacgccgccagcctccgtcgtctttccacgtgcggccatggatgacgacggcgacgacctccctctccccgttggcgccatccgcctccgcctcgtcctcccgcgcctgccctcccacgccgccggagcaggagggtctcccccacgcgtggaggccaaggactccctgaccatcgtcgcgcggtagtcgccagtcattgatctagtgccccgtccgcggcaaccttgaggagctgtcatcgaccatgattgatgcaccgactgatcctgcagggtgccgtgcgcttgggttcaacatgatcatgtccttcctcatcgctctggtcgtgaacgtgtccatgagctacctgctaccccacgcatcgatgagatcaacgacgacgtaaagctagctaccgcgccgccatcagcgtctgcgcctctctcgacccgcccacgcgtggctactcccaccgccgcccgcgcctacttccacctcctcacccatcgtcgtggcgcctgcctgcgcccagcacgccgccgccgccgcgtcgctacgcggcccacgccaccccgctgcccgtttcctgcctcgccccgccggccgacccgcacgaggggattggggaagccggcgagcttgcgccgccctgagcacacggccaccacccgggagccgccggctgcaccaccctccggccgcgcgcgctgctgtgggtggtagcctgtcacgccctgaagttcccctttccagctttaaaatttgttaaataaattgcctaaagaaattgttgaattaacctagagttgaatccttaactaataaatgcatttaataatcaaattcggcgtggtggaatttttcttgagttccccatgctccaatacattaacaagatttttagtgggattttcagagctctcgaaataattttaaccaattaaaataagcaaactgcaatctttaaatcccagggaaaatcttttcctccttttctttttcttttccctccttttcctcttcttgggccgtcggcccagtccaccccgccaccgcgcgcgccctcctccttgtgggccggcccaagccgcccctccctctctcctcgggacgccgacaggtgggccccacctgtcggggtcatccccttcctccggccgcccgccctacgtcggcaaccgccaccgaaaccgccgcgcccacctccgccgctcctcccgcgcccacgccgcgtcgccccacgcgtcttccccgcgacgccgccctctccccgcgtctcccggcccgcgcgtgcacccgaaaaggggcgggattcgcattttgaatccccacatttcctttctctcctccccacgtcgccggcgaaatcggaggtcctcccggccacgtccgcctccccctccgcctataaaacgttccccgtgccctcctcttcccctttccgctctcgccgctccctcccgtgactcctactgagctcgcgccgctcgccgccgcgccgccgctcgccgccgcctccagctgcgcgccgccgccactggagccgccaccgcgccaagccgccgccgccgttagcttcaccgccgcttggagcacctcggtcaccgcctcacatcgcccgaacccctcgggagctccggtttccttgcacgtcggtgagcccctccattcccttcaactccggccggccatttttctcgccgcgggtttcctccaatcccctaacccctctcctctccctccttaggtgccgccgccgcccgtccgcccctcctcgtcgccaggtcgtcgccgccaccttcatccccgctccggtcgccgccctccggtgaggagcccctctcctccctccttcccacttttccccgctcgcgccgccgctctccgcgcgcttgccatcaccttcagccgccactgtcgacctgtgcaccatccgtcgccgccactcgcgccgccgcttgccgtcgccggtggtcgcgtgcgccgccgccgcaccccatggccggtcggccggctttgtgccgagctgagccgtgccaggccgccgcccgcaccgtccgatcggccccgggccgatctgggccgtcggtcccgtggaccggcggtggaccacccgcgtggtcctagtccacggtggaccggccccttgagccactgccaagtggggcccgcatgtcggcgccccctcccttgctgacgtcagccctggggcaatattgcgcaataaatatattaaggcttttctttaatagtaaaaacacagagaatcttctaaaaatcataactaattcattcgagctccgattaagtccattcaagtatcagtaaattcataaaaatgcacagaatctattaaaaatggttttgtttcctctttcagtagtcttatagcctgttttgcttgtgtgctttgtctgtcgtgtatatttcggccgtttcgtcgatccacggtttctcgaagaagttgctgtggtctcatcagtgcgaaagcaaggctagtcatacattacaattgatcatattgtacccaatttacaaatgtcccgcatttctattaaatattgcattgttttacaatatcatgtgggatgggtcctattactcagctatatgttgtttcccttacgctattgataacttgggtattaaaatgactagatgttggtttaggagatgcttagccatgcttagttcaactagtgcacaaaaggggatcacattaaagcatagactttgattattggcatagctttggtttagtgccaccgtaatggtgttggttaattaaaatacactacatggtgggctgtgggtgcatggttttgttagtcgtgcccatggcgattaaggaccggttcgcgggatgccctggaagaacttaccgtacttaccacaagccagcgtgggcaacggctgggcttgtagtgtagcttttctctagtcgacgtacccaggcgagggtgggcgtgatggagttgggtcggccggggtgtccggttgatcggcttccggattcaccgcggcacgaaaggggggctgcccgttgcctgctggggacgggggtgaaccctaaggtgtggtgctatcggttagagggggttatgcgaagggtcctgtcacggcctctttccggtatgtcgtggtggcatgtcggcgcacgggaacgtgtcgtggggctgtgtcttgtgggtacagttgtacacctctgatcagagtaaaactattcgaatagccgtgcccgcggttatgggcggtcgaccagattcaccgtgattagtctcacccctagttagcttatggaactggttagttcaggaggtggtttgggcctgttgcaacgtgggtagcgttggacagtgattggttaatattgataaatcactacagctgttttactgctttcaactactgcttttaaatgctagctttatgcaaatgagcctttagcctcctttggatatatcctgcatcatacctcctctcccggtatgacttgctgagtacagtgggtagtactcagccttgctctttttcccccacaccagagctgaagatcttcctagtgggagctgtcttgtcaaagttggtttcgtcgctgacgtcaatgattgcctgtggagtggagtcgccccgctacagaagtcaagtttccaagtctagctcgttttatcttttccgctgcatttgtaatcttttatattttcgtaagacgtggatctgtatgtcaacaattgtcgtttgtgtaccctggctggtcctggacaggggtttaatacacattcagcttagaaattctggttcgtgaatttctgggcgtgacacagccctagcgccgtccccatgcgagagcagagtgctggcttgtttggtaactcgagggaaggggattgggagtttacacgagggaattgatgatgagattaagatgggaatttgatttttaatcccaatatcttgtttggtagaggtgatggaaattgatagggaatttagttggagattaggtcattaataaaaacggatggctgagatttgcttaaacaaagtaaaggaggaattccctcccaattacctgcccctacccaggtattgaaaaggatggagttccttcctcaattccccatcctcatcccaccaaaattttcatgtctcccaactaaacaaaactattaatagcctcatccctctaaactcccaatctctcctaaaaactccctccaaccaaacgggccaaggaaggagagaaacagagaaagaggaggggaaaagagagtagggtgctgacgtggacaccctgacgtgtgggtctcacgtgggtctcacgctgagtcagctgtcgcgttggataaaactggaatcaaaaccgccaaaggaccaaatttgcattggttttgtaagtttagggatgcgttgtatccggttttgcggttgggggacgattttgtaattcgatgacaagttgagggaccttcggtgtactttttccttttttttactttgagttgagactactatactgaacgggctgcagtgaattcccagacaggcaggccagcggccagcccatccagctggccaagtcttcgtcgtcgtcctcctcaatcacatattggagacagcgacgcgcccatctgatttagacgggaggacgccggccgcctgacttcctccctccgagactccttcgcggcgaaggctttacagagctgcaggcagctcatgccgttataatccccctcgcgactcgcgagccaagtgagaccaacccccaactcgacgatgaccatggaggcggagcgcgacggcgaggagcagcgccgccccctcctctcctcctcctctccgccgccaccgtcgccaggtaggcgtactgccaccgccttcgccgtccgccctcgttctctccccgatcccccatttcaggctccgtctcgtgatcgtctcaccctgcctgcctcgtttcgtcgaattccgttccctgcagcggcggaacatcagcatcagcaccagcagcagtaccagtacctgggccgcagcagctcgtcggcgctgcgcggcggcggtggcggaggaggaggaggagcgggctggggcgtggggccggaggtcagcgccgcggaggtcaggtccgccgcgtcgatctcctccgccagctactacccaccgccgccggctctccaccacgacgtctacccgccggacatccactccccgtccccatcgccagctgcccctactgctccgcaccctcacggtgattccgcatcgcctcttcttcttcttcttcttctcgtctctctgcatttcgcatcgcatcagctgtgtccgtgaccctaacatcagttggttataccttgcaggaggattagcaattgttcctcaagggccgtacccgtatggcggcgaataccagccttctcatgatggcagaaggtgagcacttccaatcgaaatcgggtatttgctgattagctgttatgatcctgctgccgcaagatcatataactaaaatgggtagtatgaagtgtgaacgtggtaagaaattggggaccgaagacgaacataagagagaggcgctgtgtccattaaaacgcgtgagatatccaccctacttgaatcccagttgctcctatatgtccccttctgaacttgtttgcgcctccttttcccatgccaggtacttgtaaaggttcttaagagtagccagctagttggcaagcagtagccagattatctctcatatttagcaagcggaatgtgcaatattttgatttggtgttgcagtggccagttggataatattgcgaaacgatatgtctgcacaaatggcacagtcaggccagaaagattttgacaatttgctagctaatgtagtgccaattacacatactcagattgtaagtagggccaattcagtcatctttctgattgtagcctgatgcatgccacctccttttaccagttattgttgaataggtagtattcacatgatggtcaaatagtgcagtgatctttctagcctccaaaatccaaaataaatatctgttgggttgcctcttattgatttagctgatcttgccttcaactccatctacaaaccaataatttaacatgaataataatgaagagataatgcccgtgcacactaatatgaaattgttgaattttccttcgaataaattctcggaaaaaaaggggggaaaacttggaaaatgagcgaatgagcaataagcactgggatgcaaaatactgtatttgataagattgaccagaaatatattatttcactaaaaaccataaattccactataagcatataggattcaacagagaaaatactggctgcatccaaaagtcaacctggaaatagttctcttggtgcttatataacctcagattctcagtacatcagcgcacagctgaaatattcaaatcacaattaatccatatttccaaacattagttataccattgtgcattctgctcaagcagttagctttcaacagcacacacatgcctaatttaatttgtgccagtattaaaaaagtacatggcaacagctaaattattgtctttgtgaccaacttatgtaagctgattgatacttggtttgtccgttggccccaaatctcataaaaatgaaaacactgtttgctcttggtctgttgtcctgtgcaaatttgaagagtggcaagaagtgatttgggatgggaatgacttggtacttgtagttgagggataatgcatcttgaaggaagaaagctctagagacctagaatatttgttattgagcatcgcttgggttggttgtagtggggttgtttccttgaccccttctttgtacatatatttgctttcttaatgaaatgaaacagagctctcctgtgttttcgagaaaaaaagacctagaatatttgtagaagtaccagattgttagacagataaaaagagattgatgatgtggagcattggaataactagttttgcactaatatctataatgattcctcatttttctctgatggcaaaaggaaaggaaccatagctaacctgcacattatttcccttttgttccatttttttcctgcaatgctttctttcccaagatcataccaattcttcacatggaatgattgaaatatgctgacagggatgtactggatgaggtagagatccggcagctccttattgatcatgttgggcatcggtgctgctggggaagtaggcctgctcgcacatggaaaattacctctattgaggattgcaatgtatatgttggaactttggaaactttcatcgaggaaagggacactgtaactaacaaggaaccctatgatggtgggaaaatagatggaagagacaagggtcctgtgcttgcagtgtgggaacttgatctgaggtctgagtttcctctactgtttgtaccagaaaaagaagtaatggtcaagatccctcactcagaagtaattgaaaaatgcttaggtatggttttcattctgaagcactcatttagtcatatagtttcttttgccgattgtgtaatatctgtacttcccaactacaactactgtgtttcttgcggttgtcctagttcctatctattctgcaaatatccttctaagcgtcagctaaagttctgaaatatatttttcgtcccatcgtatatcatcaccttaattcttttcgtttatgttgttatgatgttatataggaatcgatatgtgcacttatttgggttttttaacacacatcatttttcttagaacacgcaagagatatgcgtatcatttcattaagatagagggaaaaaggtggacggcgttagagataaactctggcacctacccacccaggaattgcaacactgacactacacacttgaactcaccaaaacaggagaaaagataataggagatagtttttttttaaaagatgcaagagatctgtgtatcatttcattaagcaagaaagaaacacgaggagggggcagaaaaccccaaccttgcaaataaacaagtcttacaattacaaagactcggaatgacctttggctttcttaaaattatttgtagttggactccttaaatatatttttcttatcaaacacttctggcttcttcctttatactataattgtcctatcagtatgatggtatatatgttttgcacggcacatatcataatttattcatcattgttttttctattttgaatattctagtttctgatctaaattttctcctagattgcgagagtcgtggagagataccatgtcctatttgcaatgctggtcaggagcacggattttacaaggcaaatcagatgacccgttgcagtgcatgtcatgggaggggtttacttgctcaccaagatggatctgatacagtgttagtcctgcacttctgctgctaactttgttttttagttctacatctcgccgtttacattagtgtcattatctaaaaaaatagttcacatttgcacctaatttaaaggccactaaagaagcacatcaccacattaatcacctaattttggttgcctgttcaatttgagttggtaaaattgtgtacatgttaaggcagtattgttgcatttgttctttggtccactagatatttatttgtatttacatgtcaatggttgctattttatttaagtttttaattcatgcctgattagatagaaaatagtactctaaaatttgaaaaatgctttcctattattgagatattttacatctactggtaaaagtatgccacttctgttgaaaatgctcactttgtgcgtatctttatttgtaacagatgtggaatgtgcagtggtaaaggaatgttgccttgtatagcatgtggatcgcgtggcctagtaacatgcaagacatgtagtggctatggttcccttctcgcaaaaagcactgctcatgttcgatggtaatttgattctttttctgctgttgctgttttagtgtttacgttgagacgatgtatagtaacaagaaaataaaatcaaaatatgtgatggctgaaaggaacttataattgctacaatgctttatatcatgataatattggtttaatagttcagtaatcctgcaaatgtggtaaaaaaaagcgtagtggagaatttgttgttgtagatcttgtgaattgatgctttaattgtgagtttggcctatcatattagtttcattgttttagagagagtcctagcatattagttgattcatacaaaatacctcggtgatgttcagggaacttatttattaatgtttcatttgctggatgctttacagtcgcatctcctaaagctatcagtgtatctgtaacttatgcatggcatagtagaaaaaggcgtttctccatgatttgccatcaaccaagcaaagcaatttgtacacttataacgtgatgatatgcacattatggtttgaaggaacgcctctatgatttctacaggaaatttcttttatgctttttattcatgttttggagaaaatactttacgttttttttttcaataattacgtaatgcgttgatctaacttgaaattttcctgtttctaggaagacactgtcagcaagaaaagtgagcgcaactaggggagctgcctctgtgcctgacgaagtattccacagagcccaggggattcagctatgcaacatacaggcgtaccagtgcactcctgcattcttcgccgattcgtaccagctcaaccagttctcctcagaagtcgtagctagccggcttccagttccaccgtccgcgagggtcatttccgagaggcacatcatctccgtcgtgcctgtgatccgtgtcacaatggctcatcgcaagcaatgtttcagcttctacgtcgtcggctacaatagggatgttttcataagagattatccttcgaaattctgctggggcctctgctgttgctttgagtggctgcggaactagttatttcttgccatgtgacaaaaatcgagtgtgcagtattttatagtattacatacggagtaaggcttgtgtataattatagcaaaaccgaagattaaagagggttgaatgaataagcataaccctgtgtgttatgcattttttacattacagaagctgtatcctcgtattctattactagggcttcgtccatgtagatcatatctgtaacaactgctcgggcatgaatcaaatcagttgtgaagactttcccttagacaattgtgtcggtgttttaattctggcattgaaattttcagatgaaattttaaaataatttgctgaaagcataaaaagaaacgtacgtgcaaatcaattttaaatataaacattttgattttttttatcacaccatagcggcgacgcggcgtgagtctaaactccaaacccatgccacggacggcacaattctttcaagatgcgtaaagtactaaagtgtgaggcttagaaacaggttatggtattctttatttttaaatcatttttagagaaatggttcaaagattagagacgatcagaatttcatattggattttggacagtttcaatccctaatgccaaattgaggacagtttcaacggcttttataaattaacgccctgtcctccttgaacgcctcctttctcctctcatttgcaataaagccaaataacccaaaagcgatcaaagaatccattgcgattttgcgacatcgtgaaccgggaatgacgacgaagaagaagccgctgtcgtcgtcgccgtccacctccgccgtggcgaagcttctcctgcggtggcgcggccggagcaaggcggccaaggacgagagcatcgagttcttctccgagctacggagcagccagcccgatcgccgcggcgccgcctccgatcacgccggtgagaaattgagattgtccgctcctcaatccctcctcgttcttgctgagaacgaggaaatttctgcaatgcagggggaggaggagctccggatgggaggggaaaggcaaagagctccgcccccgctgccgccggtggagacgccggcggcggcggcaagctcttgtcgacgggaaccgagaagcatgactacgattggtacggatgaatcggtggtgcattgaccccgaaatgtagatgaaaaattgtcttacgtttttcttttaccgaattgcgttggcaggcttctgacacctccggcgtcgccactctggtcgccggcgacgagcgccgccgcaggccaccatgtctccgccgcgccgccgccgagccggctggaaagagctagctcggcgccatacgcgaaagggaattcacgggtatgtgcatgcgctctcgccctacccgatcaaaattttcacctcttgcaattgcaaattgttgtttgatcccccatttctcccccttgcgattgcgaagcagctgccattgacacggcgggagaacgggcccccggcgtcgaggctgtcgaggagcagctccgcgacgtcgcaactctccaccgtcgcccacgcgccgggcaccgtgttctccggccgccggacattgtcgtcggcgtcggtgtcgtcgatcaacacggcgagcagcacgtccgtgggctcgacgccgcgggggtcgtcggcgtcgacgagcccacgcacgccggccaccgcaaggggcgcgccggccggggcggcttggccccgtcacagggacagaacacaagcactgcacgtgttcggcgccgccgccgccgccggccaacccagcgcgtcgtcgctggtgtccaggtcgagaccctcgctgacggcgccgtcgagcggagcgctccagcgcgcgacgcccggcgccgccggcacgtcgagcccgaggtcaaccgccccggcgtgtcagcaacctgcagcgaccagacgtggcgccaactccgtggcacgttcggggtcaacgccacgggccgcgtcgccctcgccgcgagcgcgtgacgtcagcattgcggcgggcgcgtcccgtgtcgcgccgccgcccatgtccagcagcaagccgaggcaggcgccggcgtcggggaagcaaagcaacggcaacggcatggcggcggcgagcacggcagcccagaggtggcgctcggccgggaggaacgcacggagggaggaggcggtcacccatgaatcatcaagaaacagcgacagtcgccggaagatcgacgtagcgaacaccagcgccgccgctcgccgcactgctgacctctctagcccgcgcggcgcgagcggcggttctccgacgagcggcggcggcggtcggaacaagtcgacagacaccgacgcgaagcgcagcctatggcagggagcagcggcacggcacctgatggcggcggcgcgccgggacgcaacccccaccacccgccggagcggtggcctctcgtcggtggcgtcaagaagccgcctggggatcacgcccgccgcctcctccggtgacatctcggccacgcccactggacgacggtccacgccggcgaaaggcaggcccgccgccgacgcggccgcggccgcatcctccccgcgggtggccgcgggggacgcgttcccgagctcgcggtacgacgccatgctgctccgggaggaccccaggaacctgacatggctgcacggatgcgacgacggcgaggagatcgacggtggagatctggtcgaggcctcgctggagtcgttcgacgtgccggccgggttgagcagcacggggctgcacggcggcaagactttgaattttggcgccaatttgtaaaggcagccacgtgatttaggaggacactacgtatttccgtatgtatgtactgcaaactatttgtacatggacttctttttctcccatttgaggagcacgaattatttctgcgttgtgggatgcatcaaggattcttttacgctgattgaggctgattttttccgatagcacgtttttcaaaccgttaaacgacgtgcttttaaaaccttttatataaaagttctttaaataattttaaaaaacttattattttatcaagtgtaccataattaatacttcctccgtactcgtaaaggaagtcgtttaggacagtgatacagtcttcaaaacacaactttgacttcttgtttttataaaaatatttattaaaaaatgatataggtatacttttatgaaaatatttttcaagaaaaatctattcatataatttttatattttcaaactcaacaacttgagagttattcacaatttatattcccaaggtttgacttaaacattgtcctaaacgacttcctttacgagtatggagtattcaactaatcgtacactaatggcttatctcattttacgtgtaatgaacttatcaccttcaattgcccaaacagacgtactccctccatactcgtaaaaaagttgtttaggataatgtttaagtcaaaccggacaatgtttaagtcaaaccttggaaatataaattataaataactctcaagttattgagtttgaaaaggtaaaaattatatgaatagatttgtcttgaaaaatactttcataaaaatatacatatatcacttttaaataaatatttttatagaaacaagaagttaaagttgtgttttggagaccgtgtcgttgttctaaacgatttcctttacaagtacggagggagtagctgagaataggtgaccacgctggagcttgtcccaatttagatatactccatgtctctatctcaaaattgaagtatttctagcttgtttcataaaaaaatatggtcaaattctaaattagttagattccctcgtaagcatcatattgactgaaaatatggctgtgtttagttacttggccaaaattttttaaagtatacggacatacgatttgaagtattaaatatagtctaatgataaaacgaattacagatttcgtcagtaaattgcgagacaaatttattaagcctaattaatccgtcattagcaatgtttgctgtagcatcacattgtcaaatcatggcgtaattagactcaaaagattcgtctgaaaatttacatgtaaattgtgcaattgattttgagtttcgctaaaatactgtcgccacattttttgcttgtttacagtcgatacaatgatgcaagacgttagcaactataaaaatatggtgacaaatttttaggtaaaaatacgtcaaataaaatttacacagtagttataccccacttatacaccacttacatatgtaaattagtatgtaattttgggacttacatatgtaattttaggacttacatatgtaattttgggacttacattgaaaatacactaaaaatacatatgtaatttagggacttacaatgtaaatacatgccgactattttttggtaaaaaatatggcgccataaatatagctactcctatgattttttgggtccacatttaatgctctatacatatatccaaacattcgatgggatggttttgaaaaaaaaataaatctaaacacggcctatatggatttttgtgcattgaaatctatcaagtagactcatcggagacgagacggtgtctctctctacgtagataggacctcgcgtaaacagttcggatagtttcaaaccgattttgataatctttggaaatgaccatgtcagttcagatgataactcaattcggaaatgaattattttttttattcggatgatacctcaatttgaaaatctttatctattataaaaattgaagatgattccgtactcgaagagctcttcgtctgttgtccccgtaatccggatcgattccgtatttccgttatttacagcgacgattgatcttttcttacgtgctacatatactccatctcaaaattgaagtatttctagtttgttcaattaataatttattaatagaattcattttattctttatttggaattttaattaatttcgtgttgtgtttttatggtctcttctttcaatattcctatgtttcatttatattttcagatatttctaaattatatttctacttaataatataatagagcttatttttttatttagaatttttattaatcttgtattatgttgcagatggtcccttcttttaatgtttctttctcttcttcttccgaatttcagttattttaaaattgtatttgtacttgaactctcatttttctttttataattttggaaattgttttatttttattttaaattttaattagtttctttcaatatttttgaaatactagttatatctaaattgtatttctagttatcgaaattgttattatgtatttctattatttataaattatatttctacatgctctttagtttctatttctataatttcagaatttatttttttattctaattttaattaaatctagtggtgtgttgtgaatggtctcttctttcattttttttatcttttattccgaattttacttatttcttaatagtattcctacttgaaccttttttttctaatttcataatttattataaattttaattaatctcgtggtatgttgtggatgaacttttatgttaatatttcttcatttttattctgaattttagttattctcaattgtatttttatgtgaactctatttttttaaactaatgtggggtattttaatctttgtagcgaatgtggtgctttattttaatattatcttaataatataatagattggagtatccgtacgtaaaggtactataatatactccttccgtcctaaaatataataacttttagctctcaagatatgtcccaaaatataacaacttattcaccaacattttcttctcaaccaatcccagcccttcaccattcacttttctcacatacatccattactcatccaatcaccctttaccattcacttctacttgctttcttaataaccgtgtccaactctaaaacttcttttatcttgggacggatgaagtattttcaagggcgtgatccaagaggtagtgatctacagtatttatatgtatgtagacacggttgctaaaattagaaggcaatttaatattttttgttgatataaataaaggactagcaatatctctttattgagtcttaatcggttttcatgttctgataaatgctcgtgagatatatatcgttccagttcattttagctcgtgtattcctttcatgtccagagtattcctttccgtttcgataataatagagaaaattatgaaaataaatgtgattaagccagttttcgtccttattcgaattgtttgacactttgactctatgataaattgataatactatcttgtattttgctcggatatggatatatacattctagttgtgtaaatatctggatatggatacattttaattgtgtaaatatctggcaactattgaccggctaaggccttgttcggttacgccctgatttaatccggaccgggaataacaagtacagtaagaaatttatgtagatacaatgtgtcggtgatatgggtccgggagtatcatgtttagagggataaggccgcccccaaacccacgtggcgtcccctgaggagggcggcgctccgatggagcggcggccgccaaatccaagcttagggtatcgagtttggaggaaggaggctgcccccagacccacgtggcacttccccgagggggtggcgcccggggtggagtggcggctgccccctcctcgctcgggggttgggcccgtcccgatcaagactagagggaggaggctgccccaggcaccacgtggccctccccccaggagggatcgggcccgaggtagggtggtggccgccccctcctgcgactaggggtcgggctcctccgaccccctctctaggtcaccacgtgcggtggattaggcagccgcctccaggcgcccacctacccgcatttatggcgtcctgagcggtggcgccacgccgcatttaatgtgatgtgcagtgcactcaaccgatctatgatcggtccgtgaccagtcgaatgaccgataggacagtggctgtgtacccccaccctgtcagtatgctaggcggcgtgcggcgtgctctgccccgtcacatcataatgagaggctttttagtctctcatcatagccggagtcagtttatccgctctagtcaaacaggagcccagaagtcttcgtcccttaaatggcgactgataggggcacccccatgtcaggcggcaagatttgatgggccccatcatcaagatgacgtgcgctgagacaagatatgcatttaatgcaaagattgtaatacttctccactaagttaggttgttgggcctatgtggtaaccccttaaggtataaaaggagttccatgcctacttgcggaaggggacgagccattttaatctctagagcagcttctgccgctcatgaggaatatctttggctccaacaaggagatcttgcaatttctcccacaatcaacatagcacaggagtagggtattacgcttctcagcgacccgagcctgtataaaccccttttgtctaatcgtcttggaggggctaaccccctcaagatcgcacagtttcgctcaccaagtcctcgaatctcacccgctgcccccagccgaaccaaaaaacaaaagggggtctcacggttccctggtggaggagttcaccttccgacatctggtgcgccaggtagggggcgtgttcgtgatttttgaggtactttcgagcgccggcgtgatgatcgtcgcgccgccaatgcgggggaaggcgtagcctcctcaggagaaccgcgccaccccaggcagggggctaggcccctacatcctcactggaaaaggataacggacagacctttgtggcgagtcttcggaatgtccgatggcccccaaagttcgggcccaacctcaccgagaagtacgacggtggcgtcaacccctccgagtccctccagatttgcacgacaatcatagaggcgccgggggggtggggtggggtgaagactaggtcatagcgagcttcttccccatggccctcaggggccaagcgtggggttggctcatgaacctgctgcccgcctcggtccactcctgagaggactcttgcaggtaggtatcaagcgtttgaaaacctgccgaaaccacatggtgcacaaggtcacctggcgccaaccacaagtcgcacgctcgctaagatgggaagtcaggcttacaccgtgctccgacatgactgtgtaatttacaagtcccctcctccagcggagaggtcccttcttagttgctggcgttctgtgctcggatcttgtaggctggttgccaaagaggagaccctgtcaccaccacaatccatgcataaaggcatctgtctttcaagcattgatcatccttttaagtttcaagtatttttcaaattttcaattcatcagcttgaaatcttatatttaatttccccctttctattctcatggccctgcgacgctcgcgtattgcgcatttgttgctccctcggtggtaagagcccaacctctctcccatctacatgaatgattcttcgctaagtgtgggggctaagttttctagccttatcatagccttaagttgagccccgagtgccgtcgaagctcgggatcccttctgctggctcttccgtagcggctggctttggtcccgctggcttgctacggtgcccagcccggctcaactgtggacggggattgctggccttagagttttttggctctcacactcgtgcgaaagtaatcgtccatgtagaaggaaaagagattggaaggaggccaccgaaaggagagagcgaacaaaatgtgtagtgtggggcgcaggctcgtgggaacttgacctcgtttactaagtggtcgcaggcttcccgaaagggttcggagcctagggtggggagccctcttcgagccaaacgtttgaaaagtcgcgacatgcaaacaaggataaacaaaggtaacaaaggaggtattgcaatacccgaaccaaagccggcctctctgggaaagctcagcgttggccgggggatctttttgagcatagcatttgtaatacttcctttaagtttatatctactttgttcatgcttatcagcaaagttattatggcttatatttatctctcacctatctcttcctcgcggtcccgcggtacccacgtgtcgcgcgctcgtttaccctccttggtaacaaaaagtttgtatttgcttcatccattcaaaagattctttgctaaaagcgtgggggctacgattcctagctttatcctagccctgcatcgagctctagtcaccgtggacgcccggggccccctgtgctggctcttccgtagcagctggctttggccccgccggctgccaacggcgcccagcttggcttgat

SEQ ID NO: 5588 - DNA, 67322 bp, Oryza sativa
atcttaaaaataactctctgatgcctatagattacttattcctgtcagtcctaataagagaactaaagcttttgcaacggataaaaatgttatgctgaacaaataacagtaatgatttcttaaattgatagagagttagatttcacgtttgactgccgcacattatattataaaatgacatctattggagaacatcatctagagtcaaatacaatagttttcaaatcatacaggtaaacatgacttattagaaaatttaatgctgtggcaataaaactctaaagctaaataggaaaccaattgcatctaagatttgtcaggcaaagtcagagactcgaatttcaactgttggcatgccacttgaggtggtatgaactcctaatgcggaaaaaggcatgcctaatggctttaccagagacctggtaaggtaatttccatttagattggaaaaaaaataaaaaatcgttttcttaaatcttaatctagttcaaccacccaaagagtacagtcgtattttatctcaagcttgtgggcacatacgacattgttcatgagttggtgcaagttatgtttttggaggttggtcatcagcatagcaaatgttctggttttgtactgctgcatgtccaaattttgctatgatctgtttattttcatttttccaaattgtgatatgactagtacaaagttagcacaatttattcccttccaagtctatgttgagatagaataaaactgggtagcaagatgagagttaagggataagaaagaagacaatgatatgtgatggtgggaccattgcccactggacagtcctgagccaacaaggatcctagtcggtggcacatagtaccaaaagaagggctgtttacttagagaggcttaagttaaattttcttgaagtttaagatgaaaattaaactcactcaagagttagtgaccaaaattttagttttgccaacagattatttcgataggcagagatgatctcgttgattcacatgaaaaagatttttgtaatacaacaacttctgattgttttttactaaagtgctcatataaaatgtaatagatttaccattcctttatcggatctttatctactacttaaaatgacaaattggtggtggtaattttgctatgtactccttcactttagatattccatagatggattcatgtagacttggttgatttgtttgctagaccttttgcaaaatgaatgcattatctgcacttgtggatatgtggttgctgattgatgtaacatgatttacatacacaacttagtaggcacttaggcttgagaataactatgtctgtgtttaaattgggagttacagtatatttatttgagacccactacaaaacaggaacactatgctagtcaaagttatgtgttagagatcatgttgatgttgaaataataatacttttgaacggagggagtaaaatcacataagtagcaactatcctacaaggtataaatgtttgtttcgttacactagagagatgacagaagtatagtttgcacttaattgcatatgaatgaatgatcattcacaaacctgtgacaaagcatctctccaccttcctttattgcagagacagcaagctagttcataataaacacttgcagctccaacaattcccctttgttccatgtccttaactgcttcaactgcttcatttactttcccttgttcccagtaggctcttactagaactgagcacataattaggaaaatgacatgaatctcaataccaaagaagtcaaatgaactttatctgaattgctacctttataagttattgctcttggaggtaccccacttttttgcatcttctgaaagaacttttggacaaagtcatacttcttggctttaagcatgacctaaagtaactccagtaagtatgatagaatgccatatcaaagtttagtaagaaagaacatgtctttattatgattgactgactgcgtatgcaataccacactatatacttgagattacaacccactggactacacggaggcacttaagggtatctttatgaactattaggctaaatctaccgacatttgacatgaatggaatgcacagaacaagaagacgacgatgagtgtgagctaatgcgggaaataaaggcatttagttcagagaagaggaaactttgcatcacctcttttttgcaagcttctttgacaaggaacgttggcagaaaaatggcgttacatgtagcagtacggtggatgctatgtttacggatataatcatcactggatggcatgtttgaaagagaaggaatggtacaaaaaaaatgctaagagggttaaagaggtagcgacaaactcagtctcaacactcctggctagctctttttggttttacatttcttcctagctcttctataaaataaaattaaaaactacttatattgtttatatcatggcaggagcatctcccaatatttcccaaaaagaaaaggagaatgtgatgatcagaggactacaataatatggtttcgatccccagacttctaaggcagatgcatgtaaaacaagacaggaatcataagctgatctaacctaatttccatcaggagcagacccagctaaactggacttgtgaacctcacacacgcatgctttgcaaataaatttcaccttccataaagtgttcccaaatatgtacaacacatttccaaaatacccatagaacagtaccaatcagccaaatgacaaaatggacagttaaaaagcatacctccatcgctaacccaaatgttgctcctgtaggtatcaaactattccttctcatttgctgaaacacccaaaatacccctttccactgctgtgatagaacgcatgcattaaggacctataaaaacaatggtcaaagtgaagacatgcaaaagttatacagttaaaaaaaataaaagacgtgcaaggttatgaacaagacttcttccaagagagtgcaggaaaacagaaataaaacaaaaacatcaggcgccatccttaccgagttataaatcagaacatctggctccaaggaaggatcccaatctttgcgacgcatcttcattacccttttcgaaggcttctgtctcatatactctataatcttgattagctcgtttagaaggccagctcgaccaagtgtaacagcaatactatggtatgcagccatatcagggtatatttgagcatcactctgatttaacgtaagatataatgcttataccattatgttttctcaattttaggctggaatataagagacaaatggagtaaattctaaatgggcaacaaataaattctacccgcatgatggtgaaaactcgaagtgcttcagttggcctccatgcttttccaaggattgatagtaattttgtatacacgaaccttgatatgttatattccattagtcaagcatcagtacttgagttcaatttcattagataacttgtgcttgcagcgatctgaaacctagtaaactaggatatacctgctttttcgatgcttgtagatgttctcattgtacacccactcagtaacagataaagcctgcctccaatttcctcttgcctcaagcccttccagtatttgtagcagattatcttcattatatattaggtcagcttttttcatcaatctagtaagcctccaatcacgcatacttagatcatcttcgttcagcctgacaaaaaaaacttacttatgcaatatggaacaaagacaacatttcacgcaattcaattcattgtgaacgatttaactcaataatggcattggcatttaggataatgaagagtgcaatgaagttaaatgcacataaggtgaatcctaaaccgctatctatctaaattctgccatatctcatattcttgtaaatgtgattattaaaatcataaagcaaccaccactactcgaaagcagtgaaaggccaagaacgcctgaaacagcaagagcacgaacagggagggattcttcgcttatacctcctcaccagcgactcaatcctcctctcctcatcccgaaaatccgaattccagccgacgccagcacgcccccgcctccccaccgccgcttcctcttcaccctcctctacgtcatcatcctccagtagccactcgaacttgccggccctcctcgccgcgagcatctcgcggaggccgtcgaggccctcgccttcgcctcggagggccccacgcgggggtgccgaggcgccgccgtgccacggccggcccatgagcgcgcggtactcggcgacggccgcgcggaagcgggcctcgtcgtcttcgcccaccaccgcggcgccgtcctcctccctgggcagcgcattgctggccgcctccgcggccgcggcggcggcggcggtgtccttcctggcgcggcggagggacttgagggcctccttcttgcggagcgcgtggaggattttgggggtcggggagacgcccttgcggaggaggcggcggcggagcgtctcgctcgtcggggcggggcgcggccggcggcggggactcgggatggcgctggggttgtggagttggagggagaggtggaggcgaggcagggggaaggaggggataaccatggccgcgcgaggagacgagcctctgccgaggcggcagcgggcgcttccaaagcgtcactcataaacgctggacaggaaggaagagaaatatctgaaattttaaaaaatatttaaaaatatataaacagggtaaaaagaaacttattccaaatataccgtgacctcaatagactattggctattggacaggagaggatagccattgccaagagcacatgaggcgagtcggcagtggcactttaaagtttaaagtttagagttagtgtcactaatacgtgccaaatgctcggacgggaagagaaatataggtaggaggtttatgaaaaaaaagacaaatatccttaatttgataattatagttttagccttttagtttcccagaacattttatattatttattcatgaatatgcacagaaacacatggcactacacacatactacacgttagcaaatgtgcaccttaacaaaccaccacgagaattaaggccaatggcttaccatccttactaaagtcttattaaaagatcatctgcatatgtgtaaatgtcggtattaaaatttatggtaatttggaaccataccattataattttgcaaagtttgatatatgtcatcggtatctcaatgacatgtaggacccacatgagtcaatgacatgtgtgtcaggatggcatatctcaaattttgcaaaattataatggcatggttctaattttccctaaaattttttaaactatggtgtctacaactccattgtcacactagtattgtttccccgctgcatttcatatgctcgattgtgaatctataattttatttattaaaacatacaaataattatatttaactcatctaaattcatctctttagggcagatccatgtatttacaacctaataactcaatattaataatgtattacttggcatgagtattaagttagactatacgataaaaggagatacatgagatacttggcatttttttcctgcatctgcctttttctaaggtgatggtatagttcaaggctatgttcctgaaattggagagaagtttagggaaagttggtagtttgaaaaaaaaagttgggagtttatgtgagtagaaaagttttggatgtgatgtgatgtgatggaaagttgggagtttgggggaagtttggtgtgaactaaacagggcccaattcaaaagccatagagcattcaatagagggaaaccacgtttttcaaagccttctttaatctccaattctccatcataaccttcataccatcagtgttgtgcagaattattctctcctaatctaacattggccattataaaaagggcattcacatgcttatcatgccaaagagagaagacattatatttcaaatacaggtaacaacaactacatcatcatcatgttacaagaagacattgtatccattggcatccatgagagtagattcctaagtcgatggcattgatgcccctgcttgaagagcgttggaagatggttggtggctatccatatctatccctagatttggcaaagccacataaggaaattttcataggttgattatggcgcattggcacctagttgagccgtgaaggattaattacggggtgtgtggatacatatttagctgccacaaccactcgcctctcttggctcgactctagtcataatgggcattgtcgaagggcaaaacctatcttccttattttgctatgagggaaagcacatttaccggtgtaacacacagccatagtattggtacttttctccataaatctatctcaagttcatagatctggctgatcaacaaaggcatttttcctactttagctttggtgggtctatttttttcaaacgacatatctcatcctaccaccgagtagactaactcactgcttttcttagaagatttctcaatttttttctacattcgaagctgatggtaatcaagcagtattagctatgcggacaacccctgattccctaatgaaatcattctacgagaagcttcatagatgtgttaggtgggttgtaggacagtaagggagtaagctatcaaaatgatatatgatatgttcaagttgtcttagtttttttttctttgctgttcttttctttattagttatggtaatatattaatataggtgtagaggccgaatgtaatttatcttcttgataaagtatatgtattctaaatatatacatgacatatatatatacaccttggtttgtccacctcaaccaaaataggatgtaaacaaaagtattagaagcgagtaaaacagaagatatcgtgcacgggaagtccataagaaggtcaaaagatcaatgcatatcatatggcactagtactacccaaatataatcccaagctacctcgctagatgcaggatatgagaaacaacattatgggtgtctatcttgatagggatggatatatatagaaaatgccagtttatgagtgtaactaacttaaatggagtgatattgctttaaggcttctttgaaatgcatgatttcaaaaaacacatggataaaaaaaatacagaatgttgagtatgttgaatcccattggatctataatcatatgatttctcaaaacatgtgtttacatggctcaaaggaaaatatatgatttttgagattatgtattacttagattaagattaaaagaagacagaaatggagatgttgctttggaattctcttaaaatatgggttggagctcatgtttaaagttctttagaattggggtatatgaataaattgcaaaggaattttgcaagcccaaatcccacaaaccaagcaacctccttatgatttttttttcctaagaatctaatccttcaatccaaagaaacataaatattatcataacatctttggttgtatatagaatatatgataaaatcatgaaaaccagattaaagaaaatctataaatcgtttggaggatgttatgaaaatgagattctgtggtacgaagatagtgtagcgagttatgataatttgaacgtattgtactatagggactactcgaaaacattggctacaacagcatagcctacagccatgtagcttggctatcttcaaggcaaccatccagactggctacagtagtataagtgtagcagcattgttgtacaatctaatagttgtttaagattatcatatatatatatatatatgacaatcactatttatatatatgatatctattttcagtatctacgtaagttagatctttctatgatacacgatgagccgtttgtttttgggatccttggaacttgtattgtgtgatgtccactggagtatagctgggtggggtagtaacccattcggaaaaccccactaatccagtccccaactcccaagccgcggccaagccatttttcaccgttcaccgtggattcgagttgactcgcagcgtgccgcgtccgagtccaaagccaaactgtcatccatccgcatcacctcaccggtataaaggcgcgcccctcccctcgccgccccgcgtcggatgccgccgccgcgaccgcgaccgccatggcgtaccgccggaagccgcagcctccgcagacgccgccgtccttggaccaccaccaccaccaccacaccccctccgtgggcccctcgtccccgccgcaggactccctcgccgcgcaggccatgcgcgcctccgccgcgcaccgcgacgcctcctccctctcctcggcctactcctcctcctccgcctccgcggccgccgccgccgccgcggctcgccggggccaccacgagccctccgtctccacgccttcccccgtaagcttccccgctgagactcccccccaccccttagatgtgtctgatgcgtggcccggatctggtccgctcggggcggtttgtctccccgtcctagccgcttcttgaaatccatggtggtgaatcgattagggatatcgatttagggccgcatctcttcgttttgattccagttaggttcgcgattaactaacttgtgatgcttgactacttctgtttagtggttttgccgccgcctctgctgttcttgggttgggtctccctgacatcatcggaccaaattgttgtatttcttgatttggggagcgaagattctatgtttatactgtcgcttttgttctgtgttgtagggttcttcgggttatgaatacacatccatgaagaacttgaatgaggctaagtacggattttggggggcccttgctcggaaagccaagtcttttctggacgaggatggttcaccagggcagtatgattccccggcgaggcagcagccgtcaagagatgcgccgccggttggtgtccaggtgggaactgctgtcctgacattctcttgcagttaattgaactggtagattctaatttttatttaatgcgtgtactgatcatttcttgaagagattagcagcacagtctaaacttttgacttttgctaatgatgttaacacttattctgtcatcatggtcagtacttgactacttgttcattcatgctataatctgcaccttgtaagtttgtgttgtgcttaactgccattattgtgtttaggcagtttactttcagatgttcttgtgtcaatgccaacatttttattgctattgcagtatacacgctcacaacaaccaccgtctgaaacatggaaatccgagacacctccatctcataagaggtccgaggccatagcttcctccctcaactatattggtggcacaataaaaagtgcacttgaagtaagttgctatacatcaactacttacctaatcctatttaaacgatcacgtgaaagtatatctcctttttccgttaatgttatttaagaactgttcaaataatttctattctaaaaatatcctggtagcattagcaaaccatgtgttagaagtatagcaccatggaaatacttttatctttcttcttttacctttgtctcaacttggaaaatatgaagcattttacgttgttgtctatttcatatcacaacagcactagaataatggtgatatgactggttaatttattttatgattgaggcatccttctgttatgcttttatgttatttacccatgctaacatgttttaaatcttctttccaggaaggccggacgattgtagaaaataaaacagccgacattattcatgaaacacgcaaattgaacataagaagaaaaggagctggctcaactacacaaggagaagctccacaaagatttactcaaaggaatcttccacaaaatccacttgactacgaaactcaattgaaggcatctcgcgacgtaaggtggccaatatgtgtcactagatatgttgcttagtgctacattttgcatcttggaatccacgtggtttccaaatttaatctggtggcatttttgataaacatcatttttacctgatagctgttcaagttttttttttgtgttgagcgtgatatctgtgtgattatattctttgcaaagtatttttcattaaacatagcctttcagtgcttatttcatcctgccctttattttttctctggttgacgaacagtggcatcagtttagtaatcttttgtctctcatcgccctttctgttggagtggattagtgacccatattttgcacttgcaggttgcaaatgccatggcagcaaaagcaaagctgctattacgtgagctgaagactgtgaaggccgatttagcttttgcaaaggaacgttgcgctcagcttgaagatgaaaataagattttgcgggaaagtcacgataagggtgataaccctgaagatgatgatctggttagtaatttttctttaaaacggacaagcaattatgaaaatcatcagattcttgattgctggagttatgtattaaaatgttttgggcttcttctgtgcatctaaagttttactaaataactactcttttgacttgaacacctgtagtccaactttctgaactaataataaatagctgttgagtctacaaattatagcttcacatgctcaattcaaacttatcttggaactgcctaaaaaaattatcatggattttgactcttatataatgtatgttcatcagtgtgaaatgtggccgactcatgcttatcttaccatagtttattaaaaattgcccctgaggggtctaattacattttgtattatattccgagtttttttttgtcatattagttactacctctgtcccaaaataagttcatttttcacctaccccacacataccaatacaaaagcaaaaggactagaataccctccactttaccaaatctcaatggaattgtcccccactttatctactcccaatgtatttatccctactttcacaaactccgatgcaatgatcactaaacatgaacttgttttgggacaaacaggagggggcaatgaacttattttgggatggagagataatgttgatatcttttttgtgaatggaacctgtaattttctgtgccttagagcaagtttaatagtatagcccactactaactcaaaatcatctatagccaatgtaatagtcaattcatacaatagttgcttactatactattaatacctggtcccacctgtcatacatacattacgtcttggagtccgtgctgcagctggctacagatctgtagctcgctgctcttctctctcttcttttatctctttaaaatatgtttatagctggcttatagcctgctattgtacctgctcttaccaatatgacaggagtccagggtggtacctgttaccttccgctgtggttaatcatacttttttttttaaaatttgcagatccgcctccaactagagacactattagctgagaaggcacggctcgcacatgagaattcggtgtacgctcgagagaatagattcctacgagaaattgttgagtaccaccaacttactatgcaggatgttatatatgtggatgaaggcattgaagaggtcactgaggtctaccctacacaagtattaccacctgcaccttctcgggctggttcaggccttggtcgctctgtaaccccagctactcccaagactgccagctcatcaccttcatcaacatccattgttgtaccagaaacttgtccggtcgttccagcctccccaaagtcgctttctcggacttcatctaagcaatagatcaagcccggcaccaccaaccatgctgaagattaaaaggtggttagtggtgcgatacaatccggatgccattgcaaatgtaaaaccaaagctgcgccgttgctgtgccctgtatgttagtctctgatgagttgtgtcctggaaatgtgcggacaaatgatgttcatgcctgagatgtttgtatgatccggtgtaacttacacagtatttataattttactgcatcatcgatttggtactggcaaggtgtgcatgcaattggctttgttttgcccgtgtcaatttgcactctgaaacgaacacatgttgatgcaacccttcgtgattatcttggcagtttctttggttggcgaatcgaagtggttagctttcttgtgatagaaccaattcacctgtgattaagtcttagatttgacacaggtgctcatctttacagctaattattctttgtggtgcgatagcgaggtgcccgtggtgtctccatcaattttaaggtccattgtctagtcctccgaagatgcttataagggggtacatcgttccaatcttccgaagatacttataagggggtacatcgtctcaatcttccgaagatgcttaaaagggtagtatgtgcggggagtgtgcacgtgttgtgagcgtgtgtgtttctattgtgttatataaaatagttaattcaaaatttgggtgggggttttttgaatgggggtaatggtgttgttggcttcttgccctaattttatgttgcaattgtggatttacctacttctttctttgtagggtttatgatttgccctcacgtttttaaatgaagtggatgtttaccatgttttggatggtaattaggtaggcctggaactattgaatctaccttataattcaccaacaacagtcctacattctacatacttcatacttcattgatcggtcaggattgtttcactcaaatccgacgttccagatcgtaaacttaaaacatgcacaaacttataaaatgcataaaaaaaattcattacaattcaaaatgaagcaaactcaatttctacagaatcaccatcttatactcttttgaaaagtaaaataaaatagtatacatactttacatcaaaatgcccctaaaaatattatctacaaaataattagttttagataagctaaattttggaaattcatataaaatacatttcaactcatttttgagtaaactcaagctctggagaatgaccataatatgtacttacaagttatgaaataaaaaaatatacccagagtacaataaaagcccctaaatatttatataaggaataaacaacttagggtacactttaacttgtaaaatctgtagaaaattcattcttaatccaaatggagtgaactaaatttatatagaaccagcaagaggtgaactttcccattataaaataaaatgtacaaccttctgtaacagaaacatcactaaactttaattgaagtaatagtcacttaattatgaactatgaactatgcaatttatataaaaatgcaaccaagctaaaataaaccaaaataaaacttgttagaccagagaagtgataaatccatcctccaccactaaaacttgacacacttaagttatataaggattcataggataatacatcaagtcatcaacataaaacaccctctagttcatataaggtaaagcaacaataatacaatctttaaagttatgaactaaggttagattagttaaaaagatcattttctttattcatctcaaacaaagtagaatatattctggacttaaaacgccagagccttgtacatacagaacactatgcacctacaacacgttataacttgtaaaattcataaagaattcataattactctaaaaattatgaaaccaaatgtgttaagtcttagaaaacacaccactacacctctgtgaagtcaaatctaataaaaatcaaatagcaaaaatatttcataacactactcagtaaaaactactatataccaacataacttataaaatttgtaactcccaaataaaaagggataaaatggaaattcattaacctaaattcattttagaccagaacctacccaccttgcacaagtcatgcagtttagagcattttggatttttcgcctatttcggtgtttaattgcataacgtgtaaacaagatagatattgcaataacggcgaaggaatgacttaggtgctaacattttctaggaacaaggcaagtccttcctcccctcttctttgatcacattgaaacttatgtttttggagatgaaaagtgttgtttgcaaagttgcataatatttgattaaaacgatatttgaaaacttggtaaatggtagtcatgaccttattgctgcatgatctaccttgaataattgttgttatcactgtttgtttgtaaccttaagaatggttagagtactcttcttgtgctcaaatgggtctatgcttagagaagttttatggtgtttgcattccaaaaatagtaaagatccaacgctccacaattaaaggtatcatacaaaaggtatttaagtattgctatagatacttaggcaggaagggtaaaaagataattttcttaagagataaaaaaggatataattgtcataatattagtaggaggtacattgataccgcatcagtagttcattaccatcatatgctctaattctccattgcattatttgtgataagggatgtaagatcccggtcttctgataagtgttgataaacagtcgatttgggcggagtcgcgacacaactcgatccggcttctgaacgaacacgctactgagccccgcaattgcagcaccacgtctcctctggttatcaaccatgccgaaacccggttgacctcaccgagaaggctaatccctgcatgcgtatcgaagatcacaagtaagaacaagatagattgcaaccaaattgcatatgaatgattaagcactcgaatttggggttccacataccgatctagcggtgaaaccgttcttgacagaataatctaagcaaaacccgactctaaacgatgacatctactgaataaatatgactagggacattctaggttgcgcacacccccttgggctaagcccacgacataattacaagtccaaaacccaaatcagattcagactggatgaaatacgtggcttgttttccagattcctggtagcttggtaggaattttgacgtgggaccaaaaccatatgaaagtagactccataagctttccaaaaagtactcatgggccctggaattccttctatatcagcagctaggtccgtttgaaattgatgctgtcaggaggcccgaatccgaatccaaaacgtgtagaactttatctcttgtcttctatggaccaaaagtgacgcggtaagatggaagtgggcttggagaaggtcttggtttgttctccaatcaatttctttgatcatccatgaattcgttagctcggtctcttttccttcgcccaagcaagtacctctgcaaacaaaaacacacgaaacttattgtgtagcaccgtttgttcaaatatataacatgtaaatctaatatagaacatatgcaactttggttgattagtacataaggtggtcatggttatatccgagctagttgtgtcctcatcatcctccccttcttgattggaaaccgtccttggtttcaccttgtcatagagcgtattaaacttatttttatttatcacaacatctggtgaggaacatttcttgatgaccatatggttggatcctaaaatctttgtagtcgaaaactacaacactccccttcttgcaaaccaatctataactcatttaaacaactagaggaactagatagagaattacttatacgcatgcggtcctctagaccacatttcatcatgaaaaggaagtatagtcaaatttgaacaaatatatacttgatgcacattatattgtcatttactatcataattgtcaataatatgaaaaatcacatcagaagggcatggcaattcaaatctagcaaataatttcttctctaaatagttgagtggataaagatcatcaaattgaatatgaccccaagtatttaaagaagatagcaatttaagctcttcattttcgctagcaatgtgaatacatgtttaaactcaacacatagtggttctactataaaattaacatgttcattcactagttgtggcatggatataagtgaagcatcgcacaaatcttctttatcactagaaacatcaggcaaattgttttgtgacaaaggtatttcaacaattgtttccactatgggttgctctaacgtagcataagtagtggacatagttggcacatcataactatgcataccttgagtagttgcagcaccattatcattaccttttttcttaggacatgactagatagctactggtagctggtttgtcttatccagctaccactccatcaagtataaatacaatagtgtgtgtctttttttaacatctttaataacttatatcttttaaatcacatattgttcttaaaatctatttgcaccattgtgctccactcaaaatatgcgataaaacaagacccatattgaatatatttaaacattttattaatttaaaagtaatttattatatgtagaagtaggaagtaacttttacatcttatacatgattaattctcattagttactccatcaatattatttacaatccatcaatggttttatcttcttttctcatactacatgaaaaacaaaagtgaaagggaaaaaacaatcaatgtttaaaacagatttacagatttatagaaagttacttcgaattaatatcgaagttacttttaaaagttgttaaacttacttgtgctaattaaatttaatttctatctcctacaacgaatttacttctaatgttgtgacaatgttactttctttttgttttaagttacttttataatttatctaaattagttttagactttactaaatttgcttttatatgtctaagaagtaatttagtgaaatctaatagtaatttagatatattataaaagtaatttataatttttcattaaaatataatcatgtgagatcttgttataaagatttaattgttacgaacacaacggtgtaatcggatcatagatcggatgagtagtttaagagaaaattttatttgaagcataggatgaatagtatatatttgaagcataggggagaaacttctctctctggcgtagcagagtgcgtcatgtggcttaagattcggactattctggccttcttggcaatgtcggcatgtggaacggacgactataccagcgtgcgtgggatcggacggctctagatgcgttgcgtgataagaccagatcgagaggcctttcgagatagattttacgtttttcttatctttagaaattataggcgcttggtcaattgaacattcttcaagcatgcatggagctatagataggtctttttgctcttcgtctttattctcttcctcctcatcgtcttcaacgtcggaggtgctgatgtagccatcttccgtagcaacgtatgcccgttgactagggcaaaccttctgcacatggccaaatccatggcagtggtggcactgaatcttgggcgtgcgtcccgtcgaaatgacagatgaggcactcttggtggatacctgcgaagaacctttacctaaaactgcaggtcgtgggggaggtggttttagcgctacagaaactccggacgtaactggtcgcttgctcgttggtgggggtgcccaaaaagagatgggcttggaaagcctcgaagatggcttcgcccgtggcgtgtacgtgctcgccttgttcttgatctgttgatcacgcccctgcaattccttctctgcaagcattgaaaactgaaacaactagttgacagtgttaaattccttattatctactatgtcccgaatatcgcacctcaatcccatgtaaaagtgacaaatagaatcctcggttccctctactatgctacatcgtatctatcccttttgtagctcaccatagtaatcctgtacatatttattcccttgttctaaatacatctgtttcttgtgtaaatctatatgatatgatggaggaacaaatttatcacgcatagctaccttaagttcttcccaagtagtaggcaaagcaccctctgcagctaacccagtcccccaaaggaaaaagtacgaaatacccccccgaactatagcggttgtctgaaataccccctaaagtcgaaaaccggacataattcaccctcaactatcaaaaccggttacttaacctcctaaggcagaattaggggtggttttgaccggtcttcgtacacgtggcagtacagcgtggcaaggggacgacacgttagcacggggtcactatataacagcggagcgctctctctctctctctcgcaaaatttcccctttctccccgaaaccctagaacgggcggcgattccggcgacttcggcgaggctgggtgcggcggggctaggcggcgctctaggcgggtgggggtagcgcgctccaaggcggccacggcgtcgaggccggcgagctccactgcgaccacagcggcgcattgcaaggcggctgggatgaactaggctggaagaaaccgggcatttgaggtatgtgatttagctcgatttgaagtgtggattttttggtgaagtagttggagtgtgggatggattgatatttttttgagcagttcttgctagatattagtcagatgcgttgggattgttattatagtgcagaaaggtggagtaagtgggaatatgggggaggttgatttttgtgttgggattgttaggtcctgcatgcatagggattgattttgttgattttatagtaaaggtggaagtatggtggttgttttttaactgtcaatcttagggcacagatgcattgggattgattttttagtcttaactttttttaggacaattttaccatcactgcaatggatcgtctagagtatttatctgttagatttcactttggcggtgaattcattaacaattggagggaaacattttatgttggtggatctgagggtatgtcttacattgaacgtgacaaaatatccttgcctgagttaattgggtatctgaaagatcactgcgaagtgctccctggtatgcttttgcactggctttttcctgggaaagaactggcagatgggctgagggtgttggttgatgacaaggtctgtgactatatgtcaaagtgtgttgtggatggaggagtggctgaaatatatgtagaggcagtagtgggaggggagtccaatgagtctggtagcagtgatgacagtgactttgaagatgaattggaggacatgtctcttgctgatgatgaatgggatgatttaaatgatgatgctgtgtttgaattacctactgggaagcctattctgttattcagtcaacaccagagaagacaaaaagtgatttagatagattgagagcttggagtaccccaagcccaaaggataaggggaaagctgtggtactatgtgaagagagggtgaagagtgcagacttgtctggttctgacaatgattacgttggtggggactcttgttcatcaggagaagatcaagaggttgaggaaattaggaaggcatacaaggagtttaagaagaagctaaaggatggtgaggtaggaaatttagatgatgtgatctatatggggtcttcaagacagattaatgatggagccttggttcagattcagggtgaggaagataatagcccatatgagaacagcagtgcagatggtgattcatatgaagaggatagtgatggacagttggtcagaaagaagtccaaataccccatatttaatgccaaccagccccatgttaggcttgctcttgggatgaaatttgatgggaaaaaagagtttaaggaggcagtggtccagctagccttgcagaacaaaagattcataaggttccccaaagatgaaggttacaggacaagggcaaagtgtgactgggcaacctgtccatggagttttttgctatcaaggaacagcaggacaaatagctggcaaatagcaagtcttgttgatgagcacaattgtcctccaaggaaggataacaacctggtcacatacaagagaattgctcagaaatatgagaagacgatcatagataacccaacttggagtattcagagcatgcagtcaactgtctctgagcaaatgtttgcaaatgtcagtgcatcttagtgcaagagagcaaaagcatatgtcctgaagaagatatatgagtctagaagggatgaatactccagaatttttgactatcaattggaattgttgaggagtaatcctgggagtatagttgttgtcaagcttgatactgaccagccaagcccagtgttcaaaaggatatatgtttgcctagctgcttgtaagaatgggttcctattgggatgtagaaaggttgttggtttggatggctgctttttcaaaggttcaaacaatggggagctattatgtgctgttggcagagatgccaacaactctatgtacccaattgcatgggctgtggtataaaaggaaacaaatgactcatgggattggttctgtgatttgctatgcaaggacttgggatttggtgaaggtgatggctgggtgtttatttcagaccagcagaaggtatactcttctaacatattttgttcagtgttatttactgtatttcttgatgtgttgttgttattaaatggcttctatgtggttgattgcagggaattgtaaatgcagttcagcactgggctccaagtgctgagcacagaaattgtgcaaggcatatttatgccaactggaagaagaaattcagcaagaaggagtggcagaagaagttttggaggtgtgccaaagctccaaatgtcatgctattcaacctagcaaaggcaagactggcacaagagactgttgaaggtgcaagggctatcatgaacacagatcctagccactggagcagggcttggttcaggtttggctcaaactatgattctgtagacaataatatttgtgagactttcaacaagtggatagttcaggctaggttcctacccattattagcatgttggaagctattagaaggaaggtgatggttaggatacatgagaaaataaccttgatggacaagtggctaggatcaatttgtccaaacatacataagaaacttaatgcatacatcatcgattcaggaaactgtcatgcaatctgcaatgggatggacaagtttgaagttaagcatcagaatcataggttcactgttgatcttgagaggaaaacttgttcatgcagaatttattccttcaaaaagacctacagctgttgtttggaacctgttgagggaatggaaagctggcctacatctgataggccaaggccaaaggctccaggttatgttagaatgccaggaaggccttccaagaaggaaatgagaagagagctacatgaaaagcccaaagcaacaagggtgtcaagggtagggtcagtgatgacttgcaggttgtgcaaactccttgggcacaacaaggcttcatgtcacaagaggagacagcaacagcagggcaatgtgcaggtactaacttgttcatgcagattttgcttaaatttattactagcacagcatcataactgatattttctctcaaccttacaggctcaaggatctcagccaagctctacacaggatcaggcacatgttgcagccaaggtaataatggcttgcttcctgtttgcacttgcttcagtcctatgtctaactgctaccacttgctgttgcagcatatggcaaatgcttcatcatctcgaaagaggcagctgaaagcttcaacatctgcaagggcagctggaatggttggggttgagcagccaagaaagaagttggaagttaggagatctcctcggctaaacagaggatgaataggatattaggttcataaaacgtttggacatgcttactggattagcaataggcagaagatcaccaccttttgtagagtaacatgtggtatgaaacttctgtaatgtgatagctgtggcatctaataggccatcttttgtgtaataactgaaggaattacagtgctctaaagtttgaagcaacctgtgacatttactgccaccactcttgtttacttgctgatgtaatcagatacaatgggttccagatgtggcaatatatgtcattatttatcatcacttttgctgtttccattatctccaactgccataacatgccttgattcccagtcacccaatatggctggtccatttgccagcacaggtcatcaaatcacctgatttttaactgtcatctcaaacaaaaccacaattttgcattcattccaatttgcaattacaaattctagtagaacagctgacaacacaacaattccattcattccagtacccattacagattataatagaacacctgacattttcttaactccacactgaccacatgaaccctaactttcatcacaacctacaattttagatacatagttccaaccaagagaacaacaacagctactaaaacatacaccaacatcatgatacatgtctgttgtttgttaatcctatcaactaaaacacaatttgcagcttccatcttctctacagcagctctcagaccctgaacctcattgctttctttcttgggggtagactgcaagttgtgctgggctactgtcctgtcccgaagtgcagcctccaggccattcacttgctcacgtgcagaccacacagcattcctcaaatcaagcaacagctgcttcatatatggttctgccttatcatcacaccactcccaaaatccgcagcccccagacttcacaaaaaaaggggaagtgaaagagtcaatcccttgaaaacaaatctaaaatgcaaaatcaatttaaaaggcacaaaatttaactcacacgcgcattgtagcatgtaaaatatctcctcccggggttatggggactccaagaaatccaccgagctgccttcactttacaatcacagaacacgggaggctcataatcaagaggcccctccctgtatggcaccggcggctgacgccttcctcgctcaccacctccagcccaagaagacgatggcgagccacgcgatgtacctgagctcggcatgccgtggtcgcagtggagctcgccggcctggacgccatggctgccttggagtgcgccgcccccgcctgcctagagtgccgcccagccccgccgcacccagcctcgccggagtcgccggaatcgccgcccgttttagggtttcggggagaaaggggaaattttgcgagagagagggagagagagagagagcgctccgttgttatatagtgaccccgtgctgacgggctgtccccttgccacgctgtactgccacgtgtatgaagaccggtcaaaaccgcccctaattctgccttagggggttaagtaaccggttttgatagttgagggtgaattatgtccggtttcgactttaggggggtatttcagacgaccgctatagttcggggggggtatttcgtactttttcctccaccaaatgatagcaaaatctttgaactccctactggcttgtcgaactctatattgctcaggcacaaggtgggcactaaacttctgctctattgccatctcccaatcaagatatttctcagcatcataataaccagaaaaagatggcattttaaacttaaccttagcataaggatcatcgggcacactattattgttaccttgttggtgttgctgattttgagcaccacccattcttgtcattgcaaacataaaaacagcaacaaacagtgacggttatccctaataatctgctacgctgtgtagtggtgcctctcaacagttcagccaaatggagcaccttaccaagctcttacaagtgtcttactagcaatgctaaggacaccttaccaagctcttacaattgtcttactagcaatgctaaggacagtacaaccggtggctggtttgtgacaccttgaaggacgtgatgtggcgattgcaaggatcaaagtggtgctgaccagaagtatatatgtggagcttgggaggcacaatatatagtagcaagaaacgcagttgtgctaatcagaaaatgcaaagttgaataatagttcaaagtactagtcaatgtgctggcctagcctagactcaactctagctcaagcaagcacccgacaacactaaggactagatatgaatcaatgcataactctgcactctgaaaacatactcaaaggatgaatgattttttttctttcttggtgcggctttttttaagcacctttctgcctttttttttctttttttaggtgaggctttttctttctttttctttgcacctttctgccttttctttttttctttatttttttactattttttggcaacaagatctagccactggcctcgaacagggactcaaatgtaaaatatagatattacagggactgaaacgcaaagtgcaaaattaaaattagatcacctttaaaatggaatgctcacattatataggttccgttttataaaaatatctcaagtccgctgaagatttttccttaaccagtgtaccaaatagaatgatctagaaggagagaagtcggatggatgggtgttcggcctgaacccaccatggtggattcggccacggcagactagaggagggagcccaactatgatggagaaaaacgataccaatctactaacagaaaccaatctatctcctcctgttcttcctcacgtgaacaagacacacacggtacggtacatgaaaccctaccccttcatgcaatcatgcaacttcacaaccgaccaacgaaaacttatgaaaactataaaaacggaaaccctgtgatgagtagattcgatttttcaagctcccggcaacaactgacgagatgcaaaactggaccccaaactgacgtagaactcacatacttgagtgatgaaccctagacctaagtgatgaacatatgcaatactcaaaacaaaaaattaaatctaaaactaaaccaacactcgacacgacgatgcaatctaaaattcaacatagcaaaatctaatagaacaatgcaacggctcaaattgtctaggtaaagaacaaatatttttgtgtggcaattttctggttatgggaagataatttacctaacgggcaaccacgctctgataccaactgatgagggatgtaaggtcccgatcttccgataggtattgataaacagtcgattcgggcggagtcgcgacaatactcgatctggcttctgaacgaacacgttactgagccccgcaatcgcagcaccacgtctcctttggttatcaaccatgccgaaacccggttgacctcgccaggaagactaatccctgcatgcgaatcgaagaacacaagcaagaataagatagattgcaaccaaattgcatatgaatgattaagcactcgaatttggggttccacgtaccgatctagcagtgaaactgttcttgacagaataatctaagcaaaacctgactctaaacgatgacagctactgaataaatatgactagggacatcctaggattgcgcacacccccttgggctaagcccacgacacaattacaaggccaaaatccaaatcagattcggactggatgagatacgtggcttgttttccagattcctggcagctcggtaggaattttgacgtgagaccaagaccatctaaaagtagactccataatctttctaacaagtactcatgggccctggaattctttctagatcagcagctaggtccgtttgaagttgatgttgtcaggaggcccgaatctgaatccaaaacgtgtagaactttatctcttgtcttctatggaccaaaagtgacgtggtaagatggaagtggacttggagaaggttggtctaaaatcaacttctttgatcatccatgaatttgttacgctcgatctcttttgcttcacccaagcaagtacctctgcaaacaaaaacacatgaaactcattgtgtagcaacgttgttcaaatatataacatgtaaatctaatgtagaacatatgtacctttggttgattaatacataaggttgtcatggttatatccgagctagttgtgtcctcatcaatttgcgtgctttttttgtgatttacatattgtttctaagaacatggtcgattaaaatatcagcaaattattgtgtggtttcatgaactttgcagttagttaaggtatccaatcggagatatttacgaactaagtaaataaacaatcaaccatgtaaaaaggtagtgagatcttatccatgcgtttgagcctataggcgtcaaatagatcttttgcctccaattcaatcactcgaccatggcggcttttctccctttatctctttctaatgcaatagtttaaaccctagaataattgaatgaggagaaaaaagtggatcttgatatttttccctaacgaggagaaaaaagcggatcttgatatttttccatagcgatgatcatattatcgtatagatgggaaatgtaccgattcaactaagaaaggtattcacataaaacaaaattgcctctaatttattagttaattactccaatgccatcggttacactaattttattccgtaccttgcccctttcttaatcaacggttcatattgctccacctcttactacctctacgtacctcgcaaaaaccgtaaaacatctcataagcttataagtatgcccattgcttagccattgaagcatctaggcccccgttgttagttttggtaattaatgaaagcgctaattgtggactaaccattcctctttgagttatatattttgtgttagtgccacgtgatatgtgagcatggaggattaccgaaggactaaaatttgatggcgcaaagcaaaggatagatgatggtaaactagtggttgaattctaaattgatcaaggtgttgggcaatcaaaattgtgctagtttaattatagctttgccatactattaatggggggtaatgacctagcaaagagatgattaaattgccaccctaggtcatttgcatttagacttgtgctctttttaataactcaaatcttgctatctttgggctgtctgaccagggccggtctgactgtgggctgttggccagtccgaccggtgggtagcggccggtctgaccgccggctatatgccggtctgaccagcccccctggtggctgggatggtgtgctctaggatcgccgatcaagagccgccagagccgaggtcggtcagaccgagctgatggcggtttgaccgagccaaggtcggtctgaccggccaccccatggcggtctgactggccgggccaatggggcccaaacggctagaaaactagttgttgtagagtagcatggtctgaccggccacacacctccggtcagaccggcagtacactgagttgggtgatttcgcccccaacggctggttttggtgggtgggagtataaatactcccccaccagcagcaaggggactctcttggcactcacttcaattgcatacaccccttgcacctctcccacacttatttgagcttagtgttcatccattgtagtggttgagggttgatttagccaagagtcaagtgcattgcttcattgtagagctagtgtagcacttgatcatctctgagccacgtcattgcttgttactcttggaggttgccgcctcctagatggcttgtggaggagttgcccggtgaccactcggagaagattgtggtggaggcccggcaccggttgtgagtgggttggagttcaccacctttggagtgaaggaagaacttccccgagtgatcgaggcttgggtagtcctctccgtgggccggctcccgccttgcccaccccttgacgaagggggcgtgtggtggcttcgtggttgagcggtggagttgggctcgcctcaacggggattaggaaaccagcgagtttctgaacctcagtgaaaaattccttgtctattgtctcatttactttgtgcatttacatttgtccaatttacatttcataaagacatacttgagccactttgaccctaggattgcaaaacataacttagttgcttagttagtcttgtccctcaccgagcctagcaacttaggttagttttgattacgtgacattatcgacatcttgatcctgcagccatgcttagaattaagcaaaatctcaattaaactctttacatgatgaagttgggaatttaatcattgctggacagatttggaaatgctacttatttgtgaactaaaggtgttagaatgtggttttagacttgggcggcaagtggtatgcatatgatgttagttgcataccgatagggggagtgtttgcccaagagcgtaaggaccgaacttgtgtcaccaacttaaagttattcgtacatccacatgtgctttttatggggagccttagttgattaagttacttagcatctaaccttgcatatggggccgtagtagaatgaattagtctgagcgatgattcataggaacttcctatttaccgcgaggtataggtgactaagtctgtctaattcaatggtatagtgccacgtggtggggatcgtttgttgtttgccatcctggccttaagtttaaggcatgggcccgccacttaatagttctaggtcatatgcctaggatggagtcacttatcgtcgctgatgcaaggctaggtattaagtaatgtaaaggcttcgttatgacatctagaccacattcaacgtgtagaatgtggtggacaggtggagtcttgcaaactcaaaacaaactagagtgttcatatcatgtgggtaaagctgtacaaactctgtagagttctaaaaactaatcgattagtcgtgctcacggtcatgagcgctttggtgaggtcacatgagtatagacttgtgttttaaattgtgtttgtgaaacttgggattgaaatggatgatttgtgttgagttgtgtgagtatgattatgattatatgacttgttgccaaggaagacaacaagggtatgtttatgatgatatgatgttatttatgatgaatttacaaatttgttttgttaattgaatcaactcctttgcaaaagtattgtgaaccaaaacttgctttatgctgaaatttaactacatgttgccatcctttgaatatgtcttacatgtagtatgataggattgatttttggcttgacagtacattatttttaataatgtaccgactcttattattctggaatccatttttgttggttgtacgtttagattaatttgagtgatgagggtttcgcgtgcttcttctaggacttgaacttaatgggttaacccccctagtcggagtgcttgtgtttgggtagtcaagcttccgctgttctctgataaatctatatttggccggtcggcccatgtaactataaggtagttgtaatttgagatcactttcgtcttaaatgtatttgctatgtatatctatgcttaagatgaaagtgtgaatctggtgcacatcctgggaactagattcacatgaatacaagttaagtatatttgagatgtcgtatatcttaaaccatttttgtcaagtctcctgaatgtgtaacacatcttatcaccaccttcgtggggtttaacgggtacatctcaggctgaagttgactggcaggctaaagggccagcaatgtctccaatatccttctctcgaggcatcggatatttcattatgtttgtttgatgacttgaattattcacttcatccctcaaatataatgagaggttcggactgcctccgtcaagctgtgtgcatgataaaataatgaaaatagttgtgtgtggtcctgtgtggacgaaatattctttttggttggttggttggttggttaaaactatagtgatgttggttggttggttaaaactaagtgatggcaaatgttgtttaaattcaatttatatcaatttattgtatttaaatctgcgaatgcatttatgcaaattaaccctaaccttcctttgaagccttatatcatatattgtatattcccgtacaattgtgagtactttatgtgctcactctcgttgtctcaccaaaatttcagagaatgcctgctgtttccagaagtttctgttgtggaggaagttgaatagtttgcgtgccctagtcaactgcccgtggtgtgttgttgatgctctgcgcttctttttcggttgtttatctctgtgcttcatactctcatcactagacgcgttcgggatctcatcaaatagttctgaagcgtagatcagcatgtttgagaaaaccttatccaaaatttaaaaacttttaagtcaatgtttgaaattacgtatgcggatgcgtgtgagacttgctactcgtttctctctcgcgcacgtgcatattaggaagccccatgagtatatgatggaacccgtgataatttctcggtcgagattgatatgaacatatcgatctacgaagtcatgacaatcacatccagcagtcgtgtgatcagaacctttcaaaactcaaacacatgcatgcggaatgttcaacttcatcgcacgaattcttatttgggacaacaagagacgttgccggcggcttaattaattaattgatcgttccaaattaatataaactggccacaagaccaaagactaattattcggacaatcagttcttttccatctacaccaccccgttggagactttgaaatggacaagggattgatcagacactggaagttcctttttgtgaatactgaataactacatatgcatttgcagcatgcatgcatcgcctaattacttgattaagaagtcagcaaatgagatcatgattaggtcagtattatccccgatttcttaattttggatgttttgaacaagattaaaatcaaactactatcgatgactttaaaaatatttagcttaaaatatattaaaacaacatttatagatttatcttataaaatactataataaaaataaaaaaaatatttatttattgtatatactataatagaaaacttagtccatgttattatctaaaagttaagaataatagaactcgagggagtagctcgtacgttccgaccatgtaatgatcatctcaccaatccagttagatatagccttgctgtgttctggagggcaagttcccaaccttgtctcccgacacgaaaaacaaatcacgtgattatagtgagattaattaaatattagcctaaaaaacttgaaaaataaattaatatgattttttaaagtaactttcatatagaaatttttttaaaaaatataccgtttagcagtttaaaaagtgtgcgcgcggaaaacgaggaaagtgagttggaaagaggggaaaataacacagcctaaaaataccacttgagaccacttgataaataaattcattgatgcatgctgcaagtctacgatatgagacaacttgccatattattcaagattagagaaatttaacttacagaatgaacaaataccttctgaaacggagaaagtacgcgtcaacttctttgttcaaagtgtatagaattgattgagcgagagggattgagcgagagagaattatacacaagaatgtagagaatgaatgagcggatcctttattgataacagtgttacaatatataggggggagagaggcggcaaccagaagacacgatggtttgggaaccatcgtgtccgttgctagaatcgccgtgaggcgataagaggtgtggggcacgaccaaccgtcgtgtcccagaattggttgctgctctatccatatagatggatgagatcacccaaatatttcataacactcccccttgatcgaatccagcttttatcattgctcatttagggtttgtcacgcccggaatttctatccaaaatttcaaatgcttacatgtgcgttaaatcctcgtccaggaatcaatcgaggtacacaataacaaattgacaatagagtactattaaacagctaattaatattcgcaaaataataaattattacagagatggatagttcctctcaaagaataaaattctacacagcggaaaaaaaacaaaaacgaaacagctatggcgactccactccacaagcaacttgacccgaacaaagcctaatcctccagatcatcaccttcactgaaatactcctcctctgatgaatgaatattgcaagaatgagcatatgacatactcaacaagccatacaacaaatatgcaagtgcaaaggataacaaaggatggcatagtaaagctcatttgcataaacagaatttagtaaacattttaaagaataataaatcaattgaataattaatcagtattaaataaacaccatacaacacacctatcttgcataggcccaacctcatttgaacaaccaaccccggttgtacaaatcaaacctccataccaggaatataccattccaaaccaggagtcatattaattatcacaatattatcattaataaatagtgtgagactaatcacgaaaaacattgtcaaactcacccataaccgcgggcacggctattcgaatagttttactctggccagagatgtaccactgtacccacaagacatagttccacaacatgtcaccatgcgcctcagtaccaccacgataccttggaaaagaactatgacaatacctctcacacaacacaactcaccacagtgcaccgttcctggatcataatctccccctctaaactagaggcaaatagactccccagcgacccccacggacttctcgccgctttacagtctagcaccccataatgaatcatgctatacaaaaggtaaagccgttgcccatactggcttgtggttggcacggttaatgtttcacaacagtagctcccgaaccggtccttaattatcacgagcgccaccatcaaaaccatatactcacaacccacctttaatcaggttttaattatcaattaattatcataacacgattagccatcgtgagctaccattgaatataaccataattaataatgtagtatgattcatccctttaatgagctaatgtttttaagcatggctaagcaattatacatatagcatttagctgaaccaaaccaatatataaggttctagctaatcgaattataacccataggaaaataaagtcatcttcggccattaattaattaggaaaagcttaccacccgatgacattcgaaaataatgcataagttgaaataaaacattagctttaaacgggttcaacatgctcaaagggttgtttgggatctgtgtgacttgccttgagcttccgcaaacgcttccgaaccttcctcaacgaaaacgctctcctccggaacgtcggaaactaaagcaaaagaaaaaaaatcaacaaaacagtacaaaaacaagcataaacattacatgtggatatttttaacatgtagatctcgattttggatgaatttagcaacttgaaccactcgaatcggagtggcgaatgccgaggtactcctcctccgtgcgcacccgacggcggtcacggacggcaacggcgacggcgctagcggcggcgcgacgcgaccggagtgtcgccggcgacggtggcgactagggcaacgtggcggcggcgctatgggcgacggctcggcttgggacttgaagcaaacggaagaggacgactaggggatgctatttattggcttggattagagagatcggactccaaccgagaggaatcgagccgggaaaaactagggttaggtagagagataaactcgaaaacgagtttgatttggcttatccaggcaaaattgatctccgaaaccttaggggaaaggaagaggataaggaggagatgatttcccctcaagcaatcgggactcgggggcgaccggttgaggtggaatcggaggagaggcggcggcgctcgggctcggctcggcccggccagaggtaggggacgatcccgacatgtgggccccacatgtcggcggctaggggagaggaggggcggcggctcggcttgggccgcacggccgcgcgtgaggtgggagagatgtttggccgaaaacggcccaacggcttaggaaaggattttaaaaacttttccaattaaaataattcgtgaaatgatgtttcatttattaaaaatactttccttgctcaaataattcctagaaaaaatctagaaaatggataaacaagaaaagtatttaatgaaattttatctagctcaattttatgttaaaatttttcctagattattagagtttaacttgtaggcttttaaaataatttctaaaaatgatttaaagatggattattaatttaggcgattttcagggcatgacaaacctaccccccttaaacggaatctcgtcctcgagattcagaagaactagcaaaaagatgaggatgagctgactttagtaagcctgtcaaccactacccaaatagaatcatgtcctgccgacgttctggataggccggtgataaagtccattcctatttcctcccatttccactctggaatcttcaacggttgcagcagaccggctggcttctgatgctccaccttgactcgctgacacacatcacatagagccacatattccgctatctctcgtcgcatgctggcccaccagaattgttgcttcaggtcttgatacatcttagtgctcccaggatgaatggaatacaatgtttcatgagcttctttcatgatagtatccttcaactccttattatcgggcacacaaattctttctcctagccacacagttccttgctcatcttctatataaccgatggcttttcctcttctcatgttctttttgatttcttggatatcaggatcattcacttgagcctctctgacttgatcgaaaagagtaggttgagcttctaaagcggccacaaaacctttgttgactattcccaagttcaacttttcaaattcctggcataacttccaaggtagatgtcgtccttctaacatattacaatagcttttcctgctgagagcatctgctacaacttttgctttacctggatgataatgaattttcatatcataatccttgatcaactctaaccatcttcgttgatgcatgttcaaatcaagttgagtgaaaatgtacttcaaacttttatgatccgtatacatctccgtacggttaccaaaaaggtaatgacgccaaatcttcaatacatgaaccacagctgccaactctaggacatgcgttgggtagttattctcatgagggcgtaactgcctagatgcataggcaaccaccttcccatcttgcatcaaaacacaacccaaaccaagtctagatgcatcacaatacacctggaaacctttccttggatcaggcaagacgaatacaggcgcagtcactagccttttcttcagttcttgaaaactctgctcacattcttccgtccacttatacttcacatccttctgaagcagtcgagtcattggtctagcaatcttggagaagttctcaataaacctgcggtagtaccccgcaagaccaaggaaactacgaatctctaaaatcgtcttgggttgcttccaatttagcactgactccacattgcttgggtccacggccactcctccagctgagatgacatgaccaaggaacttcacttcgggcaaccaaaattcacatttactaaacttcgcatagagctggtgctcacgtagtttctctaaagcaagacgaagatgctcttcatgctcttcttttgtcttggagtaaataaggatgtcatcaataaacaccacgacaaacttatccagatattccataaacactttgttcatcaagttcatgaaaaaggccggggaattagtgagtccaaacgacataacagtgcattcgaacaaaccataccgtgttgtaaaggcggtctttggtatatcctcctcacggattcgaagttggtgatatccggaacggagatctatcttggagaaaactgtagcaccttccagttgatcaaacaagtcatcaatcctaggtagaggatacttattcttgatagtgacctcattcaacgcatgataatccacacacattctttgagtatgatctttattttccacgaagatgactggtgctccccacggcgaagtactgggtctggtatatcctttctgaagcaaatcatccacctggctctttacctctgctaacttattagctgccattctgtatggtctcttatggatagggttggttccaggtactaagtctatccggaactctatgtctctcttaggtggcatacctggcaaatcctcggggaacacatctggatagtctcgtactattgggatctcttgcaaagcaacttgatttaatgtcaaaccatgaggtttaggggatgacacaaagaaagacactgtttgcccattgctacttgttaaagtcaccttacggttagcacaatctataactcctctgtgacgggttaaccaatccatccctaagataacatcaagatctttggattctagcgagataagtgaggataggaaaggaatttcttctatttctatagtaacggaagtacagtactgcgttgaggatacttgattgcctagggtattaactagtaaaggtctcccaagactaataacttccatcccgtgatcgctcgcaaaaattttagacaaaaaggaatgtgtagcaccggaatcaaaaagcacatatgcgggtatagagttaacaggaaacgtacccaaaaccagcttaggtgcattctgggcctctgcagctgcaacgtgattaacatgagccttcggtgctggagcattggagttgttctggaccggagcattcttcacacgtcgaggctttggacacttatcagcataatgtcatggatcaccacaattgaaacacacccctggcttgcttccctgttccttcctgataggttgattctgtgttggagctgctacaggtcgtgtgaacacattatgattgtcgttgctgcgattaccagtgttgttgttgtagaactggcgttgagggcgagcaactgaagaggatcctccctgtgggtatggtgcagcttgaggtcccaaaacaatgtgcggcctctggctactaccctgttgagccttgaattgagcagccctacgcttcttctgttccatcctattgtacttgtcttcttggcgaatcgccttgtccaccaactgctggaaatcccggtaatccgtagccatcaatgcataagacaactcatcattcagtccctctaaaaacttctcctgacgttcttcatcagtgtgaacatcttctgggcataacgatctaagcgattaaagtcatggaggtactctgtgacagaacgggatccctgattgagtgctctgaactctctcttcttaagggccacaacacctgatggtatatgcgtcttcttgaaagcagcagtaaactcccaccaagtgataggctctcccgcagctctgttttgacgaaagtgatcccaccactcagcagcaggaccatgcaactgatgcgaagcaaaagaaaccttctcctgctcagtgcactgaatcaaatctaacttcttttcaacagcatgcagccaatcacctgcctctactgggttagtggtgcttgagaaggtaggtggtctcacacgtagaaaatctgccaacttgttctgtggaggtggtggttgattgttgttatttgcctgctggttctacgcttgctgcactagtaaattaatcaactgggtttgctgagccaaaacttgggcaagtgtgggacctccttcattgtgaccacttccacttccacttccacttccagtgcgggtgttcaccatctgaagaaaagcacgggcaagaggaaagaacgacagagagatacccttagaacggagaactttaattaatttaaattgtatattgctcttaactgtatatgattacatttgaattgagttaacactatctcaccaactaacttactctctgacaagcaaaagaactaaactcatgtagttacatcccaccaatgatgtaagcaacacgctaaacccacacacacacaagcaaacttaagcaagcaaactaacacagcgaactacggcaacggtccaactaggcaactaatcccgccttgcgttggaacgaagagacggatcttcttcctctggagtagctagctctctttcttctaagtcttcctcttcttcctcatcacttaagacatggatgacaggttcagcacaatcaggcacagcgtctcccaccacacgagtctttgaagctaactggagacgaggtggtggacgggttctcttccttgcggtgaggcgaagcttgggtgctggcggtggtgcttctcccttaagctcagctagttccttctgcaaacggtacaccttgctctccaacttgcaaatcctgccatggttctagttttccctatcatgagctgctttctcccgctccacgcctactgcatccatggcgctaagcatatacacagcatgtgtcagtgtggcgcttccttcgccttcaggacagttgtaagttccatagtcttgaccatgaggcttgtgtggatgatactggaaagctgatgactctaactcctcataaaagcaatgacgtagctctccaatggccaccaaggctgcttcctgacaagcatggctatactttcttcccccagcttcaaactttatcgacggaaggtcttcacgatcactagccaacgtcacgcgaacacgacacttctcctcgttgggatcatggggaatctagcgatactcgggggcaacctcatagcctacttcaaataccatcaatctcagctccctgacgaatcctagcaccttgatcaagtttttcggcggatgggcggcatctaaagaaacatagaaaggaggaattaatgcatatattttttttaagttagctgtacaaactagacttaatttatttgacccaaaaaggaagaaaaataaaagaaaaggaacaaacagaactaaacaaatttttttttttggaaattaaatcagctttggacagagacaaatagctttagacaaatgaataaaataaaactaaaatacttaagatctactataagcacggtacagtgtcaccattaagagggatgagtagtactagtgctatcttgattgaatcgataccataatagatgtacagtgccgaccaaccactgaaattcaaaaaactatttaataccctgaacagtaaaggaaaaagaaaaattagaaaagaacagctttctgttttgtaaagtaggatttagaaaattttgtgcttgaccttgcatgtgctgccaacttaattagtttgtaagagaatagggaagagcagtcctattttttcaaaatattttaaatgctacttaaggtttaccatttggcttgtcctaaggtcaaggtagctctgataccaacttgtcacgcctggaatttctatccaaaattccaaacgcttacatgtgcattaaatcctcgtccaggaatcagccgaggcacacaataacaaattgataatagagtactattaaacaactaattaatattcgcaaaacaatatattattacagaggtggatagttcctctcaaagaataaaattctacacagaaaaaaaaacaaaaatggaacagctatggcgactccactccacaagcaacttgacccgaacaaagcctaatcctccagatcatcaccttcactgaaatactcctcctttgatgaatgaatattgcaagaatgagcatatgtcatactcaacaagccacacagcaaatatgcaagtgcacaagataacaaaggatggcatagtaaagctcatttgcataaacaacatttagtaaacattttaaagaataataaaacagttgaataattaatcagtattaaataaacactatacaacacacctatgttgcataggcccaacctcatctgaacaatcaaccccggttgtacaaatcaaacctccataccaggaatataccattccaaaccaggagtcatattaattatcacaatattatcattaatgaatagtgtgagactaatcacgaaaaacattgtcaaactcacccataaccgcgggcacggctattcgaatagttttactctggccagagatgtaccactgtacccacaaaacacagttccacaacatgtcaccatgcgccttagtaccaccacgataccttggaaaagaactgtgacaatacctctcacacaacacaactcaccacagtgcaccgttcctggatcataatctccccctctaaaccagaggcaaatagactccccagcgacccccacggacttctcaccgctttacagtctgacaccccgtaatgaatcatattatacaaaaggtaaagccgttgcccacgctggcttgtggttggcacggttaatgtttcacaacagtagctcgcgaaccggtccttaattgtcacgagcaccaccatcaaaaccatatgctcacaacccacctttaattaggttttaattatcaattaattatcataacatgattaaccatcgtgagctaccattgaatataaccataattaataatgtagtatgattcatccctttaatgagctaatgtttttaagcatggctaagcaattatacatatagcatttagctgaaccaaaccaatatataaggttctagctaatcgaattataacccataggaaaataaagtcatcttcggccattaattaattaggaaaagcttaccacccgatgtcattcgaaaataatgcataagttgaaataaaacattagctttaaatgggttcaacatgctcaaagggttgtttgggatctgtgtgacttgccttgagcttccgcaaacgcttccgaaccttcctcaacgaaaacgctctcctccggaacgtcggaaactaaagcaaaagaaaaaaatcaacaaaacagtaaaaaaacaagcataaacagtgcatgtggatatttttaacatgtagatctcgattttagatgaatttagcaacttgaaccactcgaatcggagttacgatgatttagttatgaatttatgaagtttaatcgattttcatctaataaagaaactaagaaaaagagatttatgacgtcatcgctgacgtcatcgccagccatggcacggctccacgtgaccaccggtgctagagagctcggtttgcctaaccgaggacacgtacgcgtagaagacggcgacgcgaactcaccggtgcaataaactacgacggaccacgacaaacggcggccggcgacaaggtccaatggcggctcggctcggctcgacggcggtgacggcgctccggtggcttgcgacagcggcgaaggggtggccgaggtactcctcctccgtgcgcacccgacggcggtgacggacggcaacggcgacggcgctagcggcggcgcgacgtgaccggagtgtcgccggcgacggcggcggctagggcaacgtggcggcggcgctacgggcgacggctcggcttgggacttgaagcaaacgaaagaggacgactaggggatgctatttataggcttgaattagagagatcggactccaaccgagaggaatcgagccgggaaaaactagggttaggtggagagataaactcgaaaacgagtttgatttgacttatccgggcaaaattgatctccgaaaccttaggggaaaggaagaggataaggaggagatgatttccccttaagcaatcggactcgggggcgaccggttgaggcggaatcggaggagaggcggcggcgctcgggctcggcttggcccggccggaggtaggggaagaccccgacatgtgggccccacatgtcggcggctaggggagaggaggggcggcggctcggcttgggccgcacggccgcgcgcgaggagggagagatgttgggtcgaaaatggcccattggcttaggagaggattttaaaaacttttccaattaaaataattcgtgaaatgatgtttcatttattaaaatactttccttgctcaaataattcccagaaaaaatctagaaaatagataaacaagcaaagtatttaatgaaattttatctagctcaattttatgctgaaatttttcctaaattattggagtttaacttgtaggcttttaaaataatttctaaaaatgatttaaaagatggattattaatttaggcgattttcatggcgtgacagtgttctagatatctgtaaagataatcttagaaataattatagtcagtatattaaatacatcacgtaaaactcctcgaaaacccagtgggaaaaataaggagagaaccgtgatatattattgactagttttagatcttaatgagtaaagctcatagtatgatccaaaaatagtataatgtctgtagttatcatttagtaaaaatcccagtggggaaaagccaaatgataagacatataacttatgttgatattacctcgttaaaaactttggatgagaaaacctatagggtaaaactcatacaaaggaaaaagagtataatatgacgaaaatatgttattttccagaggaagatactccccctgaatcctgtaaatttttaagtcgtctcatactaattcctttgacacatttaaagaatgtggagtatggcagagattttgtgaataaatcatcaagattatcacatgacttagtttgcaaggtgtttatctctccatgttgctgaagctcatgaggataaaataatttaggagcaatatgcttagttatgttgctcttaatataaacagtttccatctgaacaacacaagcagcattatcttcatagataatggtaggtgattccaatgaaccaataccacaagatgttaatatgtagttaaccattctgcgaagccatacacattcacgtgatgcctcatataatgcaattatttcagaatgatttgtggaagtggctaccagagtctgtttagaagacttccatgaaatagcagttccaccttgtaaaagtacaaatcctatttgtgatctggcattgtggggatcagataaatagccagcatcagtatacccaataaaagtcgaatcatggttctttttaaagaaaagtccaagatctcttgtgccattaagataccgaaagacactttaactccagtccaatggcgtttggtaggagcagcgctgtatcttgctaatagatttaccaagaaagcaatatctggcctcgtactatttgcaaggtacataagtgccccaatagcactaagatatggaaaatcaggaccaagcacatcctcaccatcttcctttggtctaaatggatctttctccacgtctagagatcgaaccaccataggggttttggaaggatatgacttgtccatattaaatttctccaaaattttctgggtatatgcactttggtgcacaaggattccaaaaggtaaatgctcaagttgtagacctaagcaaaatttggtttgacccaaatccttcatctcaaattctgtctttaaatgatgacgtgcttcattaatatcttgtgtattgccaatgatgttgagatcatcgacatataccgagataatacaaaatcctgtgggggaccttttgataaagacgcacgggcaatcatcatttttagtgtatccttttagtgaaaggaattcacttaatcggttgtaccacatcctgcccgattattttaagccataaagtgacttctgcaacttaacacaatacatgttatgatttaccttctgattcgggatatcgattccgtcaggaaccttgatgtaaatatcaaaatcaagtgacccataaagatatgctgtcactacgtccatcaactgcataaatagacgattttgtattgccaatgatattaaatatcgaaagttataccactcataactagagagtaagtttcgttgaaatcaacgccaggtttttgcgtaaaaccttgtgctacaagccttgctttatatctcaccacctcgttgttttcattccgtttccggacgaaaacctatttgtatcccataggaaagataccacgaggagtaggcattacagccgagaatacttctcttttgtaaagcgaggctaattctgcgtcaattgcgtccttccatttgttccagtcagagcacttttggcactcttttatagacctaggttctggatcaacttggaggcaatcagcaatttgttcagaaaaattaatgtcgacaattgtagctcttctatcaaaagattctccagtttcagagtagttgatggcaatttcatcaacccctatagactcatcgtgatctcccgaaacaatgtgtctatggtcttccgaattcctagtctcagcattatgcaccaccgagctaagttgcagactatcacgatctgcttgatatatagtatcaatttggtgtgtaccaactaaagggtggtttgcatttaccgtctttctttgcttattagcaattgtttctcgctgagtggccatacttcttcctctctttttagtgagtggaagttgagttgttttatttggtacctccactctttctggcgcattctgagcaggaatgaaagatttagttacacctttataattagtaaatgcatatggcaggttatttgcaagtctttgcaaatgtataattttctgaacttgaagttcagtttcagtagtacgtgggtttgaggctggaataccctaggcatcccagtcaatttcctggcattctttctggtacttgaagtctccccctaatgctaggaaatgttcctcatcaaagatagagtcagtgaaccgggcagtaaatagatcacctgttaagggttctaaatactttatgatcgagggagatttgaatcccatatagatccacactttcttgtgtgggcccatagcggtatgctgtggtggtgagatcggtatgtatatagcacaaccgaacttacgcaaatgggaaatacttagaggatttccatgtactaactgcattggggaagtttcatgatatgcagttggtcgtagttggacaaggtcagcagcgtgcagaactgcatgaccccaacacgacgaaggtaatttgcaattcatcaataatggtcgagcaataagcttaattcttttgatcaacgattcagccagaccattttgtgtgtggacatatggaacatagtgctgaacctgaattcccaatgccatacaataatcatcaaaagcatgggatgtaaatttggcagcattgtccatacggattgattgaatcctatgttcagggtaatttgccttcagccttataatttgagacattagtttgtcaaaggtatggtttcatgtcgatagaagacacacatgagaccatctagtagatgcgtcaatcaaaaccataaagtacctgaacggtccagatcttggcacaatagggccacagatatctccttgaatgcgttcaaggaatttaggtggttcagctctgattttgagataagatggtctcaaaaatcagttcccagtagcacatgcagtgcatacgaaatcagaggatttgagaaatttatcagtgatcaaatgatgaccaatagagttgccaatatttttttctcatcatcccggtactggggtgcccaagtcgatcatgccaagtgtggaatgcatcaacattttgaaaaattacttagtacgcaacatgtgcaatgggcttaatatatgtatagtacaatcccaatgtgagagatggaattttctcgcaaatgcgtttgccatatctgttttatttggttaagagaagaaattcttctcgattatccatatgggtttcaatgtgaaatccattttgacggatatctccataacttagtagagtacgggttgaatcaggatacaataaagcatcctcgattataatttgtgtacccattgggagtgtaatagttgctcgtcctgagccaactatcacagtatcgcgcccagcgatagtcaaaactttgccttctctctttttgagagtttgaaagtatttgatctccctaagtatagagtttgtggtaccactgtccacaagacataattcctctccaattggggcgatatccttagacatctatagtgaaagaagaattgcttagtgaagaattctttatccacaatatatacatacatataataatgaaaacatcaaatacatagtatgacgtttacataggttaatagtacatactctaatgactagcaggtcttataaccttacaatgtaagggagtttgtacgtatctacttattacaaccaatattgttttgacaaactataggatatcaatataatgtctcaaacacactgagattaaagcagctttatctctaagtgggacgcactgagattacagtaaatctccaagtgggtccgttgagcagtattcgatgagcatgtcatccactacagaaagtgcagcggtatcctctgggaaaagaacgaggttgttctctggttcaataggagccaggtgagaactttcaacctcaggtctttcttttgtaagattgaagtgagcttcaaatctgagttcctcataagactttttctcctttagggatttctgatacaggagaacaagatgttgttgggatgcggcaatttttagcgacatgatagtcagatccacacctgttgcaatgcttgttgctattgccactaggttgtggtgccttacccttcccttttcctttctaatcgaccatttcatttgcgccgttgttgcatttgcgttttccagtcagattcttagggttattcgaggaatttcccttgaatcctttgagtgtgatactgttggttcaatatcatgtcctctggaaacatagttgatagagttttctctatctcctctgcttccgttggctctttttcataaaacttcaacttggagcaaatgttatgaacatcatgattgtattctgccacagttttttttaaaatcctttaaaatcctataagcgtaaatgaattcactcataattagcctcaggccaaatgagttccttttgcttatcataacgctcttttagagctttccataggttgagagggctcgactccaacatgtactcatgtttgagatctttatagatgtagagcctcagaaggaaaagggcaatatatagatttctgttctcaactggtggatcccaatcattgggttcctaatttgtatgtgaaatcccactagaagaaaaatttattttgatatcggaagcccaaattgggtagttactcccatcgagggcgagttcgtcgagctctatagttgccatgtccctataatcatgattaacattattaatttacagaggtaaattaataaaaacatgatattgaggttgtaatctcaatgcgtaatgtaagacttcatattttgtaatgtttcgaaaagatgtaggctatagacctgacaatttgagttagaattcaaaattaggtggcacaatgtggataatctccaaataattaaatagtggagtagatatcttaatagtgggcaagtaatacttgctgcctaaaacacggtctccaggcaaatatattctggtgaatataccgcagccgatgtttaggactccactaccttgtgctcaaccaaatttcaaataatctcatttttcaaaacatattctcggaaagtaacacatgtgggtaatcatcgtgagatgttgacctctgtgagatgggcgagatgctcgctgcctaggttatgaccagtgcggccaatttgtaggactccatcgggtaatcatctcaaaatgtagatcacttgatgatgggcgagatactcgctgcctaagttatggtcaatatgaccaaagtataggactccatctacatgtgattaatgtccgagtcaaaatgtgaagtggaacatgcattaaatcctccattaatcatgttgtacataattaagagaatttgctaaatcaaagtacaaaacttatagaattttgtaaattaatgaagcgagaaagtagagtgtgtcttgaaatagtatgcaaaaggcatattattaagacaacaaataaatttagtgaagcagggtatttaaataaacacctatgttaagtaacatataacatcagtggtctacaggaccagtacatagtaatttgtacaactgatgaactgcttgtactaaattatcaaagatataggaactaataagaaaatgctgctaaattagaaaataaaaactaaaaaaaataaacggtaaatgggtggtgagccgaaatcaataggattcggcccaccaccgctactgtgcggctggcccatcgggtccgaggggaaaagggcgcaggggggcgtgggggtgttagggttagaaccctaaccgttcccctcgcggtgtgcaccgccgccgccgccgattggccacgcctcctccacctcttctgcagccgccgccatttcgccgcctcctcctccatcactttagccgccgtttccaccgccacctttctcatccaatgccgatccaatttccgccgccaccttctccccctgaaacgccaccactgttgcctctatttccgccgccgcccaccaccgccgtctctactgcccgccgccgccatccaccgtccgccgccgccgcatcccccatgtcgaccggcggtttgctggctagagttaggccgacggccccaactcctcatcggagtcggagaccggttgagcccttacaccgttccccatcccgccatttgagagcgtgcgggagccatggggaacggcgagccatgtggagcggaggctgggacggcgagcagtggcttcaccggcatgacagtgagacgacgatgggttgaagtaggccggctcccccgtgcgcgctaccatggttccgttccggccggactccggtggcgcgggagtgggggagcagcgttggtgtggcgtcggcgacgtcgtggcgcgggtggtggcggggttggagtagcagcaatggtgatgcggcgccgagggttgtggcggtggccactaaccctaggccggcgcctggcatggtgatggtagcagtggtggcgactcctcgttgtacgatggaggaggtggtgcagatggcgggctcggtcatggcgaggaataccaagaacggtgtcgataagtaattgaaggtagacatctcgtacctttcctgttgattctttcgcttttccttgagatcaaaagcgatgtagtttcttctttcacttcacgatcttcttcgcgagaacggcgtcgataagtaattgaaggtagacatctcgtacctttcctgttgattctttcgcttttcattgagatcaaaagtgatgtagtttcttctttcacttcgcgatctccatcgcgagagcgaaagtgctgataacgtattgattccagcctcagacccacgtactactgaaactgaacttcaagttcagaaaattatacatttgcaaagacttgcaaataacctgccagatgcatttaccaattataaaggtgtgactaaatctttcattcccgctcagaatgcgccagaaagagtggaggtaccaaataaaaccactcaacttccgctcactaaaaagagaggaagaagtatggccactcagcgagaaacaattgctaataagcaaagaaagacggtaaatgcaaaccaacctttagttggtacacaccaaattgatactatatatcaagcagatcgtgatagtctgcaacctagctcggtggtgcacaatgctgataacgtgttgaaagtgtatagaattaactgagcgaaagggattgagcgagagagagaattgcactcaagaatgtcgagaatgaatgagcggatcctttattgataacagtgttacaatatatagggagagagagaggtggcaaccagaagacgtgatggtttgggaaccatcgtgtccgttgctagaatcgccgtgacgtgataagaggtgtggggcacgaccaaccgtcgtgtcccagaattggttgctgctctatccatatagatggatgggatcacccaaatatttcataacattcttgatgtacactcatattcgagtgcgcgtttcgcaattttcctcttgctggtgacctcgagtcgtacgtttcgtaggttgttaattttttttccagtcagcagtttaccaagtttataaaaaagcataacaatacttttaatgaaaacgaacatactaccaaaatatacccaatgcaatatttaataacactaattttttttgccaattaataacactaatttaatgttgtggatgttactaaattctcttataaatttaattaaacttaaaataattaattaaaaaaattatagcatgttataatatgaaatggagaatgtggccaatagtcgtgtagcatccgtagaccatgacatcgtcgtcatggcgttcatattcccatgaccaggcgccacgagggaacacgccacacatgctgaaatttttacattttagtcctttttaaaacttattttatgaatagattattgaaaaacttatttcagaaatagtcttttctggtgcgctagagtggctcgcgccgtcgtcgaacagggtggcaccatcacatctggcgtcgtccccataccattgtggcaccacgtggctggcctgcactgacctgacaggaggacggcgcagtggcatggggacggcaccagattactggcaccgacccacccccctcgacggtgccaacacctgtggcgtgctcctcccaggggtgggtggcacttaacccatacccacatggaccccaccccgctccccctccccacccattcgtcccctcctcccccgcccgagcctgagcagagctcttgctctctctctctctctctctctttctccctcctcacctctcctcttcaaatccactcattgtgaagcagtttttcacgagattttttaggggaatcgaagagcaaggaattctccatcaatgcccctatttttttcgttttaattgataaaatttgtagatggtagggtaacactagaacccaaatttgtgattttgaacattgaaattggggattcgttgattatagtgttacatgtgtgcaatgtgcatattggcgccacaattttttggagtatatatgtggtaatgttgatttttaggtgagacattaatgaatggttggatggaaaaagttgctttaggttagatttgtacttatgtggtatattttggttactttaatatagtgattaacatttttggcattgtgggatgcttaggaaggatcatgtgggctattccctggatcagctgccaacaccgggcgtaatgcgctgtcacgtcctgataaattcatcccaaaataaaaatcattctctaaaaggaataatagaattaattaaaattcgaaaagaaattggttaacactaaaatacatacaagaaaaattcgaatgtggcccggagaattttacttggtctaaaaagagccctcaaattttacttgaattttcagagcaccggaaatatttattaagcaacaaaaacaattaacaaagtttatttaaaagaaaaggctaaaaataatccccctcctccctttgggccaagtcaggcccaaagtcccctctctctctctcggcccgctgccaaagtcctctcttcctccctctctttctctccctctccttctctccctccttctcttgggcctcccattcccctcctggcccactccctcctctcctcctccttctgggccgcccctcccctccctccttccctctcggcccagccacccgacccaaaccaggccgagccaagccagccgcgtgcacgcgcgccgcacgcgcgctgacgacgcgcgccccgcgtgggtcccacgcgccgggtcgtcgtcgtcctcccgcccggcctcctctctctctcccagaaacctagcgccattcctccccaaaatccacgcgattcaaaccgggaattccaaaattgattagggggaattaatcccctttccttcctcttcaattccccccaatttcccccttgattcgtgccctctaacgcccggaacagccgcgccattcccggccgccttccatggccgccggccacaaactccaccgccgttccccgctcctcccgttgccggctccctccccgcgcctataaaatggaatccccatcctccgttctatcgttttagcctcatcccgagcctccccgtggtcgtatcacccctccccgccgtcacccttctctttcccccgcgccgaccgcctccagccgcctctaccgcctcgcccgcgcgccagtcggctgtgccgtcgcctccctcggcatcgcagcagcctcctctcccccggcctgccctccgtttcgcgcggagacccccggaggtgcgcccccgccggcaacagtggcgttgtcgccactgttctgcctccggccgcctctgccgcgtctcctgtgcgccgaccgacgtcgccgtctcctccgtcgatgtcgcagcgtcgtcctctcctccggctgctcctctgtttcgccggaacgctgtcgcccgcaccgcctctccctcggtctcgtcgacacccactccggcagccccttccgccgtgccagtccaccggccgacgtcgccgtctccacctccggcatcgcagcggcaaggtcgccctcggcctcacctcccctccacccgaacaccgccggtgtccgtcatcgtcttcaccgttcgtcctcgccgatcgacgtcccatcgttcgcccggctcgtcgtctcacggcgccgcctccgtcgtcggattcacagcagcgtgttccacgccgtcctcgcctctgtgcagctgctgccggctgccatcgtcgtctcctcatcggccccggtcgtcgtcgtcgtcgtcctctcgtcgttcccggtttcgctcgtcgtggcgttcgtccctccgtcaagccgttctcgttcgtcgtcctcgcctccgcgtagtgccgcagccccgtcatcgtcttcgtcctcgcctccgcgtcaccaagcgttgcgccggccgcgtctcgccttcgtgcaaggatcgccgccgaagtcgttccctcgccgttcgcctccgtcgtccccgagccgtctccgccgcgctcgttcgtcgttgtcgttcccacgcctcgtcgcgtggtggtaaggatctctccctcgtcgccctcgtcctcgtccttttggtatcgcccgtgcccgttgtgcggttgtcgaccccagtacccgtgtactggtgtcggtagtcgttcgcttgtgcgtgtggtgaccgtgttagtgtgcccgctcggtagcctcgtggtttccacgtgtgcagcccgtgtggtgtctagtggagtccgtttgtcgaccacttgcctcggttgacacacgggatccgcttccgtcgacccgtggaccatctctgtgtactcggtctaccgtggtcctttaggttgacatgtggggtctgcatgtcaacggcgcagccttcctgtcttttccaggctagcgcttacacatgttttataattgcaaaacctaatcacaataatccgtaaatctccattgtcacgaccggaaataacccaacgggcgttccttacgtgcgtgcattattccttgtcccaggaggcaaggtataccaaaagttgatacaattcagagttcaacaagcggaagcgtaaatagttaatttattacatgggcagcgaaggcccaacacacacaaagacaaacgagaaacagcggaagactagggcgacgaccacaggcgcttgacggcaggcacaagctagacaccaaaaccttcatcttccagagactcctcttctgggtttgggaaaaattgagcaagactgagtacaaccaccgtactcaacaagacacacccacaagtgcataataaatgcaagggagtacaagggagttataatataaagggttagggttgcagtaaacagcatttaaagatacttagttgctcaaagctattttgtaaacacgattctagaactatacaatattatttatcaaggccgtgaacccacacgaacctgccttaacccaaggcctacgatgattcagaccaaaccggcaacccgaccctgggtcccagctcgtcccaagccaacccaggccaaccattccacattttagttgttaagcaggttttaagaattaaaacactaacttgggtacattgctcggcttgcccataaccgagggcgcggctattcgaatagattatactctgatcagaggtgtacatctttacccacaagacacatcttcctcacgtgtaaccacgtgccacataccaccacggtatacggacggaagacgtgacatagttcccaacccatcctagccataaacaagagtaccgacccaaccccacctacggccggaacccccgggacaggtaggcaggactgagcccccagcagcaggacaccggccctgtgccatgacatctcgactaccgggccgcagctcgtgtagccttcatttgccctggagatgtccatcgacccccgacttcgtccatctctatccgtgtacttttgtttataaccagactgagccacaaactaagccttacccactagacatgtggaagtacggtagtgctttgcaacagaggcccgaagaccggtccttatatggccgaggtgctactatcaaaaccatgcaccccgagcccagcctaaaaccatttttggggattttgaatagagggggaggtgtgtgtccaattccaacataagccaaccattccatagtgtccaaatgatatgagaattcccaaagtctaaagttataaaaccacctaatgttgcctaattaatcagcgaagcatctacctaaattcatactagtggaaccatgaatagagtacacactagttggggttttgtttatcctagggtgaacaaggtaataataacaatagcaataataatgtcttaacaaaggtaaataggcatggctaaataaaacagtgataacgcgggaatttaaataaagcggtaatgcattaatttaaattaaaataattttataaactgggattcaatatgctcaaggatgatgtgacttgccttgctcgctttcccaaacgccggcttcaacttccacgaagagcggatcttccgaagctgcagcgtctacacgaccaacggaaaagaaaaggcttttactctaataaactccatataacaagcagaaacaaagcacaaaaatgggttcttgacttcttaaggaaaaattagagacttgaacggtccaattccgagttcaaatggccaagttatggccatttgaagtttatatgctctttaaatgaatatttgcgaatttcttcatttaaattttaatttaaaatggatttattgcgtcagccgaggggaggggcgcgcggaccgggtccacgggggtggggcccacgcggcagccccacggcccacggtggaccgggcgcacccgggctcgcaccggccggcgccgtgggtcccacgcgtcagccgcacctaagggcgcgggcggctgacagccgggccccacacggcagccgcggggcgcgcccgaaggcggccacgccggcgcagcggcgggaggcggcgcgcccgtgcccctatggtcgccggcggcggccataggcaccggcggagcggcggccgagagaggggaagggaagggggaaaagaagcggcggtccacggctcaccccgggtcgacggcgacgacagaaacggcgaccagagcggaggggtggacgaggtcgccggggatgcggtgaagccgaaggtggcgacgccgaggcgggaggtggtccggggcgacgacggcggagagagagagcgacggcggagagagagagcgacggcgcgagctcgattccgacggggagagagggcggcgagtggcggaaacggtggagggaggcacggggaaggtttatataggattgggagggggagggagctgccggacgagggggaaacgggcgcggaagatccggtcgccattgatggcgccggcgaagttaggggagaggtttccaaacgaatccgagggagagagggagggaaaaatggggggaaagagggagggaatcacggggaatatttcccccctcttgattgcacgcggggcggacgggggcggcgggattcgcggcggcggcggcgctagggcgcgggcggggcggcgggagcggcgggaggaaggggatgacgggtgggccccacccgtcagcgagggaggcgggcgggcccgcccgtcagcggcacgcgcgcggggtgggggccgaatgggccgcgggaaagaggagagagagggagagagatgggccgagccggcccaagagggggggaaaggactttttagggtttttctttttataaaacctttttaactttgtttatttcttcttaattattatttgtgctccgaaaattccactaaaatttatttacgcattttaggcttttaggaaatatacaaaaatcctccaagccttatttgacttttaactttgcacattttaattgttggaggctttcacacggattttaattattctaggcataatttcgaggatgtattttagagtcgttttgggacgcgacatccatgtaacagcattaaacttcggatgatcatatcttggtcatacgaaccccgaatcgacccgttcaagtctcctaatgtttgttataacctaaagaaccgtgtgctttctttttatgtattgttattgcttctttataggcttgtagctttgcttgtgtgcttcgcgtagcttctgtcgttccgaaggttctcgaagcatggtttgcggtcgtcgccaaaggttcggaaggccgttctctctgagcaaggcaagtcacatcatccttgagcataatgaatcccagtttataaaattattttgatttaaattaatgcattaccgctttatttaaattcccgcgttatcactgttttacttagccatgcctatttacctttgttatgaccttattattattgctattgttattattaccttgttcaccctaggataaacaaaaccccaactagtgggtactctatttatggttccactagtatgaatttaggtagatgcttcgctgattaattaggtaacaataggtggttttataactttagactttaggaattctcatatcacttggatactatggaatggttggcttatggtggaattggacatacccctctcttcctatttcaaaacccctaaaacctgttttctggtggggtttgggtgcatgccagttgtgggaagtagcaccccggacaatataaggattaagctcgggcctctgttgcaaagcactaccgtactaaccacatgtctaatgggtaaggcttaactcggtgctcagtctagtcctgaacaaaaggacacggatagagatggatgaagtcgttgcgacgatggatatctctgaggcaaatgaaagctacatgagctgcggctcggtaatcgagatgtctaggcaaatgaagactacacgggtcggtgcccgttagtcgagatgccatggcactggactagtacgcgggtggtctcatccctatgcgtgtggtgcacccggtctagatcctgttgctaggggctcaatcctggcctgcctgtcccgggataccggccgtaggcagggttgggtcggtacttttgttcacggctaggatgggtgaagggttatgtcacatgtttacgacgggttccaaggccatggaatgcggagtaaagatgtgtcttgtgggtaaagatgtacacctctgatcagagtaaatctattcgaatagccgtgccctcggatatgggcaagcctagcaatgtacccaagttagtggtttaattcttaaaatttgcttaacaactaaaatatggaatggttggcctgggttggcttgggacgagctgggacccaggtcgggttgccagttcggtctgaatcatcgtaggccttgggttaaggcaggttcgtgtgggtccacggcctcgattaataatactgtgtagctctaggatcgtatttataaaatagctttgggcaactaattgacttttaaatgctctttactgcaaaacctaaccctattattattaccccatgtactcccttgcattaatcatgcatctctcggtgtgacttgctgagtactgtggttgtactcattcttgctctatctttcccccccttcagtaagagaagctttggagaagaagtcttaggtggagtcctggcttataccccagttgagcgcctgtgaagatggagccgtaggcccgctagtccgctactgtttatttttgattgtcaggcctgaagtgcctttgtaataatgtaaatattatcgatataataaagatgtgcggtttgtatcatgtttgtgtggtgtaccccggcttttcctgggacggggattaatacactagcggtcgggaaaatgcaaattttctcggtcacgacatgcgccctatgggttggtgcggggatgaatattgttttcagattagtgatgacggagatacctacgtctagaggtattggatgtgccagaactatgcgtatagtccagagaaggctaagcctgtgcctaaggaaagaagggaaaggcgaagaagccagtggaggtaaatttatttattttatatggtaccaccttgaatctatgcaactctgccatcaacatataatgtgttgcaatgtgcaggcaatgaagatcccgcctcctttttgtgacttttgtggaatggattgacaaggagatgaatgagtttcatacgagtttgattcgacattggcgcgagtggaaggaagaacctaagaagcgccaacgcgagtgtgctgcaatacagaaggctgagagggagagggagttggcaatagagaactgggagaaggaagagggtgatgttgattgggtgaggaaggtggctagggcgcagcgtgtgaaggaggcggggacggaagtgccaaggaagggcgagtaccctcgtgcacccaatagtgcgatggaagttctaacccaaaattcgattccctaaggcatgtaataccgatactttgaaatgtcttgcattgaactatatgcgtgtatgccatagacctttggaattcatcggaatctttagttcgtcatgtcggtcattggacgtcattggacttcatctcctccgacactgttccaggctcctctcatgcgttcgctgaccggcgccaccttcccttgtttctttggttgcaaccaccctcccttcagcccatgtagtggcagtcacccaccccgacgacatggcgccaatcatcatgtgatgcctgaccgacgctgatgaaccttgagttccactcgacactcaaggttgttgttggctcgatctttcggtgagttatagataactacgatttgggagaagcgttgacgatccgactacaaccgtacaagacgttgcgttgcgccttagtgatcgatacacctctccgtgggttgttgatcttgtcggtgcagatcaaccctattcctgcaagaaaatcgaagaaataagcaaaaaaacaagataaaaacgatatgatattgcaaataaaaattgaatgcaaatgataagttggggtttcgaatacaagcagacagacggtctagccgacacgcgcactacaagaaagtagcaatggctaagctttcatctaaacaaaacccaagaaaccctgaaggggtacctacctatttataggggtgggaggacgaccaagggatgccaagggttgttctccacctggttggggcgcaccccacatgggcccactagggccggggtcccaaacaaagttacaagcccataggcccaagacacgtgatgtagcaccttgtttatgtgattgcagccaaacgacaaggaatttggcaatgaggctagatctgttggaaagagggcttcgagagctttccatcaagtactcatgggccgaaaacggaggtcgtatgcaaattcggcggccgtttgaagtcagcagtgtagctggtggccgaatcggattacagcacttggaggacttgatctttatatcttcttgttcatctatgatgtgagcaatggttgtatccgtagcagccaaggtcacatcatcctccccttcttcatgaaaaatcgttctcggtttttccatatggtgctcattgcgtggtcgatttaaaacaacctgtttcatccaatcaaaacaagagaaactcgaagtaatatgattataaatagcatgtctctctggcttgaaagttttatacacatgtacaggaggttctaaatccgaacatatgtaaactgtatacaccaaatatatttctctatcattatattcaccaaagatatgaaaaatagcattagttggacatggcaaataatatttagcaaataatttctccttcaaactatcgagctcacaaaaatcatcacactgaacatagcccaaagtatttaaagaagatgtcaattcacgttgttgtacttcattagcaaaatgaataacatgcttaaaattatcacataaagaactgacattagaaatagcatgttcattcactagttgtggcattgatataagtgaagcattatcacacaactcttctttatcacaaggaacaacaaacaaatcaacttgtgacaaaggaatctcatcagttggttggttccactaatggttgctctactatagcatgaaaagtgaacaaattcaattcattaacaacacactcaccttgaataatttcagcaccattaagtttacctttaatgccctcttcatatgatggaggtgccttgactttgagtgtgaacaatgggactggtggctctttcatgtctctatcctccatttcatgattatgtacttcctgcaaatggttagtaatagaagacaaaaacatagcatgttgcttcttcatatcctctattttactttcagcattacaagcaagttgtaacaaatgagaaagatatgtatatctttaacaatcaagcatgtcttgaatttctttgttaagcccacgtaaaaagctcaattctatagcttcttcgcattcatctaaatcacaacataataaataagcatgcatatcatgatagtatgaagtaacagttctggtatcttgtttggaacattgccgtttgttgaacagaatgtcagcataatacatgggaacataaacatctctcaaatatcatttcatgtctttccaagattgttgtattttattatgcctacaaagatgtttccaatcatcatatgtaattaaaacactagaggcacacataatcttttgtttctcagacaatccatgctttttaaattcgctatcaaccgctagctcccaattaatgtaagcatgaggatcataatttccttcaaaataaggtagtgcagattcgatcttacctagaacaacatcacttacctcatattggtcatgttgatcacttctcatgtcccgatgaagatatccatgttgagcatgacggtcccctgttcgcttgcttaatcttgtcattgttagtagaaaacaagaaacatacacaagaatatgcacgctcctatcaactactaggtagtggcaactcaaatatcacacacactcaaagcttttaccgagctcttacaagttcttaccaatgcaagcggaaaggtgacatacaccgactcaaccaagcacccaaatggaggttggatgtatcgatgccttggcaaacacttgtcgtacggctgcaatcaaatctgtggagctctggataggcttaagtatgtagcaaatgaatagcaaatgctcaaatcagataatgcaaagttgagcaattgttcaaagtcgagtaccatgctggtcctaggctagaacgtactagagacgcgagcctagacacaaacataacacaaaatagcactagaaacaactcaagcacactctgatatatcaaattcagctcaaaaatacaactgatttttttttctttcttacttcttcttccttcttttcttctttttttctttttttttgatgcggcttttcttttatttttttcttttttatgcaccttcctgcctttttcttactttttttatttatttttttctgcaaaaatgactcaaggacctcaatgcaagattacatggactcaattgtaaatataaaatatacagggactcaagtgtaaaagtccgaatccaaaaaatgaaattataaaaaaaaatggaatgctgaatttatgctggttatgtttttccaaacggatctcgaaaccgacaccaaacaaaaattcaccaagctgtacggcaagtcacggtgtagattgaaatgagggagggagtcggataggtgggaaaccgactatctcggctgaaagtttgggtatctcgcatgaaaggaaacaaaatcaatctcaacagaaaccggtacctcccatgaaaggaaacaaaatccgatcttaacacaaaccgatctgctatcctttctttctccttaactgcgcgcaacagcgatctactatccttcctttctccttaaccgcgcacatcagatcttcttccttgcgtgaagagaacaagcatggtcgaatgcagatggcaaaccctagatgcaactcagcaactccaagaccaaacgataaaaacttctgaaaactagaaaaatggaaccctgacgacaagacaattcaagttttgtaggtcccagcgacaacaatcacacggtggcggcgatgacagtggtactaaccgtgactagaactcgaaactctaaacggactagacactacgaccagcaacacgactcaacgatgcaacacaaaactcaacaaagcaaaaactgaaatgaacaatgcaatggcacaaatatggccaggtacaggatgcaatttttttgtaaagcagttttctggttataggtagataaaaaaaactctccgagcaacgaaagctctaataccacctaatgaaccctgagttccactcgacactcaaggctgttgctggcctgatcttttggtgagttgtagataactacgatttgggagaaacgttgatgatccgactacaaccgtacaagacattgcgttgcaccttagtgatcgatacacctcttcgtgggttgttgatcttgccggtgcagatcaaccctattcttgcaaacaaatcacagaaacaagcaagaacaacataaaagcaatctgatattgcaaatagaaattgaatacaaatgataagttggggtttcgaatacaagtagaacgacggtctagcaggacacgcgcgctgcaaggaagtagcaatggctaaacttttatctaaacaaaacccaagaaaccctgaaggggtatctacctatttataggggtgggaggacgaccaaggggtgccaagggttgttctccacctggttggggcgcactccacatgagccccactagggccggggtcctaaacaaagttacaagcctataggcccaagacaggtgacgcagcaccttgtttatgtgattgtggccaaacatcatggaatttggcaatgaggctggatccgttggaaagagggctccgagagctttccatcaagtactcacgggccaaaatcggaggtcatatgcaaattcggcagccatttgaagtcagcagtgtagcaggtggccgaatcggattccagcacttggaagacttgatcttgatatcttcttcttcatccatgatgtgagcaatggttgtatctgtagtagccatggtcacatcagatgctgccgcccaccacatccccgccagctcgctcctgcctccatcgtggggctggcactgccctcccccctaccccaccaccacaacgcaacccaggcgccgcccccttccaccccccccccacccggctcgctcctacctcgcgtagctagatagcgacccctcccctctctgaccatagcgccaacaatactggcatcctcccatcccgaacttgtaaagtagcaaattgacgcgcataagccaataatttacacaattcgatattgtatcaaatgcaaacatttcaaccaactcgcaatgagcatattaatcaattattcgcacatgacataattgttaacctccacacatgacccaattccatcgaacaagtccacaagttcaaaaaatgcatatcacacatgacatacaaaagttcattcatcacattggaccatgcatcaccaaagttcatcaaacaagttcacaagcccatacatcaccgaagtccatcaaataagttcacaagtccatatatacatcaccgaagtccatcaaataagttcacaacttcatacataacccaagtccatcacacaagttaaaaaatggtctaaacatgagaagtactagtacgtcatcaaactcacatcttccgttgacatcaaagagcccatgactcgggagtgtaccaacatttcaaaatacaatgtgaggcaataacacatcatggataatagtaagtgcactgtatcattgaagtacggagtacctctttttcccttgctgagtgggacataagttgtatgtagtgggctacgacgcctgaggcgcatcgggcagctgtgacatgccgatctcatcagcatccggtgcgatgtatagtcatcgtcaccggcattgtcatcatcatcattcaatccatcatcatcaaaatcctctagacattatcaatatttgataacaaactaaatatatctacatgtttgttatttttaccaaaaaaaaattgatatagctaaaaatagcccttataatgacaaagctaatggcgccgagctaatataataactcttaaaacattacaacatattatgggacagttggatgggcgtggtgtagttgtcaatgtatttgttgttgcatcttggagagctagctggttcggactcatcttccttgctaggaccagcggaagttttttttttctaaagtaattaagcaaacagttaatacgttaattcatgactgaaaggaatgaagaaaaggaaaggaacaaaagaaagaaaaattgaccgaatttctgacctttgtgccaaatttattttttttagataatggaatgaaatagcatcccggcctttactcgaaagagctacagccaattattacaaactagcactctgtaatagtgaagttcaaatagaagcaaacacaccaaccaaactagacaaaataacattattccagtctattggtaaatctccatccatgattggcaaacagttgcataaccgtcgtttcaaccttacgacatgcaacaattaagaaatctgcatcttcatcacacttttgtaactgtgcccatagacgaagccaatatgttgccttgaaaatgacctgcatataagtaatagtaggtgatttatcaaaaaccctatcattcctactcagccacagtgcccaacacaaggcagaaactccaacaagtatcagtttgctctttttgtttatgactccctgaagccaatcataaaaaatatgagatatgctagtaggaatatataaaccaaaagaaaactgaactgccctccaaataaactttgcaaaatgacaatcaatgaacaatgttggatagtctcatttttcgtacaaaagcaacatcttaaattaccagtccaattccgtcttgctaaattatccttggttaacacaactcccttaagcaaataccacataaagatcttgatcttaagcggcatcttgagtttccaaattaacttatttctgtcaatgtaaccattattaattaaggctaagtacattgatctaactgagaattggccattctgatgatagttccatctaaaataatcagaagtattattcaattgaatatgaacaatagatgcacacaattcatgccaaagtgttaaattctgaccaactaaagctctcctaaaagaaacattgagcggaacagaagtcatcacactagcaacagaagaacttctcctactgacaatagcatataaagatggatacttttctctaaaggccgtatttcctaaccatctatcttcccaaaatcttatgtgttccccattattcacaatccaagaacccatagttaagaaagttttttttgactttcatgagtcctgaccaaaaatgggagtcaccttgtttcctgtcaacttgggttataaacttattataaagatactttctcttcaataagtcttgccaaacaccattttcatttattaacttgaacaaccatttactcaaaagacatctattttgaatctctaaattatgaaccctcaaacccccctattctttgggttggcaaataatatcccatctagtaagtctatactttttcttatggtcatctccttgccaaaagaaacgagatctataataatcaatcttttgaagaacccctttcggaatctcaaagaaagatatcataaacatagctaaacttgaaaggacagaattaatcaaaaccagtctacccccaacagacatatgttttcctttctagctgctaagttttttctctattctttgttcgataactttccaatcattattacacagctttctaaaatgcattggaataccgagatatttaactggaaaagaccctaacttacaaccaaagatattagaatattgctcataacactcctttgcctgaccaaagcaaattaactcacttttgtgaaaattaattttcaagccagataatttctcaaagatagacaaaatcaattttaaattctttgcttgttgtaaatcatgctctaaaaaaatgatggtatcatctgcatattgcaaaatagacaaaccatcatccactaggtgagaaaccaccccatgaagagatccattatctttagctcttttaattagtaaagctagcatatcagcaactaaattaaagagaattggagatagaggatccccttgtctaagccctttatgcgtttgaaaattattaccagtttgatcattaactttaataccaacatgaccaccttgaataaaagaggcaatccactcacaccatttaggagagaagcctttcatcctcaaagtctgttgtacaaatgaccattttaccttatcataagctttctcaaaatcgatcttaaaaattacagcacttttgtttttacgatgtaactcatgcaaagtttcatgcaaaatacccacaccttccataatatttctcccaggaataaaagcagttagagtaggactaattaccttttgggcaacagtcatgactctatttgtaacaactttggtaaagatcttaaaactaacattaagtaagcaaataggccaataatgatggattgtcatagcctcaacacacttaggtaaaa

SEQ ID NO: 5589 - DNA, 1807 bp, Oryza sativa
tactgccacaaggaaaacaataggaaaagtgcttgcctagatcttggatttggggctggctcctccacatcgattcctgccacttgtctccacttgatttgccaaaagcaggtagtagaggccaccggtccttctctcggtcaaaaggccatccaaaccatctccaaaaatctccgccgccctcttctccaaccaactccgccgccatatgatgaaccctgagttcctctcaacactcaaggctgttgttggcccgatctttcggtgagttgtgataactacgatttgggagaaatgttgacgatccgactacaaccgtacaagacgttctgttgcgccttagcgatcgatacgcctctccgtgggttgttgatcttgccagtgcagatcaatcttattcctgcaagcaaatcgaagaaacaagcaagaacaagataaaagcaatctgaattacaaataggaatgaatacacaagataagttggggttccgaagaacaagcagacggacgatctagccgacacgtgtgctgcaagcaagtagcaatggctaaactttaatctatcaaaacccaagaaactctaaaggggtacctaactatttaaggaggtgggaggacgacctaaggggaccctagggtcgtgctccacctggttggggcgcaccccacatgggccccacttgggccggggtcccagagaagttacaggcccataggcccattataggtgacgcaacaccttttttttgtgattttggccgactgggttggaatttggcgatgaagctagatcattggaaagatgactctgagagctttccatcaagtaatcatggatccaaaatggagcttgcatgcatatttggcggccgtttgaagtccacactgtagcaggtagccgaactggattgcagaacttggacggcttgatcttgatgtgaacgacggttgtatctatagtagccatggtcacatcaccatagatctagcgctggagaggaagaaggaatagaacgagaatgactcgacctaaactacgggaaaacccaaccagaaacctacactagacaccttaagggatgcgatctgacccctcctcccatcgtcgctggcgacgagccgccggaaacccggggaagagaggttgggggagaaagttttttttttccgactcgctggtcgcttcaggaagcctcctctctctccatcgtccgatgtaaatagatttattgtactaggatgtgtcacattctttgcctatgttgagtttttttttttacggagggagtagtacttttatctgttttctttactccctagcgagaaattggatattacgccactgccaagagtgggattcgccacaatgccattccgcggaatggcgtcgttaaaatgccactgccaaaactgggcttacatttgttttgctatttggaccatttcactccattttcacctaatttttcacccaaaatgcccttcgatctgagtggtggttgccagtggcgacaccgagctaaccgtggcagaggccaaggaggaagaggaagccacccacgacggcggtggcatgcacttccagtggctgcgcgccgcggtgctaggcgctagcgacgatcttgtctccactgcgtcgctcatgctcggcatcggcgcggcgtgccccgccgacgagcatgccgtactcctgtccgggctggccggcctcgtcgccgtcgactggccatcggcaagccgtcttcctgtccgggctaaccgggctcgtcgccggccacgcgcagctcgatgtctacctggccgaaat

SEQ ID NO: 5590 - DNA, 2572 bp, Oryza sativa
ctgtacggctgcaatcatatctgtgaagctctgggtaggctttaaatatgtagcaaagggatagcaaatgctcaatcagagaatgtaaagttgaataatggttcaaagtcaagtaccgtgctggtcctaggctagaacgtactagagaccgagcctagacacaaacgataccacaagatagcactaggaacaactcatgcacaactctgatatatgaagttcagctcaaacataacagtattttctcttttctttctttcttctttcttcttttcttttttttctttcctttccttttctgttttttttggtgcagtttttttttcttttatttttttatgcacctttctgcctttttttctcacttttttcttgattttttttaacaaaaactgactcaaggaccttaatgtaaggttacaaggactcaaacgtaaatataaaatttacagggactcaaatgtaaaagtctaaacccaaaattcaaattatacaaaaatggaatgctgaatttatgccggttccgtttttccaaacagatctcaaaaccgataccaaacaaaaattcaccaaggtgtttgacacaacttggaaccgtgaaagggagggagggagtcggactcggccaaagggacgagtgggagtcggccaggaggtggagtggatggtagccgataattaggatttggtgtatgggataaaaatgaaactgatttttaaccaatccaatctactatatctttccaaaacaaacttgactacttccaaaatcagattggtaattcactttcctcctctcgtgcacgacacaggcacggccaaaacagaagcacggcaatcagcaaacccaagatgcaactcaacaactccaaatccaaccgatagaaacttttgaaaactacaaaaatagaatcgtggcagcaagccgattccgttttcgtaggtcccgacgataacagagacacagaggcgacgacgactctggtataaaacatgaccagaactcgaaactctaaacgaactagacgctaagaccagcaacacgacgagacgatgcaacacaaaattcaacaaagcaaaaactgaaaaaaacaatgcaatggcacaatatggctaggtaaatgatacggattttttttgtatggctattttctggttataggaagataaaaactcaccgagtaatgaaagctctgataccacctgatgaaccctgagttcctctcgacactcaaggctgttgttggcccgatctttcggtgagttgtgataactatgatttgggagaaacgttaacgatccgactacaaccgtacaagacgttctgttgcgccttagcgatcaatacacctctccgtgggttgttgatcttgccggtgcagatcaaccttattcctgcaagcaaatcgaagaaacaagcaagaacaagataaaagcaatctgaatagcaaataggaatgaatacacaagataagttggggttccgaagagcaagcagacggacggtctagccgacacgcgtgctgcaagcaagtagcaatggctaaactttaatctatcaaaacccaagaaactctaaaggggtacctaactatttaaggaggtgggaggacgacctaaggggaccctagggtcgtgctccacctggttggggcgcaccccacatgggccccacttgggccggggttccagacgaagttataagcccataggccattataggtgacgcaacaccttctttttgtgatttcggccgactaggatggaatttggcgatgaagctggatccattggaaagatgactccgagagctttccatcaagtactcatggacccaaaatggagctcgcatgcatatttggcggccgtttgaagtccatactgtagcaggtggccgaactggattgcagaacttggacggcttgatcttgatgtgaacgacggttgtatctatagtagctatggtcacatcatcctccccttcttcacggaaaaccgtcctcggtttttccatatggtgctcttcgtgtagtctatttaaaacaacctgtttcttccaatcacaacaagacaaactcgagataattttgttagcaataacatttctctctagcttgcatgttttatccacaagtacaggaggttctaaatctgaacagatgtaaactctatgcaccaaatatattcctctatcattatattcaccaaagagatgaaaaatagtgttacttggaatagtgacatggcaaatcagacttagcaaataatttctccttcaaattatcgagctcatgaaaatcagcaaactgaacatagcccaaagtatttaaagaatatgtcaattcacgttcctctactctattagcaatgtgaacaacatgcttaaaatcagcgcagttagtattaacaacaggaatagcatgttcattcactagttgtggcatggatataagtgaagcattatcgcacaactcttctttatcacaaggaacagcaagtaaatcaatttgtgacaaaggcaactcagcaattgattccactaatggggtaccgagctcgaattcgccctata

SEQ ID NO: 5591 - DNA, 11824 bp, Oryza sativa
ttttgccatgccaacctgcattacatggacaaaggttcatatcatggaaataaaatttagaagaatttatttttaaaactaaaaattaaaatgctcaaaaaataaaaaatatattcttaactaacctggtgaaacaaaagaagcccaacagtcaggccttatccaggaaagcggagcccaagcccaacaaacccatttacccccagcgtgggcaggcgaaccctttccctcccgtgcctatataaggccacaaaccctaacgcccccactcttccacctcgcagtcgccaccccgagcagaagccgccgccgccgcccgaaaccctcgccgccgtcgcttctcctcggggcgcagccatggtggccgcaaagaagacggtaacgttgtcctcctcccggtctctccctccatcacctcggtccgccgcgcaagcgagcgagcgagcgagatcctgcatttctcatggcgctaacgcctctctgttcgtcgtggtgatggtgtgatggtggttgtgtttgcagaaaaaatccacggacaacatcaacaacaagctgcagctcgtgatgaagatcggcaagtacacgctcggatacaagctcgtcctcaggaccgtcaggaactccgagggtaagagggatcaatgctctccgttccttggtagattacgccaaattatagtttaaggttagcatccgtgttgttagtattgcggttttatagtgagtttgggcatcgtaataactgattaccggtggatctcatcgccgccgcgtatgagtcgatgccacagtgattagccccactgtctctgttcttctgaatgtgcttgatattgctgttcagtagctgatggtggtgtatatacttaggtaggatttacatggacttaccccaagacttaaaacattcccctcttacattcaatctttgtacccaatgaaacttatacccgctctctgtttttttattgcctgtatgttgacttgtacccgctctctgtttttttattgcctgtatgttgtattgctgtgtgctgttgtctacattttagctttggatatgtccatacggaggatatgatgatcctttccccagatgatcgacaatgaacataccgtgcgattgttttctcttaggagataatcaagccagaaatctgatcctcgaattttaatgtagagtttttttttctgaaagatttcctttatcttcaaatgagttggttcttgattagtttcattgtgcttatttaccatcatcctttggatggatgttagtgtgagtatgcgcatcgtataaactgattaccggtggatctcattgctgctgtgtatgagtcgatgccatagccatgccccactgtcattgttcttctgaatgtgctcgatgttgtggttcagtatttggcagtggtgtatatacgctttatggtttagtattaacatagacttagccaagacttgacatattcctgtatgctttttgtttggctgtgttgtactcaaatgtgaatacgttgtcaagctatttctagtttatgtgtttatcagctgtttgtcctagctgagtagcctgtatgttgtagtgcactttctttatttagttttggttgaattggtagtggaggatatgacgatcctttccccagatgatcgacgatgagcataatgtgcgctattgttctcttaagagataatcaagccagaactatgattctccaaatttaatgcagtctcttttgctgaaagatttgttttatctgaaaatgtactgatttgtggttaatttcattgtgctgcctatttttcctgattcttttagcatgttgtggtgaaattttatttggtgctgcttaatatggagaatatgatgatcctttccccagatgatcgacaatgaacatactgagcgctattatttctcttttgagaaccaagccagtattctgattctccaaatcttatgcaggcatttccttttattttgagcaagcagtggttgtttcctagactgtgatggatttattgatatgttcaattgtttagcttgggtatgataacatagataattgtctattatgatctttgcaaatttgttgctccaggttgaaacctttagcgttgaaaactgattaccggtggatttagtaccaatatggccaatgtgtatgagtcaacgccataataattctccattttctgcatacagtaactgtgatgtcaactgcttatttgcagaagtggaaacatgctttatgaaaaacgtttttttactatgagtcttcagtatgattgcaaggaaaattttctgtaactgtagggaattaagcttgtagagtgtccttttttctctctgaccatttgcatgtaatgttttactttcatcagctctttctcattgtgtaaacttttcagagcatggctgcatactaccctactttgttttgtcatctttgctggcagactgatatctaatgtccccgcatgtcttcattacagcgaagctagtgatcatttctaacaactgcccacctcttcggaagtcagaaattgagtactacgctatgttggccaaggtcaccgtccaccatttccacggaagtaagttgacacccatgcttttcgacatctcttgacctttgcaaagatttaaacagtgaggcatgcttgggagtaaatatgtaatcaaattatatcgtagaaacgccatgctaattatttttatgcgtttttttaaatgaaactgaaataaggtgcacagttctatcttctgttgccatggcaatgctgcatttgtttgtagcaactgcaaagtggaccaaagaagacttacaaattcatagataggacaaatgaataaactgtgcagacatcggtttctgccatatgcccatattgcttgattagccagtcttattacattagctgtgtctttgtttgaaaaataacagctatctgtttgttttcagataatgtcgatctggggacagcctgtggtaaatacttccgtgtttgctgcctcagcattattgatcctggtaacttccatacgtctacctagtatttgaaagaaactaaacaaaaccgttatttgatagtaatactgtacaatgcgcttgatttccaggtgactcggatatcatcaagaccacgggtgagcagtaaggatgagcggttccgctggcgcttcagatgctgtcacactgagctgttctagacattgtagttgttgctggacttgatttggtctctctcgtgtatcgaacagcttttaccagtcaaccaaagtttcgtgggaacattgttcttggattggaaaattttgttcctggcccgaatcatgttttcaattagaacgcttggctgtttgttcactgaacttcgcatcattacacgtggttgttaaagagctctttagatgcagaccagcttgcgctgctgcatttgcacgagggttgacgataccgccggtaaccgcgtggcttaccgggggtacggaaatataaataccgtggtaacttccttaaattcatataaatgttaaaaataatttgaatttttgataaattttgtctggttttgtacggtttttatacggtttgggaaatcctgatttgcatgcacgatggagaccggcttcataaactgaccgaccatgggagagctttgccgattcataacgctgtattgagcaaccagcatttcggccatttgaatagaatttatacatctgaattaataggaaacaggacttgtgaaattatctatatatattcctaacattacaaatcattttcttattatttagttgaaatcttttaaaactctgtgatttaacatatagagttagagactttgaattcagtatagtcaaaacagactctgaatacattaagagtaaatttcacagaactacatgtgttttatagttcaagtcgcagaaaaattacatatattttagcagtataaacttggaccacaaaacgtgtagttttatgaaatttactcatatattaacataggccacctatgtctctccatctcgacacctcccgtaggacccatggtatttaactatttgtcactcttagatttgttgtttaattatttaccatccaaatatgtgagccattatctatttatgacatacgtgctcagatgataaatcattaattggcacatttaagagtgataaatagttatataattcttaggaacctgctcgctgctagagctcgagctccgtcgcttccagaacgtctccgccgcgagggaaagcgtagaatgggaggaacgaacagctccggcgacgtcgaaggtgatctacagtggcaaagttaggggagttgagggcatgcggtgatccaagcagccgctcgagctcaagccacgaccaggcatcgaacttagcgtcagggtaagacatgatggagacacacagagcagaggagataggaaaaggagagaggaagtgccactgacagaaacggtcaacttttttcgtagttgtaaaacgccaagtcgagacaaccttcaaaaccgctcagggacgtaaattgatctggttttaggctgtgttctttgccaccccctcttcctcgtattccgcgcgcaagcttttcaaactattaaacggtgtgtgctttttataaaaaagtttctatacgaaaattgtttaaaaaatcataatgatctatttttgaaaaaaaaattagttaatatataattaatcacgtgctaatggaccatggaccgctatgttttccgtactggagggattggctcccaactaaagcaaagaacacagccttaatacttgagtgagcttttatacccgattttgcgacgttaatcttactcggtacatagttgagggagcagttatgtacttttcaagtacataaagactgggttagctcgaagtcgagcccgacccgttcgttgacagccccaaaattaggcccatcgacgacagcccataacatcgagaataaatctgggccgcccgtgccttcgtcgcggtgtgcgtcacgagccgtcggatgggaggaaaaccctaacaaaccctagcgtctccgtccgctctctgtctatataagcgccgccgctctccattgccttcgccctctcgtgttctagggtttgcacacgcggtctcttctcgtgatggctgtggacttctaatctttgctgctgcgctgcttgctctttccagctgggttgatttgatttgatttgttctcgctttcaaatctgtttgcttttttttgggctgttttgtcgatgggattttgtttgggcttgaggatgatggatgatgcagatgaggaggcacaagatttaatgggtaatttgcgtctgaggcatctctgtgatgtcacaccctttttcaccttggagatctgatgcatctacaaatcttctgccttctttttttttcctcgattaacttttattttcttttaaaaagttttcctctattagcccttgttcttttagtctttcgaagaaaagaaaaaacgctggggattgatgatatgatgatcaaatttgattccctattggtttgattggccgccatgatggcctcaaattgtattagctctatctgatcatcttcctccacatttttcttgtttcattttttccctcctggatctttctgctgttttttttgcaaaattttatttgctgtgttcattgtacttgattcctgtatgttattgttgtgctgttgtctacattttagttttggataagtccgtactggaggatatgatgatcctgttcccagatgatagacaatgaacatactatcctccaattttaatgcatgagttgattcttttagcatgttgtggtgaaaatttatttggtgctgcttaatatggagaatatgatgatcctttccccagatgatcgacaatgaacatactgagcgctattatttctcctttgagaaccaagccagtattctgattctccaaatattatgcaggcatttccttctattttgagcaagcagtggttgtttcctagagtatgatggatgtattgatatgttcaattgtttagcttgcgtatgataacacagataattgtctattattatctttgcaaatttgttgctccatgttgaaacctttagcgttgaaaactggttaccagtggatttagtaccgattgtgtatgagtcataataattctccatacagtaactgtgatgccaactgttatgatctttatgaaaaacgcttcactcgtcaactagtagcagaagtgggaatacgctttatgaaaaacgcttgtttttactacgagtcttcagtatgtttgctaggaaaattttctgtatatgcagggaattcagctagcagggtgatgccgtctttctctgctcatcatgtagcaaacccgtgagacagacatgcatcagtatctacagcaaaagcttgattccaaaccaacgatggtagactgcagtaatacaatctgacaaatcttagaacgacgacgacgatgttcgttcggcacttctatttcttctaagctcagagtgcatccttaggccatagcttctcaatgattttatgcatcagggcctcttcactttgaagccattgtcaggtaaagttgccatcagcgatgccatgccgcttcattttccgccgaatgcccacgccgccgctgccattgacgtagcttcgtgtcacgcctcgagcaaagccaggaacaatttaacgacgtggggactagatgaaggtttgctttgacacgttgcccagtcctacggacgagtgaaggagccttgctattaattcctccccatagtttggagaaatttgataattttggaggaattttcgaatatctcaagactacccaaacccgtccaataatctcggcccatttggtccggaagttaagcccatccgtattttacgcccgatctcggcccatttagtaaggaagaaaagcccatccgtaatgaaaagcctcaccttcgaaacagcgttccatcaatcatcagcattgcattaattaaagtcgcaattacacaattgccttaatataagtcgttgctgtgatggcaactataacttaacgatcgattgaatatattggtcgattaattaaagacgcaattacataatattcgccttaatataagtcgttgtgatggcaactttggaagaggaatcttaactacattgtgggacccagcggggctgaagattcctcgcaattctaatctcggccatatatattgctgcttgggccaacaaaaactggaccgcgacgtgcaggttaccattcgcggtaggtttaccagttagttttacttctcaacaaaagaattattaggcaattctattcacaggtcaactacataagtacggcgtaatttccacagtaattgtttggattgcagtaggaaaaattgttcaaaggatggcgtaactttggcgtggaattaactgaaatgctaatcaaagtattccattccaatgggtttaaaatttgaactctaaagacttgacattaaagaggagtgcaagttattagtacatgttttacggagtagttggtatttggccgatgcctttaagcaaaaaaaacacacacacacacacacatgtatgtacttcctatacggttgtgcgagtacgggtatatatatttataaacatatgtgtatgtgtgtataatttttaagttatttgtttaattaggacgttccacgtgtttgactatcaggcaagtgttgctatctgtttgaatcagctgctaactgaccggaattattatttttatataattttgactttgctagaggtgattcttcagctgtgttaggattatttacctttcacataatatcgagtatttctcagttctcacaatttggatttcagtcccatccttcaaagcaacctggttcactcacatctaagaatatccacacctggtaaaacgcttcagttgccagaggagagctgcacatcgcaaatgaaactctgcagtgccggaccgccagtgacaaaccgatagccatggccagtaagggtccatttgatttagaggaaaatcataggaattttggaggatttcaatcctatagtaaaatttcctatgaagcactttgaaacaaaggattgaatccaatccaatcctttgaaattcctatggaatagacaatcctataaagattttggaggaaatttagcaaaagcttcaatctcttggtaactttcctttgagtctatctctctcatctaattcctgtgtttttcctgcggtttaatcaaacgttcattcctgtgttttttctgtgttttgcaatcctctgttttacacttacattcctatcaaaatcctacgtttttcctattcctacgctttctcaatccgactattcaaaggggccctaaatgggagtgtgtaatgtaattaattaccttgcctgcatggcttctgacgagccgatcgatcatccagcaggaagagaagcttgactagttgagtgaaacaggagttggattgcaccgcgctgtagttctgtactgctgtgctatggtcacagcgtaggcaagaacaccttcctcgttttgcctgcacagtgtttccgaaaagtatagttttggatggtcaggcaaggaaccattgtcagttaaggttttgcagcaagtactgtttttgcttaagtcctcccacaagaacagaaacttcttcatctctgataaactgaactgaaatagtactagcacagaacgttgtagctaaaattcgtgcttaagttgttaggcatagcacacaggagacaggtaagacattacgagcagtgtaattggactaatttggtggtgatgcctttagtgtagtagttagctgtgctaccacaagttagggacttagggccatgtgggaagctcaatcatatggtcagtggctgtgactgtgaaataccaactgaaataagccagggtaatcatgtagtatcaacaatcgaggatattttttatatatcttttttgggggagggatcactagattgactacacaaaccactagacgcatgcatagtactagtaaataagatggtgaacttacttggctggctgctgattattgtgattggattaagaatttccatgccaccaataatggatcgcggtacaagtcaagagcgagtgacgcaggcctcacgttgcacttacccctccctgaccgcaagctttagctgactcagggtgatcaatcagtcgatcagatcttgatattctttttcagcaagtgatgacaaagcaggtgtaaaagaaattcccaggtctgatatcagcaaacgggagctccttttccatgtttttcaagaacctgcagtcatcggcagtggttagcgtttggcaacttgcacatggacatttgaactctcaagcaaccatcaacttcaggaatagaaggagaaaaggacgatttaagaactggtcatataaaagctacaactttattcggtcccaatgaattttaacttcattttccacaaaaaaacttgtccaatggaaatatatccaagattctcatgcctttccccctccctaccgtataggcataaagttattcactagtataagagattaggaccattatctaacagtaccgatatgtgtgtgggagatgcgaaggttgcaacaactatctccttaaaaaattttgattggtggaattaacagcgactggtgagaaagttgtagggaaaagaagcaattgaaaaggagagcaaatcacccagcttctgtgctaatgactttatggccttcatcaaatgacagttgagtctcacagcgagatattggtaccctcctccatacctcctctctcttcctcttctctgcaacatttatttgcactgcatacctatttgttttgagctgcaggacagcaagtacaagagggggtccttcccatacttcattctcctgcagaaaaaaaagagctcatgatatctagcttccaaccttccaggttcaagggctatctctgcaagaactgtgctgctatggaggacaccttggacgccggcacgcatcaacatcgaggataagtcctataagatggccatggatgatccatcttgcagttgcagattcctgttgtggttcctatgttttgtagcatgtgttctcctggagtctgctgcttctgttcattcatggtgccccttacatcctagcttgaggcaggaagcaaagtttaagcagaagacaaacaagttctgggagtaccaggaacagagtaatacctgggtggaaataagcatgcctttcaatttgatgtcctgcatcaacgatacctgcacgaaggtaggatcaatcgagcaaccggaaaggagacatggccgtgcttcaatttctagtcaggaggagaaggatgcagagatcgatgacaatgatcaagcagatagaaatgatccagtcctgcccataagaaaaaggatttccttgacgcgcatgtcagaatcatctgtgtgggtgacagggcaaagtggatcaatttatgagaggttctggaatgggctggcatgggtgattgctcctcatgaactaccaatttcagttggctatgctacagcaactttcattgtgaatacaactattcttgctctctcagaggctggaatcctctatcaggtaacttgcatctctatctgtatgacagaactatgctcatatcataactgttacaatacccttccttggtcatctttaccgttgtatgtttttcttcaactgttgaagttctgtaacagaacagtagttttatcccttcccctcccttcttttccccaacccaattccgttgttttgttgcagtaccttatattacatgtgcccaaaatttgaaattgttaagcaaagatcaatagacatgtagtcatgattaatgaagagccgataggaagtcttatgggaagagcagaggaataagaactgtatgtaaataactagggaagtagtttcctctcatgagacaataagcttctgatgaattcaattgccaaaaaaagaaagtttctattatgctagatctaatatttctacacactttcagctacagctaaatgaacatgcacaacctatctggacagaggtaatattcaactttgaacaacaattcatagtccttggagaaaaaacacaaagtcaagctatgcacataagaaatgggatagtgtcctatgatggaaggtgagactgctttctacacctgatgcttcctttctagtgcagtttgtgcatataaaaagataatttaggaaattattgttcctcccaaacaggaaacttttcctatctattacaaatggatccctagtggaggtcacagaacttcagcccctaaggtatgaagcagtattactgaagtttatattaatttgcacggctgccatatcttggtcaatattcaatgaaataactagcatatgaatacaatgttcttttactgaaaagaaaacagtaggggagagccctaccggaaaacatatgatgtcctattcaaatttgacatgataaatcagtaccgtaaagtcatgttttatgaaattttcattactattattgttgtgtgagtgcatctgatatataaagaaaacatatgaggttgaaaacaacgcatctttaataatatttagagctaagtacaaaaaagtacatgaatgtgccacatcatcataaacatcactatattagatggcaatccacatacttctcaaaaaaataatgatgccatgccacaataaagggttgaccattatatttctact

SEQ ID NO: 5592 - DNA, 52507 bp, Oryza sativa
gccccgccacatcgcccgcccgccgcgaggctgcccaggcctccgcccgccggcgcgctgccgcgaggcctccgccccgccgcgccgctgcaaggccgccggccgcccggcccatgggatgatgggggagggaaagaaggagaggagttataggagaggaggaggaggaggaggaggaagaggaagagatgggaggaggaagagataaggctagggaggaagagataaggctgcctgtctcgtactcttcaccgcacatgccgatctttagtcccggttggtattaccaaccgggaaccgggactagaaataaatttttagtcccggtttgtgttaccaaccggaactaaagataatagggatcttttttttcggttggtattaccaaccaagactaaaaatagatctttagtcccggttggtagctttaaacttttgaaccgggactaaagatatctttagttccggtttttattgcaaccgggactattgtgaattttggctgaccgaccaaagatggtttctccaccaatgaacgtaacgtctgagaaagaggagaaaaaacaaacaacccagccccatcaaacacatactagcacacaaagagaactgttaaattaagctgcataattagcgcttgatttttctagtactgtttttcttcgtacttctttcgtttcaaaatataataacataaaatcatatgagaaattttttattactatgattttggataaacaacctgtccagaactccagattcgtaggtaggaaatgtttcatttggttctaatttcttatatattttaggatgaagaaagtagtactgcgtactacgtccgttcaaaaaaacctaatcctaagtataagtctaagacattattatgttgagcttcaaattcagaattagtttttttctgagggactacgtccaaattaagcgagcactcaacatcacatcacatcaaccttggattaccctgtcctccaattcgcgcacgtgatcgatgcagattactgtcactggccgagtggcttcaataattaaatccgcttaggttatataattgtattatatgactgtatgagtcatgaacacgacaaattaaaggcttgccatcacagatgcacgtacagtaacagtgccttttcctttagtaggacacatgcacatttacttaattaatcccacgtcggacggtcggaacgggaagatcgtcaagaaggtgcacaagtttaacttgtctagcaggcaggaatgaaaacggtcgtaaacgatcggaattgatagcatctcttcgaaaatgatcctcaattaactagtaattaattatatttatcatttaaatttctcggtgtcgacattaatacgatgcagaaaaaattagaaaaaataaaatttaaaaatagctaaaaatggtacggtcaaaaagatacctcttatacggaaatgacgcttagttgatcgggaattttcgtacgcgaccatttttttttttaccgaccttcagtcatcctagtttcattgttcactatctttagctatccacttgaggataactaaagataatcctagctccatttcatattataaattattttgattttctatttaattttttaaaaaattgattaaggttataaagaatatagcaacaattttaatacaagacaaacatataaccaaaatatattcaatgttacatataacaaaactaatttagtgtcgtcgatgttgctaaatttttatatatttatcgaatctaaagtagttttaaaagaaaaaatcaaaacgatctgtaatataaaacgggggaagtatgcctctgctctagttaacacagtaggcttggtgaaatatagatggtaggtacttcctccgtcccagtaaacgtgacgttttaaggtttggaaccaaaattagctgaggtgtaaaatgaccaaattgtccccatgatttgattgagctatcatttctagcatttgttaatgcacccagattatcatttctggaagtttcctgattgctgatgaaaccacaacacagtgccacgtgttacaagaagtttacaaattggcgccttggccacactattgatacagggaaaaggcatcattaacatattcaaaaatttgaatcaaccattaagtaatctttgccgcccaggactgcctcttcatttgctagttctggcgcccaagagtgcctcttcatatgctacaaatcctgaaagggccatccatttcattccatttcatcaacctacatatccaactgaacaccactcacatccaattcaaatgatcagagatctaaatttactaccggaagaggaaggagatggaggggctttacctgatctcaatggagaagctgatatggaagaagatggaagagctgctgttatccttggagataaccttcttggagttgatggccaggaacatgaaggttttcttgatctcaacttgcatccttttgatctcaacatggaggctatagaagaagaacaaatgcaacaaggtaagatttcaatacttatcaatcatctgcgctggaccaagcacttactaacttgatggaatcaagggcttttatttgaaatggttttatggatgatttacactagcacacaccagtttcctattagttaaataaatcaatcaattccatttagtaactgtgttccattccagtttgatgatccagaatcataccataattcagatataagctggtgttgtaaggttcgaatgttacagataatgttccccggaaaagaatggtacagttagtgtacaatttgagcattttggtttctagtattatttttcctgatccttacttatataagtgatatgtaagtgcataactttaattctaagcaatgactagaaccttataagtgatccttatcagtatactagaaaattataaaatgatatgtatatgctgagtacaggcaatgacagccaaaggtatatcacaccaatgcatattccctggcctgtatgtattgctcacaatatgcatgaaacaaggccaaacagctaggatgcgacaatgcgtacgtggattataaatttacatcttcaaagactactggaaatttgctccaactgtatagattcagtttcttatgcagtgcattagagctaatactgcttttcacagatccatcatggatgatcttactttcccattgaatggaagtgctccataaatcttttgttgaatcaactttaatttttttacagtacattagttttttttttgaaatacattacattagtttttatttagcaactaacaatctttctttatacatatgcagattagttatctccaaaatgttctctcactccacactacatatttaaacaacaaaatttcaagcatgtatacatgaacaaaggtcgcattagttagtcgctgacctcttgcaatttgcattattagaccactaaccattcatgcataagcctgcatgtaaaatgcaacttgaaaacatttacaagtgtgcatgacaacatgagcagtgacatatttacaagtgtactaaccaagaagtatttgggcagacaacgtgatgcactgtgcggcgcatgtcgtgcatgggaatgcacatgtaaatgaggaacaagaagaaactgaactaggtaaaattaatgtttgaataaatgtatgcattcttattaacccagattaacttaccatgtcaaacattttttgtagatgatcatgacgcattgcaatttgagttggaagccttggaggatgatcttcgagagtacggagtgtacgccgaagttgtcaatgttgtctttgatgtagaggagttgcccgactcagatgacgatcaagaagaacatgcaaatgataatgtggcaagtaagtcaaaagatttgacaaacatacaaaggcgatgcatttatcaattgttgctttagaaaagtaaagatggaaaattagaaaaacacaccacacgtttagttgctcaagagttccatgttagcatccgtacagtccaacgtatttggaagagagcaaagatttgccatgaacagggaataacagtgaatgttgattcaaggaagcatggaaactctcgacgcaagaaggtcgaaatagacttatcagttattgcagctattccattgcatcaaaggagcactatccggtcactagcacaagcccttggtgtttccaaaagcacattacataggtggttcaaagaaggactgatacggcgtcactcaaactcgctaaagccttatttgaaggaagcaaataaaaaggaaaggctgcagtggtgtgtttctatgttggatccgcatacattgccaaacaacccaaagtttattgaaatggaaaatattatccacatagatgagaaatggttcaatgcatcaaagaaggagaagactttctacctgtatccgggtgaaaaggagccatatttcacagtgcacaacaagaacgccattgataaagtaatgttcttatcagcagttgcgaaaccaaggtatggtgatgagggtaattgcacttttgatggaaagataggcatttggccttttactaggaaggtaaaatattcttcttattacaagtgttgttgatgtacatttatttctgatattcatgggtaaacataacttatttcatatactaacaggaaccagcccaaaggagaagtcgtaatagagaaaggggaacactagtaaccaagctaataaaggttgatagagacaccataagatcattcatgatctctaaagtgctaccagctattagagcatgttggcctcgagaagatgcaagaaaaaccatatggattcagcaggataatgctagaactcatctcactatcgatgatgcacagtttggtgtggcagtagcccaaaccggacttgatattcgcctcgtgaatcaacctccaaattccccggatatgaattgtctagatcttggattctttgcttcactttagtccttaacacataataggatatctagaaacatggatgagctaatcgagaatgttcacaaggaataccgtgactacaatcctaatactcttaatagggtattccttacactacaaggctgctacattgaggtcatgagagctaacggagggaataagtacaagatccctcacatgaacaaggagaggctagaggcacttggtgttttgcctaaagcccttagttgtgatcgtgggctatatgagagagtcgtggagtctttggctaactagtggtggctattttgtgttatatatgtaaattgctaatgctatctatgtaattgtggtttggagaactaactggtgttattttgggctgtgtatgtaaacgtcatctatcactacgccatccgtaggttttggcaacaaccactatgtattttcgacagtcctcatataatatgtgttatatatgtattttcactgttcgtttcatccttaacagatacatcaatggctgactatcatataatattcctaaactataatgtcggttcaattgtgcaccaaatgcttagcatactcaactcgaaattttgcaatactgtatttacaatcaaaatctcgcagcatagactacaagaagttttttttaggtttgaggtgcaagtgacatattgagctaagtaaacaaattcaccaaagatgacacaaataaactttaaaaggtccttataattaattagttaattacacatattgatcaagcatatactgcttacagactacgcaaaagggaatgtgaaccaaacaggcttggtagtcatgctagttcttcatttttttacatatatgcagagatcaaagtggtttagccaaagcaggattccatttctctagccttgatctcatcattagtaatgcaatattactaatatgtcttactcctagaactaatactcctagatggcatatcttccatggcattatttgtgaggtatggtgaagtataggggaagtaaaatccgtaacatactttcgcgaatttcagcaaattcgtcgacgccctcatctccagcagctacaccatcgggaggcagctcagaatcgtggtcgctgccacatgcctcgtcctttgagtcagggatgacgcagccgtcgggaggcagctcggagtcgtggtcgccgccacacgcctcctcctcggaatcagggacgacgtagccgtcgggaggcagctcggagtcggggtcgccgccacacgcctcctcctcggaatcagggacgacgcagctgtcgggaggcagctgggagtcggggtcaccaccacacgcctcctcctcggaatcagggacgacacagccgtcgggaggcagctcggagtcagggtcgtcgccacacgcctcctcctcggaatcagggacgacgcagctgtcgggaggtagctcggagtcgaggccaccgccacatgcctcctcctcggagtcagggatgacgcagctgtcgggaggcagctaggagtcggggtcaccgccacacgtctcgtcctcaaagtcagggacaaagccgccgccgggaggcagctcgaagttggggacggcaccgtactcctcaccctcggagtcagggacaaaggtgccctcaggaggcagctccgactcaggatcgccgccacaaacctcatcctcggagtcaaggacaaacccgctgccaaggggcagatcggagttcggtacgccgccacttgcctcgtcatcggagtcaacgacgaagccaccgccgggatggcgctccgcatcggacatgtagccacatgcatgctgctcctcggtgaggtagtggacgccgccggcgccgagcaccctaccaccacgccgcctgcatcctcctcggcttcctccacttgcctgctgtgaatcggcatctatttccacagccctccgcttgcgtacagcccttctaccccgccgagcagttacctccacgaccgtgacggccagagaatcggcgcagccccgccgcgccattgctgacacggaccgccgaggggagaggagaggtgaggaggctagggaggtgggaggcgacggatgaggtggatcggggtgggggagattggggatcgttggggggcaggggggcgatggaggagccgaggagaggagaaattggggatcgccagattggggatcggcgcagggagggggttgcgggcgacagaggaatcgagtggtgcgtcatgcgagaggataaggtgcggaaaaaaaatcgagcggtacttagatcggagaaaaaaatcgagcagaaaaaaaaattcgccacatgcattttttttctaggtcccacctctgtagattagtcccacctctgtagattggttgaagtagtgcaggagcagcaaaacgacatgtttactgggacatggatagataggtagaacgacacgtttactgggacagaggaagtagataattttaggctagtattttatatttggaacaagagagtatagtaatttattgttggtcggtctcgcggttaatagttcgagagacctaatcatgagggtatggggtacactctgtatctactcgtgtatgttcataatgatatctcacacgctaaacctaaaacctccgaaaatactatgcgtacgatttacatgtacgatcattgtatgattgctaacatacgttaaatgttatgtgttgttttgttagaaacggccagaaaatgccatgggatttgactggtagacgttacatcgtacaagtatcgtacacaaataatcatacgtatagcagttatctaaaacctcctcccaaataaatcctgacacgaccaactaatcctcgtaagcacaacgttgcaagggatccgatcgatcgaatgacatttaatttccatggctcattgcaagagatccctgatgtctccgtcctcaggctggtcatttatcggcggttttaattggcttcaattcccaaaaactccgatcagtatctagttccacaacaattatcacgtaattatgcttaggataaggtgttttaattcatactttgagataacattaattgtatttcagtttgttaattgcacctcttggatcgacctaggaatctaagctgtcgaactctagagatcagtagaactaatttgacagattcgaagaaataaagtcatagtcgatgacatactactactgtataagaacgatgacaaagtgagaacaataataacgtactccgtaacaaaataaactaaactgtagattttaaaatttattataaaataaactacggaatactaactcctagtacttcttacatacaaccaacccgtaaaccaaaaaattttattccgtggatactttttacctacccatcaaccatttcaaattactaattaattaaattattactcattttaaattcgccatcagatggtagggtttaagtattttagacatagggatataaattgttaaccgtatgagtactaattaattagcaggctgctgcaacgattgcacgggtgtgatcgattcgagggcttcagatcatttcaccgcggcttcctgcttggagcgtgcatgcatgtgtacatgagctacatggtgactgtcatatgatggacggcatatttcgagaaacttttgacaaatgcagcttcttttcagtaccagaaacccttctaaataattctttcaaaaagaaactcttctaaagagtacagttttctcgttcagtttctttcagcatctgatttattgtacaattcggaaaataaatcagtagttagaaactgaaaacccagtttttttttctaattagagctgaaatccggttggcgacagggcatatgagtgttgtcgctttcatgttgttaattacacgcagctctgctaatcgcgattgattagatagccgaaagcgatatgtactcctcttccacgttctctagttcggcgctgtttatggaacagaatgtgaacgaatcccttggctgtattaggcggattaaactactagtactaatcaatctgattactctaatctaatctcgcctgatcgttcgtgttactgttcccctacaagttaattactagctactaatctagagttataactagtaaaacactcctaggagtggaggtggagcagtggcgcgtggagattcgtgcggtggccgacagggcgacggacagcggggcccacgggccgagggcgcccgtgcggcgtgccaggccaggctaggctttgggcgcacgtgtggggggttggacttttggcgaccccctccgtgggccgcctcgcacgccacgtggcccagccgcctctgctcctgctcctgctccgcacccgtgcgcgcgcgcaacccgacgcacccacgcgcgcgcgcgcgcacacacacacttgtggtttggtttggtttggccggcgtgggtcccactctgtctttttcctttttaaaagagaaaatgttgaaatggactcgctcctaaactggagatgaactcgaatttgcatccatttgaatataatccagattgtagattctagtatttgaatgcacatatatagcttcttcttcttcttcttcttcttcttcttcttcttcttcttcttcttcttcttcttgattgaggcgaaaacatgtattatcaaaatttggtaacttaagtagcaataaaattcgctcctaatttagattggagccaaacatgggagtgcccatgctctagttcgttacattttagaaatttattcactgtactagtattaaaaattggcttcatattaatagcaaatcaaatagtaggcgctagctaactttgttctaccaaattatttatcgtatcaaaatttgtctacatatttgcaccaaaaaaaattggtagggcaacagattttaggttgcattcgtttcgaaaaaaataaatccgtcgtttttcgcgtgctcgctttacgaactacttcctccatccaataaaaaataaatcatgactggatatgacatattctactgcaatgaacctggacaaatatctatccatattagttttactatgatgtgttacattttgtactaggttggtttttcatgggacgaagagagtactaaagagtcggggtatgtttttttcttaaagaagaattcatataggagagttgttttctcctactctctaacataaccttaatagtttcttcttcctttctactccctccgtcccataatataagatattttgagtttttgcttgcactgtttgaacactcgtcttatttaaaaaatttatgcaaatataaaaacacaaagttgtgcttaaagtactttggataataaaataagtcaaaaaaataaataataatttcaaaaaattttgaataagacgagtggtcaaacagtgcaaataaaaacttaaaatctcttatattatgggacggagggagtagttctactcctagtacgtacgtactacaatttgctggttggtcaccatagtcaagatccaggatcacctcaactaaatacgtatcgagtatatatttgtttgaatcgcccactaattaagcacgtatgcatgtaactaactaactaaccaaccagaaaacttgatattctagcatcgatcatcagtagctttcactcgagtcacaaaagggagagaaagttcagtaccatcgctcctccattccacgagcgaaagcgacggtggattcacagaatcctctccccagattacacaactcgatcgagtgcatgcatgtacacatgaactactactacacgagactgcgagtgagtgagtgatacacgaaccaaacatttcaacatcaaaggtcttcacgccacataaaacaaaatcaaagccagacgagaccttggaatatgaaccgtgaaaaatgggacgggaagagtagataacagtttaagttaggagtaacttggaatgttgcgacggggcgcgtggccactgtcattcgaatctgtccttgatagagtagtatgagtagtatattagttggacagggacggattataattaggcaggtgcatgcgatatggtacgagacaaaatctgcagttaatctgtctgcgatgttgatgcccttgttgttgttgttgttgataggagtagtatagtcagtagtgtgtaatgaatgatcgtccggtcaaaaaggttgctgtgttagtcggcgcatatgcaggcgcggacagtgagttgagttgagctggtttagctaaaaaggctatctccgctaattcagattaattagctagagctgcaccactagatctgtttagttatttagcggacgtgtctattgttttgtagttgctcactcacgtattagcttttggcagagtttatgttggacgcgcgatcatgtcgccggaacagaacaagatccggcaccggccagccgccgtgagcacactagagctaagttttatttttatactctatccgtccctaaatatttaatgtcgttgattttttaaagcatatttaactgttcgttttatttaaaaaacttttatgaatattattaaaaactagagtagtagtagtatatttaaccatgaattagatgatagaaaaataattaataattacttaattttttaataagacaaacggtcaaatatgtttacgggacggagggagtttttttagggggtctttttcgcgagcagatgtgaggtagcgtggccaccgccggtgccaatacggcaagaagagagagagaggatgacacgtggttctttttcattgtttttctttttcattttggtctgtcatttcactaagcatgtcatctcaaattttaattatgtgataacctattgcagtgtgtaagcattgagatttcacatgaatattttctccgtgtcctaatatgtacatatatcctccgaaaaaagggattgcttaattatcacatcatatttttcgcttgattttgtatgcgattgtgctctctcctatagtaagtatgcttttatctcttgtatatcctcctttaagaaataaattacttctaatcctaatcctcttatacattatgcattagaaaaattacaatgtgagtattgaaacttataatgtaattataacactgtaagttttgaaatttacaatgcaattatactataaatgtatgtaacttacagtgtaaaaacgatttgactatttttgtgaaaacattatggtaccacaataagctataaaaaaacaaatcatgtctttgaacatgaaaaaatactagtccaaatgcatgaattgtttttttaacggagagaggacagcctacctattcatgggtggaacagcattatgggaccaaggtgatacttatggctctctacttatctattggaggttgcaaagaatttgctacccagtgcttagagtaacacttatgttgctagtttgaggttatctttacagaattatagacagtatcatatgaacatatcattattttacaaattggatggatgcggaggagtagacacagtagaatgtacgccacttaaaacaaagccaaatagcagaactatcaaacatgggaaaaaacaggggaacaggccaggagagatcagggacgattcagatcacaaaatagttagtacctagtcaattacctagcctaactaacggaagaatgtgcacacaccacatgatctagctgaacaacaacaagaacaaaagaactgcagagagaatctctgcatgatggatccatggtcctgcagctcatgatctgttctcacataggtagatgcatgcactcattaatctattactcctaattcccatagtcgggttagtttaataatcaatgtagtatcactagctaatttttgttggttaatttatgggctccaaaggctttgcctctcgtgcacacagtcatcaggtcagatgtatggaaaaccctaacccaatccattttgttaattaagctagctcccagtactgtattatagtatgtacctgcctccactaagctccaatagttgcatttccaaggacctcccaaacttccataactaacagttttgtttagtgactaggcagtgttgatgtccaattaaggattattcatgtagaggaggcagtacaaccaaagctctgagcattggagaagtgattgtactactgctgccaaataggcaaatgttatggtacatgtaccaaacaaagtttactagtagcagaacaatgcaaagtgtgccgtggggctttggattctttgcctccgtcctctgttaattttacaatggcattctgttttgaatcaggctctttgttgtagattgtctgcatgctcctttttaacggtcacattgatagtatatcctccctgcgtttttttttaaatataggatgctgttatttttttttaacgtgatgtttgactatttatgttactcaaaaaatttatataaatatcacttattttgttatgactttttactatcaaacaaactcttactttaacttatatttacactaaacctttaaataagatggatgatcaaatgttataaaaaaacataacagtgtcaccatattaaaaaacacagaggtagtatctcgataatcttgaactaacattgtcctatggtctgtatatgtgtggaaaggcaaaatatgatattcttctgaccgtccccctaattttttgttcaacatacatcggacgctagcttttgtgtgcttattacataatttaaactttatttatttatggcaaataatggttatgtttgataggtagactatgaaatcttgaaactaatttgctactctcacttaactcgtttaatttgtggctccatatatatagctaggattatctttttaagtcactcgataatgaccatcatccctcactgtacaccttgcgtctgtggcgcttctcacatgtgtatagtgatcgttgtcgactcgtttaattatttactttcatgccttcttttatcatattaatctatttagctttataaactgctaaacgatatattttttaaaaaaattaaaaatcatattaatttatttttagtttttagctaatatttaattaatcccacactaatgacctaatctatcttgttttccatgcggagagaataattaagttcctgaatgcacccttaatgttgagttctttgttgaggttactaactcaacttgcatgttttttcggcatgcacgctttgcttttatttttgaaatccatataaaagttccttaaaaaattatactccgtattaatctattttttttaaaaaaatagttaataattaattaatcatgtactaataagtcactccgttttacatgggcgagacattggttaccaacaccaagcaacgaactgagcctaaaagtcgtctttgtaatccattccctttccatttataacgaggctaggcacatgaacacacaggataccttcagtcaaatccttcaccatatgcaactgaccgagtacgtaccaatgtaccacccgccgcgtttttacttagagaaagtataatagtgagttataaatctactataagcttatgtggagaagagaggtatacagaagagaaggatgttggctctcatgtaagagctagcttaacacaagctccaagacaaatacattaaatgtataagtgagagatagagataggagaagaaaattatagctaatcttatagctaatttattatatgtgttaactttaggataggctaatagtaagaagtgggctatattattaatgtaggagtagtagtacgtcaaaaatccaaagatcaatgaggcagcaatcgagggggagggagagagagagagcaatgcacagatgttgagacccctcgtgtgagaaattaaccggcggcttaattagctacgactcgtatagctgttggactgcacggtctttgagcgtgtgtggacaagcgcgcgctcggcgggcgagacaacatggccggccggtgtacagtactaacactaatagccccgtttgagttcactgtgttaagatgaatattttgtacggttacatgaaacgagaaagatattagcgtatgattaatcgagtttaagtaattttagtttttttttaaagaatatatttttttataatttaaaacagcttctctacgtagtaggtttctgtatggaacatactccctccattctaaattgatctatatattttataggtacaccaagaccaagaaaagctaataactatcccatactatatttactctagcaacaaactcgatgtatgcaccattcccacaatttcctagccaatagcaaatcaagatattgcatgtgagttataaatacttgtgtgcatggatgcatacatcaatgtccatttactccaatgcacagataacgaatagactgaatgaacacaaatatgtagatcatttaggaataacctcaaaaaaaactatatgtatatcaatttggaatggagggagtaccatttagtagtttgaaaaacttgctaataaaaatatagataaaatgtgtatcttagagatgatgatgtcgtagaggtgagccaactcatacaccatctcaaggcagccaccctattgcgacatgaacctgatcgctgtgcgcactagccagccagccaacgagagctcagcgacacctgaacagtacaattggagagtcgaaagctagagaggagggccgagaaggagccgatagcataagcgtgggcgaggtgacatgttgctatgtctggctcgttgagctactggaggaaaaatatgggcgagaaactcaagaaagcgcatttggatttaccacttcttccatcgtttgcttaatgggctgataagccgtgaaaaaaataaacaaatcaacaaaaagttatttatgggtaaagcttttacttgtgccattagtgatttaaaagtcaaaaatgaaataaataaataaattatgatgaaaaacctcgtaaggcacacatgaccatgcgttagtgcacatggtacaactgggccagctatctgaacctgggccggaccaagcccaacacgacaattagcatgtttgctcacgcagcaaagcattttaaacagtgcaagaatcagtaggaatcagttcgtttagcatgctgttatccattcaaagctgcaaaacaacagcccaaataaatgcacagatcaaactattcaagcccattgcagactaacagtgcagtctaataagatccaaatgaaaaacagatagaagaaggcacttatgtccattttgacattccctagatagatcatagactgataatctagcgtctgctgcgaacaaagacgcacaaagcctaacaatgtcgcattacagcttgtgattattgagtagcaacaaccagtttcagttttcagagatcaatcccaacgaacagcaaagctgcgccacagcaacagctacttcttgcattgctcacagactcagcagaagaacatggactgcctgacgtccgggtgcaggcgcgggagctccggcaccggccgcggcggcgcgccgccgtcaccgctgccctccgacgccgcgtcgtcgagtctcacgaactgcgacacctgcgccgccgccaggtgcgcgtagcagatcggagcgactgaaaagaacaaaaggaatgacatgtcaggtgaaactactgaacttttgatttttcagagtgacagaaaaatcgactggtctaatttgtctgtgtttagatcaaatttaccacctgagatggccgtcgtgctcctctggtacctgaggcagagttcacaagcatcacaaagttgattagaatttcagaacagacgaacgaaatgcagtcgaatgatcaccagagattactgaattttttttcttctttttctgtgcggtttcagagtttcagtgtggcttacacgtatgagaggttgtgcacaagctcctgcaagtcatcaggggtgaaattgttctcatcatgcagcacatggtaatgcgtcggccttgtagtcccctgtcaaatataaagacaatctgattagagcacaaattgcaattgtgtagcaagtgtgttcaaatttttatcccaaatatagcaaactaagacatgtataacttttatcactaaactactcatactctctacctccctccctctctctccttaccctctttttagtacctatgtcatctctaaaaattactaaattttgggacagagagtagtacatgtacatttgtttgagatgtagttgggaaaaaaatagagtgaattttgcaaactatatactttgatcaaattatcgtaaaactacaaatttaagccggtatatcacaaaactaatttagcaaaaaataccacggaactacaaatttaagatgaagtatcacaaaactatagattttgtatcaaaattatatgaaaaaaaaacactacatgtttagcacaatttaatcataaaactaccacattgatagcttcagcataacatcagtgctaaggatttaaactctaaaatagttttttacaatatatagttatgtgataactttaagattaaatctatagtttttacaacatatagttatgtgataactttagaaataaatctgtagtttttacgatgctcagtcttaagtctatagtttgtgataaattaggtctaaatctgtagatttgtggtataacgccttaaatctttagttttgtgatagtttgatcaaatatgcaagttttgtgaaatttactcaaaagaatatcacatttgtccgaatgacatgtggatctgagagttacacgtgtccagtggcgcgtatgtggtaattttctcgattatgtaatctttccaatggtactaagccaactggaattcatatttaagatagggcacttacaatcatcccagcatgagcacacatgtagaaatcacagttcctgggatgacagattcctttgtcaacaacagtacctacaaaacaacggcacatcttcaagagtgaggagaaaaatgttgatggtacctgaccagaataggattaagagaggatcctgaaaaaaaagtgagatgaaggatgtaattgttaccaggaggaacattgacaactttgttcgatcgatctgtctgaaaaaatttggtgtgatggttcttctgcgcaactatcaccgtgaactttggagaccattcactgtcatttttctcattggcaagaaactcgcatgcctaaatcgattcgaaatacatgagtatcaactaaaatatgcagaagatagatgttcattgtatcaaaagcacaggggctgagcagtaaatgcagactgtgcagatcgggcatgtttaccttgattatctgggctagctcaatgttcagcacctgattaaactggccttcactaaccccatctctaaaattaagatggcaaaactagttagaaaacaatagtaccgagataacaaagtagtaaaacttactgtcagacaattccaccaagactgaattagagtggttttgtgaaatttactcttgtttaacgtaagagacaggtccagaaaaatttcagtataaattagaagttgcaaacatatatttcagaagaacaaccaacctgaaaatgattttttttttctggcttgtgtccgcgagaactgttgtagaagtccattagtgactccctgtggtaaacaattccgattcttagcaagcaaaactattacggaacaatagtggcagtctgcaagatatacctcaaactattcgaaatgaaccgaattgaatgtcatagaagcatctcacctaatgataacatgatcctcattccccactagcttaaacaaggaatcgatcatttctagcctgggagactgggtgcatacggaggctttatattttgatatgagaggccactccagggaactaacaacctagataagaacagaaaacactgtagcacatcagctaattgtcagctgcaagaaccatccagatgtcactgagcttcatatgctgatactttcagaagtagagaaacataagtaagagaggttttacggtgtttgcattccaaaaagggtaaagatccaacgctcctcaatcacaggtaccatgttaaaagtatttaagtattgatataggtacttaggtactaagggtaaaaacataattttgctagtagagagaaaagggtagaattgtctcccaaattataaaaggtaccgcataggtataacggtacgtattaacaccgtaaaacctctttgcactgtttaatttcctgttttgcgtggtttattgtagatttacgttgtattggagttaagtcgtttactgcgtcactaaggtttaattttttgatttgcgtggtttcttgtagatttacgttggatttgagtctagatttacattgtgttcttacaacacattattgacccaattatgtgattttttttctacatttacattttattccaacaaatacgtaaaaactcctaccttaattatgttgaaaattacattttatttccagcaagagatttatatcgtcgaccagacaatctagtctcctattcaaccctcaaccatacctacacttttccctctgtctctttccggtgaaacgttcaaaccctagaacaagaacaaagcagggaaagaagacgatgcgatctggaaaagaagacaatgcgatctggtatagatcgattggatatccgtgattttcttttttttttgatggcataccgatcgatggatattagatttactcttttttctgatggcataccgatcgatggatgttagtattcaattaaagtataatggccatattttacaagttaattacaccactgccatcatgttacaataaatttgttctgtaccttacccctctcttgatcaacggtgcacgttgttccacctccaggtacgtaaaacatctccataagtaagcaagatcatagcatacgggggaaacttaccgcagcgacagacggtacatcatcccgtcccggtgagccatgggaaacatccatgcctaagataatggttggagtcttcgacaagagaggaatggcttggtttctttcaatttgcagcagcgaattcaaccctccaagctgattgaaaacacagaaaaacaacataaaattcacaacaggtggcaacaagaaactgtgtaattttgttttctgatcacgtctgcagtgcagattacctttgcatttatctttagaagcacattagtcaggtactgatcgttgatcttggtaggagccaagcattgtgttacaataccgtatttgacgagacacatacgcttccatggtcctgaaaataaacaagaaaataaatgatccttgatgatagaggcatggtaagctcatttacagggttaaaaagttaagtggagcaaaccatagatgtcacagttcttcctctcagggagaacacacaacacaaaagagggcttgtcgccagacaacaactgctgaaacatgtcattcacccttgtttccgcacgctcgcgtcccatgtgagatctctcttgaaacacatgatcttcaggatctactggctgcaagccaaactagttgagcgataccggaatctgcagaaaaggcacaagattgggtggaggatgaacttacaagtcccttcaagttcccacaatggatgagacgctgagcaagatgatgggcattgcactgcgcagaaaaattgacaactacccatctctgcactctcttgggctgaatgagcctctagaggaagagaattggcaacattatcgacaatgaacatgatgatgaatagtaggtacggtatacaaatggagtgcaactaagcgacgtactcacatttttattgaagttccacctcccattgcgcgcaaaaatatcttcgccatctccagatttcagcttaacaatgtaagatttgattagatcaacaatgcttcctacatcatcagttcatcaagaaaagtttctgaaaggcagcagtggatagttatgaccaacctttggtgccggaaggactctagcagcaacctgggtaaattcttgagctatagaaatgccacactccctcagcattggcacagagttataatcactgtccctcaacacctgccacagatggtgaatttttgacaatcatggatacgggataccatcagctgagctgaatttagggtattaagcattgcaacttacaccagacaagacaaacatcctctcttgaggattctgccttgatctctcaaccaacgtggaccgctgtaacgtcgacaaagcctttttgtacctttgcaatggcaccaaatggcaaagctggtagaacattttccacacagttaatgacatgaacaataaaaacagctatagagatttgtaccaaaaaaatgtttcagagaaagtaagacatacctccaatgggatatatgttggccgctttggcttcccaacatttagacagggaaagtgagcagatcccttcaaatctattttccaattcttcctgtagtattcaaagactgtcacttcttccactgtatccgagccaccgttgccattttttctctttatttggaacctggatcaggaaagaaaaactagaataaggtcgaggcgcgtttgcagctcagaaatggaattcaggaatatggcctcacgtctgcgaatagcaagtgtcttcagacaaaccgatgatcctaaattcagagccggtgtgagtcgtttttatcctcaggttcttcagtgcacacttggccttaaaaagaaaaaaaaaacaagcaaagaacatggaaactatgtgatctaatgaacgttcactggttatccctctttcaggactagtacattttgttagaatttcaatggttactctcattgagaagaggatggcactcgagatggggcgattttctggttttcttcattcactaaacacaaaagccatacctgtccaagggaggttggatacatatatatatagccatagctggctgctagcctattgctgcaccctcctagtctaaaattcaaaatttgaatgggatgctgtcctagagggcatccaaactgaataaagcataaaggaggcataaaggagatgctaactgctgctgtcctactaaccgcaactgtcctagcaactgaaaaatattctaaagggtagatgctgtcctgaaaaaggtgaaactacccaaaaagcaataagaagaatcacgaccaaggaccacaaagacttatccaacattctccccctaagtcttgtgcgtcgtcttgtgggaaagttgggccatcccgatcctggagcagagctcgaggaacttgatcctcccaagaggcttggtgagcaagtccgcaagctggtccttggtgttgatgtagctcgcattgatgctccattcctccaagtagcttcggatgaagtggtacctcacccggatgtgcttggtccgttcgtgaaaaacggggttctttgccagggctagagcggacttgctatccaccctgagctccacctttccagtgtctctgccgaggagatcactaagcagtcgagcaagccagagcgcctgggtcgaagcggcggaggccgccatgtactcggcctcgcagctggacagggccaccacctgctgcttgactgactgccagctaacgaggcacttgccgaggaagaagagaatcccgctcgtgctcttgctggtgtcgatgtcaccggcgtggtcgctgtcgctgtacccgacgaagtgtgccttgccaggacacttcgggtagtagagaccgtggtcgagagtccccgcaacgtagcggatgatcctcttcacagcctgctggtgctccgtcgttggtcgctgcatgaaccgactgacgtagccgacggagaaggccaagtccggccgtgtgtgggtgaggtagcgaaggctccccacaagacgtcggtactgtgtagcatccacctcctccgccgtgctgtcgcggctcagcttcagtctctcctccatcggagtgagagctgggttgcaatcggtgagcccagccagctcaacgacgcgcttggcgtaggcggtctgtcgaagcgtgatcccggagttgtcctggtgcacttcaatccccaggtagaaggagagaggccccagatcactcatttggaaggtggccttcatctcctccttgaacgccgcgacctccgcatccttggtgccggtgatcaccaagtcgtcgacgtagacacccaccagcaaggcatttcctccattgccccgccggtagatggccgcctcgtgcgggctttgctcgaagcccatccccttgagcgtagaatccaacttggcattccacgccctcgatgcctgccgcaagccgtagagggccttgtgcaggcgtagcaccttgccctccttgccggggatcacaaatcccggcggctggtgcacgtagacctcctccttcaagtcgccgtttagaaacgccgacttgacgtccatgtgatggacgccccagccttcctgagcagccagcgcaagaaggagtcgcacggactccatccgtgccacgggagcgaaggcatcgtcgtagtcgatcccctcctgctgcacgaaaccgcgtgccaccaagcgagccttgtgcttgacgatggctccggcttcatccctcttcagcttgaacacccacttaagggtgatcgcgcggtgaccacgagggaggtcagcaagctcccaggtgcggttctcctgaaccgcgtccatctccgactgcatcgcggcacgccatgccgcgtgtttctcggcctctgcaaaagaccgaggctcaccgtcatcgcacgcaaggtgcaactgcgcctctaggtcgcgaggcaccagtcccggcaccggctggtcgccgagaagatcctccatcgtacggtaccatagctgctcgccgtcgtggtacacgtcgatgcgctccccgtcgtgggagagcggagtagcgaactccaccgggctgcgctcaacacgagctggcgtcggagtagacgtgcttggaggagtggctgttggtgctggagcatgtggagtcgacgaagagctcgtcgtagtcgaagtcgtggcccgagggtgtgttggtgttggagtcggtggagatttgggggctggggtagacacgctaggtgaagaagagctgcctactcccccagctccctcgaagtggacgtactcgacggtgaagtcgtcgtacgtcggagtcgaaccatcgtccaccgccttgtcccatacccaccctcgcccttcatcaaacacaacgtcgcgcgcagtgcgcacacgctgtgtctccgggtcgaggatgcggtaggccttcgagccctccgcgtagccgatgaacacccctggggtgctcctgtcgtcgagcttgccgatgtggccaagctccttggcgaacgcgaggcagccgaagacccgcaggtgggagaccgccggcttgcgcccatgccaagcctcgtacggtgtcctgccatcgagggccttggtaggcgagcggttgaggatgtaggcggccgtcaccaccgcctccccccagaagatggccggcatccccctctgcttgaggagggcccgagccatccccacaaccgtctggttgcgccgctcgacgacgtcgttctgttgcgggctgtaaggcgtggtgtagtgtcgctgaatgccctcatcagcgcagtacgacgcgaattcagccgctgtgaattcaccgccgttgtcggtgcgcagcacgtgcagcttgcggccgcactctgcctctgcagcagcctgcgcatgcctgatggcgtccgcagcctctcccttgctgccgaggaccatcacccacatgtagcaggagaggtcgtcgacgagcagtaggaagtaacgtcgtcctcctggtgtggccggtgtcactgggccacacaagtccccgtgcacgagctcgagccgctccttggctcggaagctcgtctgctggggaaaggggagccgccgctgcttcgtcaccacgcagacgtcacagagctgctccacgtggtcaaggcacggcatgcctcgcaccatctccttggcactgagctgcttcagggcctcgaagtggaggtgcctgaagcgctcgtgccactgccacgcctcgtcatcccgacgagcggcgaggcaaactggttgtgcgacctgcgcgctgaggatgtagagtcgattagtgcctctggttaccttggcaagaaggcgacgacggcgatcccaaatcctcatgagtccgtcctcgaccaacacgcgtgagccgttctcatccagctgtcccaagctgatgatagaattcctcaacgcggggatgtagtagactccggtgagcagcctgtgctcaccggacttggcggtgaaggtgacggagccaacacccttgatctccacgccagaggcgtccccgaacttgacggagcctcggacgctggagtcgaactcggtgaagaactcccgtcggctggtcatgtgatgggtggcgccggtgtcgaggtaccacccatcagccttgtcgttgctggagccgttgcagagggagacgagtaccttcggctcatcaaggtggaggaaagccgctgcggccggtgccgctggaggtagctcgatgcttgcgtgagccaggagcagagccggctcttcctccacccgtgcgacgtgggcctggccacgtcgtggctgtcgacagtctttggcccaatggccaagcttgccacagttgcggcaggcgtcgtctcgtgccggcttgtggttgccggtggcaacgccctgggcgcctctgcgggcgccaccctcggcacgtcttcgcgcccaccgtagctggacacctccctgtgccttgcgcggcttacggccgcctatcggggaagatgactcccccttcctcccgtcaccttgagaggcctcccactgttcccgagtgagatggagcttcccgccgatggtgatgggccccgagagaggctgtggctcatcaccatcgacgaccttgaggcgacttaacgcctcctcgatcgacatcgtggagaggtccagcagagattcgatcgagcgagcgatctgcctgtacttctcagggacgcaacggaagagcttctcgacagctctctcctcgtcgtaggtgtcgtcgccgtactgcaccattttctgcaagagagtgttgagacggagagcaaagtcatcaacatcctcacctggcttgaaggccaggttctcccactccttgcggagtgcctgcagtgtggacttgcgggcgcggtcgctgccgatgcgtgccgcagcgatggcgtcccaggcctccttggcagtccgcttctgggaaagcgagaactgcatctcgggcgggactgcagcgatgagggcatccagtgctcgccgatcctcgtcgtagtcgacgtcaccgtaccggactgcctcccacatatgccgcacctagagcctcaccctcatcaccgcggcccactcgatgtagttggttttggtgagggtaggccacccaccgccgggaccaaagtccctgaccactgtctggacgccgtggtgaccatggtgccggtcaggggagagagagccgtgctgcctgcgagggccacgtgcgggctccgggctgccgccggcacgcccgagcccgtctgggttcccgtcggcgggcgcgcggtcccttgggccgccgccgccgccgtggaggtgggctgctgcccaccgctctgctcgctcccgtgcccttgctcttgccagctcctcaagctccctgtcggcggtgatgtcgccggcgatggagccgttgatgctgctgcgcaaggtctcaacctctacctccgccgcacgtgccgcatctttcgccgcctccgcctccgccctggctgctgccaactccgctgccgccagtctggccgccctcgctgctgctgcagcggtctgagccgttgctcacctgcgctcttctgctgcggcgagctctgcgtcctgctgacgccgagtgctcgaggcgaccgaacgccgagaccgagcgtcggacatggcgcacctccggggggctgctgcgtggagagggggaagggaaaggggaaggaggagcaaccggtgctgctgctgctgctggctgagagctcaaccgagcttgagaaggggtggaacaagagatgtttagcctacaggaaagtgtggctctaataccagatgttagaatttcaatggttactctcattgagaagaggatggcactcaagatggggcgattttctggttttcttcattcactaaacacaaaagccatacctgcccgagggaggttggatacatatatatatagccatagctggctgctagcctattgctgcaccctcctagtctaaaattcgaaatttgaatgggatgctgtcctagagggcatccaaactgaataaagcataaaggaggcataaaggagatgctaactgctgctgtcctactaaccgcagttgtcctagcaactgaaaaatatgctgaagggtagatgctgtcctggaaaaggtaaaactacccaaaaagcaaaaaagaagaatcacgaccaaggaccacaaagacttatccaacacatttgataattatgaaaaaaaaacatgatcaataacaacgcttttgatttacctttccccagtcaatttcatgagggttcttgatattctggttgaagagaagaaactctatgacaggtccaggtctgacgatcatcgtcgtggatacatctgcacaaaatcagataatgttctgcatttaatatcactttgtcacatgttgtttactttgctaaggatctgatgataggtgatctcatgcaaaaattaaacatgtagatgatgaacataccaacattcagtgacaggccactgtcagtgggtcgaaagctggagtgaaatccccgacaagagattttctcccgtcctcctttcggtaccccagttttcatccagccgtccattgctgaggggtacgatgggcatgaggctgtatcgcgtgcgctatccatagaccatctcaggttttgggcgacctcatcctgaagcgccatagccatcccacggccaagcaggcatcaagggttaccgacccgctcgaccggaagcgccgccgcggcaggtgcacgggctaccgccggtggacgttgccgccgccgcagtaggggcacgtcgccaacgccgccccccgcgcccgtcgcggccgccgctgcaggtgctcgtcgcccctgccgccgactcctgtgatttcatcgctctcgtagaggtagactgttgtgatttgactgtgccgatttttgtttgaccggatttgagtactgagaatgaattgtgaaattttctttataggcaaactctttatgggtgagaggagtatcgtacgattactgctatgagattcaagactgaggatgacggcttcaagttataggctattacattttgcaatcatgtctctaagttgttttgtcattcctacaatttcaggaaagtagaagaagatgtgtgagatggataagaagtagaagcagccctttgctatgcactttacatagttttgtcatgctcttggtcgtaatgaatacattggactgtaataaatcttgatgtgctttcctgtagtatgatggatgtactactattttgagttgtgctcgcatggttgaattttgatgtgttttactgtatgtgaacatggtgtatgcgaatctgaaaattatgtgttaaattatgtgttttggtgctggtgcgttctggaaatgaagatatgtttgatgtattgcaatttggtgcgctaaattgtttactgtatgtgagtatgaagttgtgctagcaaatttggtaattgagccaatattgcttgatatgcttgagactgacagccggatggttctaatttatttgagatttgagaaaaaaaattgcattcataacaatacagttcgtacataaattattcaacactggtacatatactccaagatattgtacataagaattgcaataacaactagggaacccatgaaccaacttttaacatggtctgcctctttttttagctttgtaatttttttcttatatgttgcttcacaagccaaaatcttggcagccatttcaaattcaagtttcattttgtcttcctcaacttttgctctatctggaccattcgtactgccgcctggttggatttgttgtgctagcatggtccagcgcaagccaaagcttctcgaatgccaagcaggggccgccgtcgccgccgccgcgcaggggccgccgtcgccgccgtgccttcatcgtggccgccgccgccgccgccgcgcaggggctgccgtcaccgccgtgccttcaacgaggccttcagcgtggccgccgccgcccccgccgcgcacgggccaccgccgcgccgtccagatcgggagaaagggtagggttttgctagtcaagaagtatatgccgcacttctccaaactatccaccgatccaaacttcatttcaaacgcgaaaatacgattatacccttccacccttgctcaatcgcacaggccacaccatgaccaagccggtaccccgaggtaccaactaatcttgaccgttcgatctatcatcatcaacgattgggatttcagtacctcgcggtactagtaccttgcggtaaaaaagaaggaccggagcaattctcatttaaaaaatccattgaatccggttcaaaaattcccacataagtaaaaaaaaataaatgtcgaattcattctggtattgaatatttgcatacttcgtaactttgagcactacattcagtttttttttcccgatggtgtggatgtaggactagaccggatgtaggactagaccacccaagtttaagacctcgttgaggagagttttttattttattttatttacaaaagcattgctgaatcactgaaacatggtgaattctaacaagcaaggccttgcaacgagaggatcaagaacttactgcttagcagagtgctgcctgagcgtgatgtcaagaaccctaagagcctccatcgagttctctgtctcctgccctcttagcacctcggcaatggcgctcatggggtccttcgccgcgaaggagatctccaccatgaacttcttcaccgccatcggccgcttcatcctcttcctgtcactccccccagggcttccatcgtctcctccggagctccgcctcgtcgtcgtcctgcacacagcaaaaaaaccaaagaaatggtgctcaccaccttgacaatttttttttagatacaggaaaatggttacatctccggcctctgccaacagacgtcaccacctggacatagcaacagttacatatccatagtttacttggcttatcagccgtgaacaaaatttaatttatgaaacttaatttcaaagttgattttgagggttcttttgtcgtagtttagttttggttgatttgttcatttttaaacggcttatcaagtatcaacccataattattattattatttatttttcaagcgctttgtgatcgatactaccttccagatgaggaggcgtcctccatgacgacgacgaactggtgcttcgtctgcagcagagctccggcggtgaagaggcccttctcgccgttgtaggcgaactccctgccggcgagctccgacgcataggtctcctgcagcttgtcgacgactcgccggcacacgcctttcgcctccacggggccgccgtcctcgtacttcacctccacctgcagccatggacacacaacaacacacatgaaatgcaaggattcagacatggaatttcagatgcagaaatgaccaagatagcaatgaagaagaaaaaaattgcggggattgtgttggtgtacgtggtaatggtagaagtggccgtccattcgccggacagagactctgaagtggttcgtcaaaagctgtatcgactgccctctcgtgccaaaccctttcctcgacattggaagcttcttgggtggcttggccatggccgaaggttcgccctcgtcaccatgagactccatccaagctcagctcaacttgtaactgcagaccaaaaaaaaaaagaagagaaaaaggaaagattgcacgatgatttgatggatgggattgggaaaataaccaaacaaactgaagtttcctaaagttaagaccaggtcaatgaatagattatggtgatcaggactagcatacataaagattaaaatcgatagatatagccgcgatcctggaaccaaaacggtgaactatgtatacagaaatgaagaatcaaaacagtacattttggaaaaagcaattcgagactatatatatttcgacagcctatatataagcaatgagggtccacgaggatgatagattaggaaacttgtatatagacaggcgactccagaaagctatccttttcacatttggaaaatagccttatttgcacaaaagtgtagtattggtaagttgtaaataaaaaagttatattttctcgatgacatcaaataaaagtcaagtttgacacacatcaataacgaaaagtaaatcattctttattattaaaaaaagaggaatataagtgagttggcccgcatataaagggctacctacttaaatggcttataaggatttaacggttaacccacttacacggttacaccttgtcctaccgtacgtacggctatactcctaacatcactcctccttgcacccgcatatgagtataggccctaaaagcctcctcctaaaacttttttaaaaaaagtcatgagcatcacgatgtcgttggcgcacaaaccttcatacacaacctaaactgtgaaagtaatcctctttagaaaaaaaaagttgatggatggttaccaaataaaaaaaactgcaatattcaaatgtgaaataaaacagtgattctacaatccttggtaaaatgagaatcatcatgagttgttaaaaaactatatccatcccaaaatatagtaatttctagctacgtatttggacatgtgtctagatacatatcatttggataatggtctgtccaaatacatagctaaaaaattactatattttgagataaagatagtttgctacaaaatgtggaattcccatacatctttgaggacttggaaaaaaaactctgaagtctaaagagaagaagcaaacagtggcgttttatcctaagtggagctgtggaggtgatgatgcaaaaccccaaccaaagttaatattgcagcacacggaagatgtggtttttgtctctgtgtttcatatagatgcacatctcttctttatttaaccgatatcaaagttgctaaatggtgcatggtgcccccattttcttgtttttaccaaccgatcgaaagaaagatcaaaatagcaaaattcaggaattaaaaagaacccaaccgtccttacagagcaaaaaaccgcagatcaaaccctggccaaaaaagaactctgcaacaacatcaaagatcagcaaaggtaactgcaccgaaacgaactaaagcagagagatcgacgaactctgacgatgaaactgtgaagagacagaaatgagatggacgagattgaagaggggaatcagagagcacaaaatcggtaggctagtgagatgccaatgcaactcaaccaagacaaggtagcagcaggagagagaggaagaagcagcttttcaactcaaaacatataacatatatagaagaaaaatgaggagaacgagaataagattggcaattcatatggtatatcttttgagatatattaggatacaaagaaccaatattcactgtacatctctcttttgtacacgcttcaaagaagaaagaagaagagaaggaggcatctcaccttggtgtggccggactccagagagaggactgttctggcagtgcaaaacccccttcgtcttcagcaggaagaagcgaagaaggaagcttaaaaggacacggcagagcagagcaaaaacccactttgtttgctttttaaatgatttgacctcaaatgtttagcgaatcaccaagagcctactactgttactgtattaataattaatcagtttaaagactatccaaataatccaacattcaatgcaccaaaacattttttttttactatctttctttcctttttctccatcctcttgtagcaaatgagttaacatatacggaagataataagctatagttgtattctatttaatcctaccaacaaatgaattaacgtatacaatagttttttctccatcctcctatagcaaatgagttaacatatacgatcgataataagctatagctgtatcctatttaatcctaccagcaaatgagtttacgtatacaatagataagatatggttatattctatttaatcctaccttagagcatgtcttgctcttttagcttctaatataaaaccaaccaaattgtacttgctctttagcatcttacatgaaaaccaacctagtaatcgtactctgctcttttagcttttatagatggactttgcgagacatttgattgggcccaccggcgcagaagccatggaatgaatccatggtactcgttgtctatctcagtttcaagctaaaaagtgtgcaccatgtgatctcctttgcaaagctctctccacttgttgatgcttgctgctggtttccattcacggtagatgcacagacgtagcaaaaaaaaaagctcaccaatgcacgctactgttcatacttcattctctacgttagaacctctaatgcagattatcctgattcatgagacagctgtcagagtagggagcaaaatttatgacttgcaacgttttaaaaccaatttgttaaagaggctagcaattcagcaaaaccatgtcacctactccctccgtcccaattcctaggtttccgtgccaacgtttgactatccatcttatataaaaaaatttttataattaatattttcattgttgttagataataaaacatgattaatactttatgcgtaattatttttttaaataagacgaactgtcaaaaatttgggacggagggagggagtacacggctacatgggttccaagaaaacatgagctgattccaacggatgcaagcaaaattcagcaaaaaatcgaaaagaaaaaaggcaacccaacccataagggcagcaaagcagagcatggaacaagctgcgattaagatggacaggttcagtagttatcctaacaggttcagaagtgcggcatccagcctaataacatccaccccccagctggtacttaaacaaacacgacataaacaagactaccaaaacatccacaagttcaggccataacatagcagccaagcggctgctcagcagaagaacatggagctcctgactttgttatgcaggcgaggcagctcgggcaccggagcgctgcccgccgaggtatggccaccatggctcgacgacgtctccgacatctcgtcgaacttgatgaactggctgacctgagcagcagcgagatgcgcgtagcaaatgggtgcaactgcaaggaaacaagataaagatgaataaataaacactggcatgcaagttcgaagcaaacatcaatcactaaaccaggtattgcccacttaccgactgatatggctgtagtgctcctctggtagctgaaagggtacaaacaagcatttggatgtcagaacaagtctgtttccaagaagtgaaaaaaggaatcatggcatatatcaaacttacacataggaaagggagtggaccaactcctgaagatcgtcagcagagaagcctatctcatcatgaaggatatgataatgtgtaggccttgtagttccctaatacagcacaggcacaaccaccatcaattcaagtaggaccaaaaaaaagggactggcaaaaggagtgaaacttcatacagagaacacacacaaaaaaaaactatagaaatttctgatattaggctataaagaaattcacataataatactacagctggccaagatggttttatagcataattaaaacaagttgcataaagcacccaagataaatgaattaattcatccaacataaatcagaagttgcacattagttaggttaccagctgtagcaatgcattcctgatcaaccgtcaatagttactgattcaattcatcaatgacacgtacaaacatttatgtacaaagagtacaaagcttggcctgatgggatcatggtaagtatcaatctagatcacttttgaaggataaaaaactcagggcaaggattgaacaaagcaacagcctacaagtgccatgtatcaataacttaattttaatatgaaagacttgcctaaacaatcgaccttgaaagtggaatattatacgtgacccaattaaagccaaccccgataaaatacaccaagacgatacttacaatcattccagcgtgcgcacacatgtagaagtcattgttccttggatgacagactgcgttgtccacaacagtacctaaaagttacatcattcaaatcattagatattagattaaggatgtacaattgcaagttttgacacaacatatcgaacaatgggattaccaggaggaacgttattttgagatccaggcacaaaaaatttggtatgatgattcttctgtgcaacaatcagtgtaaactttggagaccagttttcgtcaagaaacttgcatgcctgcaacaatttaaggatacaaaagtgattgtgcagctgatgatagtaatgatacttgcagtcttgcatacaaaataaaaaagaactaaaaacaatagaacagaaagttataatgaacaatacctcaattatttgatccagctcaatgttcagcacctgggtaaactggctctcactgaccccatccctatatttaaagcaccaaataagtgaaaaaaattaaacggttacacaaagaaccagttaagtcaaagcacaaagtaatcattgtccataatttaagttttgcttttacaatcctgcattcaggtatttcactgaagcttattaatggcatttacgagaagctttcaaagagtaactgacctgaagataatgacttgatcaggcttacgtttaccagtactggtatagaagtcaactaataactccctgaaataatttccagcacaaatggcagaagatatcattagcactgggagaatttaatgaacaatggaacatgccacaaagttataaggattgcatcacggtccaaataaaattgcttaccgaatgaggccatcatcttcctgagctccttgtggcttaaatagtccatcaatcatttctaacttaggtgactgagaacggactgaagccctgtattttgatacaagaggccattcacgagaactaacgacctaaaaaaaggttaacgattaagaattaaggaccggtaagagcaagaataatagtggactataagcccactataagcttatgtggagaaagacacagaaaaattatgtgttggctctaatgaaagagctagttctccacatgctccaagatagatgtattaaatatacaagtgagagagaggagaaaaaaggcaaccttatagctaatctattataaatattagccaagatgggtttatacttattaacttgtagttagctctctaagctctaaactatcaaacttgctctaatgattaagtatagtaaagcttttcgtttctggtacagtgcagaaaattagaaaagtttacttaccgcagcaattgaaggtatatcagactgtccaggtgatccatgggaaacatccattcccaatattattgtcgggaccttggatacaagaggaatggaaggggatgtttcaatttgaagcagggagttcaagccaccaagctgattaataaacaagcaaaaatgttagtgctgaccagaccagatataaaatggtacaatgcgagagaaggaaggatgtgaaaatccacaaacctttgcatttatctttaacagtacatttgtaatatactgatcattgaccctagtaggggccacacattgtgtaataatcccaaattcagcaagacatttccgcttccagggccctattagagaagaacatgtgaatgccatagaagggttgcatatttgaataggcatagcacaatcttagtgtaactgaccataaatatctgaattcttcctctcagcaagaacacagagcagaaactttggttgtccaggaagctttttttgcatcttgtcaatcatgccatctacccttcttgcagcaggagctcgtcgcattgaagggtcctcctcaatgacatcaaatggatcttctactttctgcaaagccagtcttttaagtgagggaatcgcatttgatgaaacatgcaacactaaagtgagggaattgcatttgatgaaatatgcaacattttgagtaaaacagaaaaacctacaattcctttcatgccaccacacttgatgatgtctcggacaagatccctaatattacaccgtgcagagaagttaacaactgcccatttctcgatactgctagccttaatgagcctctgtaaaaaaaagatataacagaagttacaatatgtatcacaacatggaagtctaaagagtaaagtgggagtagaactgagacactaaccttattattaaagttccaccgcccattacgtgcaaaaagatcttcaccatttccagcttttagctgccaaagaaaaacatacaattgatctaaaccatatacaaataagagaacacagcaaagggttaattaaaaaacgcagcatagacagttctgactgaccttgggggcctgcagcaccctgccagcaacttgtgtaaaacctcgagcaattgaaataccacaagaattcaacataggctctgaatcatagttgctgcgtttcagcacctgcaaattcaccattgatgatttgattattctgtcaggaaaggggtacatcagctcttaagctgacagaggagcaactcacatcagacaaaactgacatcctttcttcaggtttctgcctggacttctcaacaagcgaagacctctgtagtgtactcaaagccttggtatacctttgcaaaggcacaagagagcagagctagcaagcataggaacattcaccacaatcagcaaaggatgttaattggaaaatatttatgttggattaaggaaaacaattacctcaattggaaaataagttggccgttttggtttccccacattgatacagggaaaatcaccagagtatctcaactctatgccccgattcttcacaaagtactcgtaaacagatacttccacaccttcaggttcaccatcaccatttctttgcttcaaagtgaacctagataattatgtgtagctaagtaaataaagctatttctcaaagtacataaaaaaccaaagttgcaattgcaaaaacgtcaaatatccaggcacacaacaatataaaatataagaaaaacaacacatgaacaagctcacatttgttcatagcagtttctctcactcaaaccaacaatcttgtattcagtatttgctggacttgtttttatccttaaattcttcagagcacgcttggcctacaaatttgtgttaacaatacaattcagtcatctcaaagggttcacattgttcttgtcattcattcttaaattattgttttactcagtgaaatgacgacataatacctttgcccagtcaattttgtttgggtgatcaaccttctggttggcaagtagaaaatctaccacaggaccaggtttcacaatcatcgttgtggacacatctgcacaagttaaagcagcaacatgcaaacatgtattatcagctacagcgtgcatgtgaccacatacaaaatatgaaattggggccataatagcaatcgtttaccgatattgagtgaaagtccactctgtgtagctcggaagcttgaatggaatcccctacagcccatcacaccaccacccaagtcaacaaaatttgaaggattgttatggaaaaaggattggcgaaccaaaaggcaacccctgcataaaaaaaggaaaagttaagaacaaatgcaaatcagccatgatgttaaacattctaaacaatatagctagaatatttgcaaagtaggggcttccaaaagatatggaaacatactgttttgcggaatgctgtcttaatatgatatcaataacacgaattgcttcttgggtgttttcagattcctggcctctcaaggcctgagcaatggcgctcataggaatttttgctgcaaagttcagctcaactttaaaagtttttgtctgatatggccttctaacccttttcctgtcatttcctggactgtcattgccagggctgccaccatttgcagatgacctaatagcattggaagttatgtgagcaaaaaatgttgaagtaaaaaatgttggcatcattgaaagtagcagaaagaattgagatagataattactttccagtgttgaagtcttccagaactaccgtgaactcattgttcacttgaggaagagcaccaatggtgaacaggctcttctcaccatcgtatgcaaaatctttatttgccagctcagacgcataggtctgctggagtttgtccagcacctttctacctatgccctttccatccactggtctatcatcctcatacttcagattaacctgtgtaactcaagcagtagtggcaatcagacatgaacaaaaggaactcaaagaagaaaaataaagaactgttacaagggctagagacgaacatagtagtgatggaaaaattcgtctgctgccttcagtgaaaccttgaagtggttcgtcagcagctgtatcggctgcccttttttgccacaaccagagcgagccatcaaggccctcttaggttttgataacttttttgtatcatcagttttaattggctcagcatttggtggcaaaggtgggggaggtggcaactcctcgatttcaccactgttggactccatgtgcacacttctctgaaatagagcataaaagccaactaaataaacacttctctcagactagaatataacaagttaaatcaatcttcaaaactagaatcatacagaaaacccctaggtctcactaatatattttgcatgcaaatgaaatcgtaaaatacaagaaaattattatgacaccacaaggtttaaaacattcaactaaaagcataatatagtaatatgctaacacaaacgttatgtcagtcagtctgccatgttgcatatgcacacaaaagaacacacaacaaacgtttcaagtcaccgttcaagtccaaactcttatcacacctacatgagtttgccagtacactttaaatacactgtcatactgagaatgacctgaggttactactacttcgagggtcaaccggtgccaaaacaactaagcttcttgtttgccatctacattaaaatggtactccagtttttaacaatgtattcaaagacactaatcgtttgtcagacgattgcaacattaacaagaaagcctgagaaactagtagtacatgcaaaaaaaatatgtataactactgagagtgagaccacaactatagaaaattcctagtcaactcacaaagattaaaacattaattaatagccaaattaagagcgtagtacacttaccgactaactccccaaagctgtcaaagcgctgccctatcctgcacacaaaatacataactcattcaacaattaacaaggtaaatcaaaacagaaaaggaaaggaaactaaaacccatgctaacagataccagacaatgaaaatgctctgggtcaagagtttttcctccagaaaaagaaaagaaaagcaaaattagaaaactattttcttaatttttcttccaaaaagataggagaagagtctatccagcctacagactttcaaaactacaacaaacacaacctacccatttttaagtacaagaaacttagccattttcttaatcagcaaatcttcttttcccagtcaagatcagtatcataaaccttcccaaaaacccctaaaccctaacaaaactacacaggcagatatccaccaaaacaagcatcaaaaggaggtgctcccaaacaaaaaaaataaaggtttaaaacaacaaggaccagaaatatcaaacgaagaaagaacgcaaaaatgaaaaagaatcgcacaaacactgtttcggataaatcttcaaaaaaaacatctaaaacaaaccaccataaacggcaaaagacgaaaaagccccgagaacaacgcaacgaagaacgaacgaaatcaggggaaaaaaagaaagaaaaccccaaatcaaactccttaatagaatgcatcaaaatgcagcgatctttaaaccaagaacagaggaaaaccgcaaaagaacacaaaagaacagaaacttccacggtaaaaccccacggaatccgccctcctctcctccccgaaaaaccccaccaccaccaagaaccgcaccaaacaacacaagcccaaccgctcccgcatacacaacaatccaatctgcaaaaacccccccgccaagaaccctagatttccctccacccaaaatgaaaagcgggactcctcgccttaccaaagaaaacgatgcaagaacggaggcgacctctccgagagggtggtgcgctcctcctccttgtcccccctccctcctctcgaaactcgaacgcctcgcctctccacacacactctctctctctctcttgtaggaggagaagacgcagcggcaggggacgaagggtaaaaccggcacttcgcaggacctcgtcgaggccacccgcgccaccgtggcacgggggtggatcgggaacgtacacgtgtcccccgcgagcacacggggatgcgcggcgacacgtggacgggccagatggcccccgcgcgcacgacggcccagttggaatgacgcttttacccccggggctctcccccctctacccccgtgttctcctccactacccaaccgaaaccatccgctttactgctgggacatcgctgacgtatggaccacgagggtttctggccccacgtgtcatcgacctgtgtggctgtggatgccgaacagtcagccttctttccagcttgccgatggtatcccggcggcgacacgtactcgctcaccgtgggccccgggggaaggtctgggcccacctgtaagtgacagcagttcgtttcgcctagggtagttccgcgctcacggtagacgtgacaacgacactttcgccgtatggagcggtggagcccacccacccatcctccgctgcgtacggcgttaagtccgacggagggggagggggcgaggaatccgaagcttcgaacgatccgacggctgagtcgcctccacgcgggcaatcccagccgtcggatattcacgccgtcccccgagccgttaaactccccgggcatccacgccctctcggctctcttctcttcgcttcctccaccagaaaaggctgccccgcacgcgcgcgagcgagggaacccgcgcccatgggccatggcccatggaccgagcctaccaaacaccatcccaccgacacgtgggtcccaagcggccctcccatccgagccgtctccgcggttcacggtggacgcggcgcattcaacgcggggtgtggagggagtacgagcggtggctgcatctctgcgtgttgtctggcctggttttcgcaaaggattttttgatgaggggggagagagggcgaggcgaaagctgggccggtgcgtttccttcttcaatggtggccaaccctacacctgccaaccatgctactgtcctacaattgccacatttggggggttgggtgtcaggctcatggttttccacaccgccgggccggagttaccacgccccggcggtaagcacggttaccgcgtgataaccatgaaaaaccgtatgaaaccgtgtaaaaattatcaaaaatttaaattattttttaaatttatttgaatttaaggaggttaccgcggtatttatattaccatacccccgcggtaactgcgcagttaccggcggtaagtcaaaccctggtcaggctgtgattttggtacagattccatgtttgagttttgggggtgtttgtggaaagagaggtataatggggaaggattttaaatttgaataattggaggatgaagtggaagcgcagatggggtgggttctaaattttttttttttacttttgtatatgagtactcttttggaaggtaattgtgtgaatatttaattataactaatattagtctagtttttttaattagactaatggtattacatatttgacgtcagcaattcattgttcttaacttttgtggatagaactcatttagtaggaaaaaaagaagatattagatagggtgattaattatgtagacatttagataagatggcatagatttagtatgcatttgcccaatttcttttaggcccattttggatctaaaattttgataaatggatttcattttcatttctaatataatttagggaaaaaaaccatgaagttcagttcaaatgttaaattcttttttttcagtgccatctagaattgcaaaagcaaaataatcaacctaagcataattgaatagaggctagtgtaagcaacaatcataacgtaccacaacaatcataacgtaccacctccaccgcatttgtttatgtcatcgatcagtccccattgttgcacggtgcacatcagatctagcacgtcattcagtgatgtgatatgttggttgtttcacgaaggatgtcacaccacccatggatctaaacatctcttaaaaatggatctaaggatcaacgaccatggagtcatgccaaaatataggagaatacgatggcctaaccccgaggccttggagcaccatcggagcttgaggctagagccgtcgataaagaaatagagttccaatagacagtagagtgagggaaggatgcccggacatcgacaaagacgtaggcgtagtgcataggaagtagattgcggcggcggcggcgtgcatttggaagaggtgtggaggatagagtgatctcgatgcgcagtgcatggaaaaaggaggattagagtccttggacagatggatcacgaaaatgatgttttttaccctgatttataggatccaaatgggccttgaaggttgcattttaacccttccattctttgccccgagatttcggcgacaaatatgcaatatgataatatcgctaaactaaactaacacgtggaaatcccggtccgtcttatcgaaatctcacatagctaaatgctatcaatctttcttttatgtcaacgtggtgcacacgtgttcacttgcatgtcaaagtcaacacgatgattccaactagtcgttgactaacggtggtccaacgagctctagtgagtgcaccatagagtaaatatcaacctcgtgaacttatctattcatatgtgacaacatagagattgatgaagcggaataaattatgacggtattatggtctcgattgaaggttcggtggatatagagtagcaaccagagtagagcatgaggcggttaagccagatgcgatgacaccagctcatggtggtgttctagtcatcaaatagtagaggtcaaaggaactatctcaatggtggcgaagatggattgtgtgcaaaggcagcaggagaatgtaagaggttcaagcggcaattgggtgacattgagagctcctcaagcataggtcccatatgttagtgagagagagtacccgcctatccacctaacaatgggacgatgggagtagagagagagagagagcatgagaggaagaagggaagacacaatgttaagtggattccacattcccacgtgatttttttaatcctttttgctaggatgccatgtagatcaaaatcatctcgtattagttgagagccgtaaagtggaagagtttgaatagtagggatggtaaatgattttcgacttttgcaaaaagtttatatatgcaaaattatcccccctatttatttatgatagatagcaaaacaagatttttaagaatgacatgatccaagtaccgatcactgactactcaacgatgttttgcgatggaaagccttgtacttgtcatcttctagctcctccaacatttgaggtgattcaaaatacccagccaaacaaaacccatgcataaccaccatcataccattgatgattccaataaatcttggtagtcgaattatttgacaaccaatgcaaaccttaggtaaaaaaaaaggggttaattggaaccatgccattataaatatcatagttttgaaatatgccattaatattcatctatttggattcatgccattataattccacatctatccattatacaccactacttgcccctttaacatattttccaagatgttatgaccaaattacccatatcttcttcttcatcccctcccatctctatcttgttcgtcgaacctgacatcctagcaaacgaaaatgctcacaccggacgaccgacggggtggagaaaaatcggacgctgtctgccactgcagcatgcaaagaatcttttcttttcttatttattcaaaagattttttttatcgtaaactatttatctaatctacgatctgattgcaccactaaattcgttacaattaaatctttacaacaagaccacacatgattatatttcgacaaaaaaatattttaattttttattgatttttttaatgttgcatgtggtttcttttgatgtttcaactagtagttttacaatgtttcagctagtgtactcatgatgtttcactgtgtacggatcaaatattgcagtggaacgcgccgttgcaataaattatccacatattttggaaaccctctattaagagaatttagtttattttttgttccacaaaaaaatgtttcacctagtgcactcacaatgttccactatgtatagatctaatgttgcagtgaactgaaatatttcattgcaacaaaaaaaacccacatattttggaaacctcctattaaggaaatttgttttattttttgtttcaccgaaaaatgttccacctagtgtacttataatatttcattatgtatagatctaatgttgcagtgaactgaaatattcttctgctatttgctgaaacattgtttttatataagttgaaacaacaccagatttaaacgagtgaaacatttttcaatctacttagtgaaacaattccgatatacctggtggaacatcatgcaacatttaaaaataattcaataataagctattttttttcatcggaatatatccatgtgtggttttgttttaaagatttaattgcaacgaatttaatggtgtaatcggatcatgatttagataagtaatttaagagaaaaatcagtttaaaagtagttttgcacgtaaatcggactatgacgtcatgctgatgtgagcatccgatttttccctaaagcatcggacgtccgacgcatagccctctcccctagcaaacgaggcgaggttacgggcgcggggatgttcacacccggccggatgtgctcgcgctccgcctcacgcacttgctgctctcgccggcgcaaccctccgtgcccatggctgccgtgctcctgcgccgttttatttccgccggggtcacaggatgcgggcctccacgtcggggttccccatgtttatctggaagaagctctcctactccaagggagaaggagatggaagatgaacagggtagagattggaagagaatgaggaagaagatagggatgatttggtcctatacatttagaaaatgtgttgaatgggcaagtagtggcatataatagatatgtatgaaattataatgacgtggtttcaaatagacaaatatcaatggcatattttaaaaccataaaaattataatggcatggatctaattaacccaaaaagaaaaacggtcactaacttacaacgagttccattcaaactctgatccattcaaaacagtagctgatcgaccttgatctttttttcttttccaacagtaagtattcaaagagcaatttcatatgctctgataagttaaagtgtcaataacatgtcatgatacaatccccatcaagagccctaagtgttctatttacattgtaactctagttaaagagattaatcctagtactagtgtactggtacagtacaacggtacaagtaccagatctatgacacgtgtgtagtatacctttacagttccccgtttcccgctatgacgcggcacaccaaaaatttcagcgaccccgcttcgacggcggcggcggcggcgccgccgggcggcggactacgtggcgacggccgtccagtagctggtcatgcaggcgctggccggcgtgctgatgatccgcgcccactcccacccgccgccgcacccgtccgctcctcgccgcagctccgccagctgcaaccacgagtccacgaccaaaaaaaaaagctccggtaattagacaaagctcatcttcctggcattctttgagcgagggcgcgcggttcttgatttcgtgcgatgtgatgatgatgatgaggaggggaatcgaggccggtcgcttgcttaccctgccgtcccgtagctcgaagaccaccgcgtcctccgagaacggcaccggccgcgcggccgccacctgttcgacgaaatgcccccagcgccattagcagccttttagactccctagaccctagttactaccaagaaacagcgaaatggaaggggggtatcagaccttctcgtcgcagcttcccacgaagccgtccgcgtagtgcgcgtcggcggcggagcccagggtggcgcagctcttgtcgccgccggccgcgttcatcgccacggcggacggtgccgacgggtgcccgtggctcgtccacctccacgtccagttctcgaggtgtcgccggtagacgtcgccgtcggacccgatgatgaacagctgggagccgtcgaagcacggccccggggcgccgacgatggccacgtcccggtggggcgtcccgtgctccacccactcccacccgtcctgcgggctgaaatggtactcgactaggccgccgtgctccgacaccatgaagatggagccggcgagggagagatgggacggcctcatcgctgtccccggtgaccgtgagaggacgaggtggggtgattggtagtgcttgtgccatagctctgtgattctgttgtactggtacaggcggccgttgcggccaaccgcaaagatgacgtttcttctgaacacttcctgatccactatgaatgcaatcttggtatcaggagggctctggcagtccttccacttgaatttccttaatgcaacctgcaaaagttttagaagggcatcaacttggtgctgttctgcacagaggttggcatatctggagtgttaattattgtcatgtagggtttacttggtatgcttaccatttaattgtactttgtttatggtttgtattattaattaaaaaagtatgtcaaactctttagttactgtttatcttgtctcaactgcaagcaatatgagtaatgattgtttagaattacaagatgttcctaaacatgaattcctttttattttatactgctttgctcatactaaatgctaagaacgtaggaagatgtatggttatcctgaattactgaagtatatgatagcagagatatttgctacatttgccataatatggacctatttcaagcactctgtttctgttctctgcctgtaaactcctatcagtgaatctcatttctaactactctagattagtatgatgcatagacatgccattatcttgagtaatgcattcatcatttgttcattgagtcattatttagcaagaattaatcaattttgcctgctaaatatgcacatgtttaaatcttgggcaaaggaacagctcaactaaaagtgggcacattcgaaatcatttttatttctaataaggctaataatcgcatgaatgagattagagcatgtttaaacttttaccgtgaactgtagtagcctgcctctcttgttaacaaagaagagtgcgtcatctgttgtcactctgcgtggtaaacctggaatgccatcccatggagacccacttgcgacctgccttcccttcctcattgctgtgcagttgatccataataagtcatctccatttctttctctgatatgtaagttcccgtgaacatcgacaagatacaagctgccattatagcttcctactgtacctttcatggaagtagtgtgctcatgtcttagccataaccaaacaccattattgtttagatattcaaaagttaagccgttatctgttatgagaaaaagtgatctatctgcatgcatcacccgcatgtggaagttaatatcaatacttcttgatagaaagttatacgattcgatttcatccctctcatgggtattaacgtacaggtattgttgcttatcttctttacgccatctggaaggtgggatattgcccaagtcatttgatttggtatctgcagctacattctttgctccagtaatacaatttgttggaccatgctcttctgtgcaatattctgcattccaaccttctgtttctggtgcatctagaatggaccactcatacttgtttggcactttccttctcatgctatagtgttgacttggaccaaaatcatcaccacccataccaggcaaatgcagctccccaagcctaccatcatccagtgggaatattactcggccaacttgaacctgtacacctcggacatttcttgctacctttgtattctcaggagacatgtgatttacccagagtcctctgatcttattgctttgagctccaccttttccattgaaaatatagatcatgtcaactctgtttcagcttgatattaataataagttgttgctctagtataataattaaatgattgaatgaagacaatttgttcaaagaaaaaggttcacacaagaatgttccacaggcattaatctagttgttttgctttgaatgcatgattctattgtgttacctttattattgtttttttcatagaacattactttttgttgataaaacaagagcaagaactaagaactaagaaccaagaacaatattttttttaaaaaaagaataagtgcatacgacattgaatcaggagcatatggtttagatgaaaggtgttttgctggagatatcactttaagagcagttccttcgtttttttttcttgttttcatatttcaaactgaaaccacacattgaaataaatcaatatatggatctgctatgaaaattttcttcaattctcaaattcatctttgttgtttgtttgattttattgacctttttaaggggaacagtaggggagaactctacgagaatacttgattgaccttgagcaaatgaacataaagaaagcagtatctccaaaggagtctatacctgtatattttggaaactgatactcgaatacttttcctgtggttgttgtaaaatacattgaagttgcatcattagattcatcttgttgcacttctgtgatcgaactaagtctttgactcttaggagctccatgtttataccatttccacttccttctatgcaagcgccgctccactaataaaccatcctgccaatctataaaatatctttagcaaatagataaataccgttttacaatggaaatagaggtcctagccatggcataattttactttattggttaacaagaattcctattattacatatatattactctgaacttatctataatgagttcatgaagaggctgtcaatttctcttcaattgtattataacacatgatcggtcataatgttcttgttgacaccctattttggttgttttgcttctgctacaagatgtccaactaaggaaccatatacatgtttctttttcttttagtacatttcttgatatcatactttttgcaaaactatcataaaaaccacaactttaaacaggattttaaggaaccatatgaactttgcaaaaaatgtttcagaaaatgggctgctcagtcaagatggtttctgacgcattggaccacataaaagagagataaggcacatccttcctgtttacttgacatgggggcagattccgttgaggctaaaatatccacatcaggtaccttaaacagactgaatatgtcttaaaaagtattcttttgtagaaaaaggtttgtgcaaaagcatgatctcaacttctcaagaaatatactaatctttttgcaagtaccttcatcagctctgtcagtctatcaggagcagataatatatttttgagattattttcatattataacaatcagcatcgctagactgtatgcatttataatgttgctgcattagcttggatccagtaagtcatttctgaaaagaaaatccttgcatacctttgttatcaagaaaagtgatactgagttagatcctagcaggccatgtaaagcacacccaactgatgagcttaatgagacattctctgctgtttcttcactccatatgtgctttttccatgatggtcttgattctctgtcgaactcatacaagtctcctgtagaactgcaccacactttcccatcttagcactgaaatacagtaattatacaaggtattctacatcttgggataaaaacataaatgagtatagcctttttcttgtttgaaaaactgagcgtagcttagctagcgggaggtctgaatgaccttatttgaaatctaagagtggcttatttggtggaggtatacaccctgctacttgaaatccttatggctctagatattcttatgctgtatttgtctaataggtggatcatccatctgcataacatatcaatgattctaggaaggtactccattagagataccttcacttcaaagaaatatcaacagttgatcaattttaagtgaaggtacatctaatgctttctaatgccttccaagtacttgtaaaacatctcaaccatggtagttcttaaaataaaggtgcctctagtttctttcaggcaccaaaaatatctcaaatgtctaaattctaatgtacacagagcaggggcagaagataaggaaaatagtgcataaacattgtcatttttctcaccttcctctctccccatttgtacaagttgacttttgtttcagatattcaagattcacaaaaacaatagagaaccgactattgaaccagtttattttcccactaaagtagtttggattgacacaacccattacctcctaaagaacacatgaccataccttactgtgaacactgtccctggtcttgcatttccagcatcagatatatatgatacatctcctcctggtgggtggccatggtaagtccacctgtacatcagtagtattggaccattattttgtggagtaggtcatggtaatagtgtaaataagctgccaatttcttaattcctgaaaaaaatagcggcattcactcaagttaatcaagtggtagcctggtaggcatggaaccattcagaat

SEQ ID NO: 5593 - DNA, 15996 bp, Oryza sativa
tccccgtcgtcgtcctagtccaccggcggcggtgcacggcggaagcgccgccgcttctgttgcccggtccgccgcttcgtggcctttggatacttgggagggagttggaacggatatgatcgtacagcacacgatatacgaacccgtgtacgtacgaatccgaaatagtactacatatctacatcgttattaagagaacaacgtttgataccgcgaggtgcgcttattaagatcaagtcgttctccaagtggcagttgagtcatggatgttattcatccagtaacagattgtaatcagctaaaaaaaagtgacaatctgattacaattcttcctcgatcaatctaggaacgcggagtcgtatggaacaatagcccggcgaaattttgttttcgtagttggatcaattgacagtttgacacatattactctagaacattgcttttctctagtgatgcaaactttggttgaaaaaagccatgaaatcggggaaaaaattctttgcgacagtgccgcacgacgcttctagtgcaacaccgtataagctgccgatgcgtgtctcgtctgctgcagcccgactgcccgaggcctttcgttgagcccagcagacgtctcccacaacaccgcatagatcaaccgcagcataccttctacaatttctatttgtgctagatcacgaacagtaattccaaacccaactgctatcgatcgatcaacctcttgtcgtcccggtccattctggtccctgggagcacaccactatagatggctaaaaggcccgaggcccgacggcccggcctagggcacggcatttttgcccagcccaagcacggcatggcccgacggcccgtgctagcctggcccgaccactcggccgtgcttgggcccctccaccggcacgcccgatgggaaaatagacttatttaaaaaaaggcacgatgggccatccatacctttgggccggaccggcacggcctgactacttgtgggtcgtgcctaggtaggaggcgcagcccacgggccgtgccggcccgatggctggtgggccgtgcctagccgtgccggacgggccttttagccatctatacacaccaccatgtttgagtctatccccgacgagaacaccgacggcgggcgtagaggagggcggcggggccccataaattccgctgtatggatgtgtgggtagggcgccatttggatggtgaagggcggagccgcgtagcagccgccggattaaatcttgaaacggtggagagaatagttggagctaattaagcgcgtggggaggcggtggatctcatgatggagagcagcgatagaactcaccaacgatggtaggcacgcgacgggaagagggtgcctcgaacctcgattaattcctaggcagactagcttggccgatagctgtggcttggtctacgtggtgttacgggataggtcagctcggcttgggatgcagcagacgggactcgcgtagccggtctagactgtgccgcacgggatcgtgtggcactgccgcaaagaattttgattgtatttctctcgcacgggaggaattaagctttattcagctcacaagctgtggagatcaatagatcatctaccggtccaaagtttctgatccgaatgacaattgggagaatactggcatgtttttgagtcctcaacttccacagtttagttaggttaggtactgatgtctgatggcgccttaacaagagtgctgaattaataaaagcatattttcaaggtaatcaatgcctctgtcttgtactatgacgctatttgcgtacatataacgtttaatcattgtagacatgggtatttttcgtttgttcaggtatccaccacgtgagaatagcatgggacatgggtatttttcttttttttttttgagaatgacatgggtatttttcgtttgttcaggtgaatagcatgggtatttttcgtttgttcaggtatccaccatttgagaatagcatttactcataagatggtatttgaataataggatttactcataagatggtatttgaataataggatggcataatcattttggacttaaattcagcgaaaaagagttggcgagagggaattttatatttgtttgtcaaagcgcgcgaatcctcgaggaacaaacaccggacatgggctcaaccgaaggattcctccggccattggttgggaagcccgcccgcatgggcaggagggcagtaacggtaaacgagggcacgcgcgcatggcgacacacccccctcgccgctcactaccctacccaccaccaccacaggcgcggcccccctccctgttgggtcagtggtgatggccaaggcaaacctccggtgaaatcgagggtcacagcccgaatcgaccgagatagatcgacagggcttcgccacgataaccagaggcgcccgtggtgtttatctgtaccccgggggccaggagatctcaagcgacgctgagccaaacttatacatatcctccctcgccaactctaccctccaaagccggagctacaggcctgcgctactaggcccggcgatcgagccggggatggagtcggatttatcgcccgcgatctgcgcacgaaatggcgaggtgggacaaaaaatggtagtccgctgggtaattctattgagggcgtgactcgtgagcctggcggctccgttgaggcgttgatggaccgccgccgctgcttagttccgccggcagtgatgcactcggtttgaccggaggaagccctggttcgagctctgctctgctctgtgttaaccatttgaaaaattgttatctgtgagtaagtttcaccttgggtgctaatgtcgcataaagttgtgaactcgtgagtaagtttaagtttgaacatcaatttcactgcatttcaagaatagttttgcaagaggttggtcacaacacgtttcacctgtgtcaattttcacttcaccttcactgtctgtggaaagttacacctggtctcctaaaattttttagttctctgctgacagcaaattcattccttactgtacaaaaaagagttggcgagaggggttttgattgaaagcgcgcgagagagagcccaggggctccccgaaccccgagcccgctagggttgggggaaatccccggcgtgttagcgcattttagttagtgggcttcgccggaggcaggaaaactctctcagagatatcctcacaccggttcactggattcgattaacagtgattagtcgcgggggccagaagaagcaggcggtaaccaacaacacacagggccggctggcatggttctctgaccccggggggctctcaacaaggcgcgcgccaaacaacaaacccgatcgagctcggctccgccgccgatcaaagtggcgtcacgcgcgagccgagccttaccctcgccaactctaccctccgaagctggagtgacaggcccgcgctaccaggcccggcgaccgagccggggatggcgccggatttatcggccgcgcattccgcgtgaaatggcgaggtgggactaaagcgtcggtcgatccgctagctgtagctgatgacgaagaaattaaacacaggagggtcttcgtcgtcggcgtcgatcgggaccgctggccggcgagtggcctgggccggggcctgccctccgtcgatggacggagtccgcgccgccgccgccgcctgacgagctcaggctcagccagccgccggtggacggacggcgatcgaaacgccgctgcttctgttgccaggtccgccgttcgatctcgagctaaactttgctctgttcttgggcctagttcgggctacacatggggatggagagacgatcgtgcccgctcgcgtcgtatacgggccggaccgtgcacgtttcggaagcagtaatatacttaacatagtaggacgacgtttgccaagccatattggagttcgtttgtggtgcttcctaaacggagtgttttttttaaaaaaaaagaaattctacatgaaaattgttttaaaaaagtcatattaatcatttttaaaatattttaactaatacttaatttatcatacgactaatttgctgctcgtgcatgggattagttcctaacccacacaaaacaacacagccattgtctcgttccaaactcacaagtagacaaaaaaaaacctggcttaagctagtcgggtgagttgtgttcactgttcactgttcaggacttcagggttctacttgtttttaagccaaaagaaaaaaaaatcggggaacaccgatagacctggaatatcaggtatttcgagaaatctcagaaaaaaaaaagttgaaaacggaacacactttggttagatttgaatactttttgctaaattgggaaaaaaaattgggctggaaaatatgataaatgcaaagttaactgaaattgaataggctttgttcagattcaaaaaataaaaataaaaacggaattttcgggtgaaatagtatcattttggggtttaaaatttcgtgaatttcaaagctcgcaacatgtgaaggaagtcggcaaccttgaacttttcctgtagcagctgcatgcggcgccggcgctgaccatcaggaaacttggcaccaacgaaaccaactcctaccccaaaaacaacaacgcccccaaaggaacttggagaaaacgtaaccgagtccaacccaacaacacagctactactcgatccccaacgtggtataagacgagcactgcaccgtcgtcatctatagtcgacccaacacagcgacaccaccagcgcccacctccatcgccgccgctcccctcgcctcccgcggtttacgctcgcgcgcaggagttcttggttggctgactgcgagtaagcgaatcatccggcaatcatggcgtcccgtaagtctctctctcccggtgatctcgtatcctgcttctttttttttttttttgttcttgttgattttgccaattcgaatcgatcggtgtatgattttttttttcaaaaatcggttctgcattgcaggcgtcaggtttgagaattccagcgagattggagtgttcgcgaggctcaccaacgcctactgcgtgctccccgacggcggagcagagaacttcttcaggtttgcgtagctgcattgcattggcgccgtgtgaatcttggatttttagcattggtttgaatccgatatttgttatggtgtagcgtgttcgaatccgagctcgccgacgtcgtgccggtggtcaggacgtccatcggcggcacgaggatcatcgggaggatgtgcgtcggcaacaagaacggcctcctcctgccgcataccaccacagaccaaggtatcaacactactcagtactcaccatggatgcctctgctttactctgcttgtcgtcccggaatattttcttcagtcaaattcagtttcaagtactcagattttaatcaaactgagataaacaagagatctgatttcaccaccaggattcacttgtgaattactccaatttgtaaataatggggacaacgaactgtttttttaaaaaaaaaaattaaaaaacaagaagtcctcttggtggcatatcttctttctgataagaaattgacctgacatgttgttgatgtttccagagctccagcatctgaagaacagcctgcctgatcaggtggtcgtccagcgcatcgaggagcgcctctccgccctgggcaattgcgttgcctgcaacgaccatgtcgccctcacacacccagacctggaccaggcaagtcatctctttggaaaatctactccaaaatcacagagttgagcatataggagcaattagcaaacaatgccacagcttaagcccatctgaccaaactacattgcctgtaaacagggaaccgaggagatcatctcagatgttcttggtgtggaggtgttcaggcaaaccattgcaggaaacatcctggtggggagtttctgcgccttttccaataaagggggccttgtaagtttctatcacaattaaactaatcaacatcactaatcactggagtactagttattaggccatggcactggagcttgcagttctctgaaacctgtgaatgatgcaggttcacccgcagacgtcggtggaggaccaggcggagctgtcgacgctgctggaggtgccactggccgccgggtccatcaaccggggcagcgaggtggtggccgccggcatggcggtgaacgactgggcggcgttctgcggcgccgacacgacggcgacggagctgtccgtggtggagagcgtgttccggctgagggacggacggccgggggcgctcggcgccgacatgagcaggtcgctcgtcgtcagcagctacctatagagagaggaggagggaccggtttttgctttgggggattttcggtcagaattcaagaatgcttaaagccaaaaatatcccttgctgtatcttgagtagtgacagtaaatgttcgcgtggatcgatgcagttttgatcctgtgtcaaagatgaattttgtatctttgcaaatctggaacgatggaagtgcttttttgaagtcaaaatataatttagtattatgctcagctcaggaaagaatgttgtcttaaaccagaatattaaacaaagtgaaggtagccaacatatgtcagatcacagtgcagcaaagagtattttctctatcagtaaagacttgttggtagagtacaacacagtgcaacgcaaacaaacataagttcatagggcaaaatcgttaagaatgcctaaagaaaacataatgtatcattagctgaaggactagcaagcactggcaaaactgacatttgtttgctaacaagtcaagagacagttgacacgcataaaatgtgaccaaagtaactcttcattcgtagcacgtcaatgaagcagacaaaataaaactaagattaacattcataagattccaatcctactcgcctgctcggtaaggcaatagccgcaaaaggttatccaagtgcaagcaaacactactagttcattacatcgctaaggcattattatctcatcgtcatatatattttggcaggacataagcagcacatgtattggatggccacaaaataaacctaacagaagaacctaatcgagcaattcagacattgcgttcttcctgttgaacggatcggtagcagcaagcaaagatgccacagccctattggggaaaatgtcatcagccttcatcctctccttgaatccataaggtggggtctttgcattcagatatgcctcaagaagcagctgatactgtctaatcctcccagtataacccatctgccgcaccttgctgaacaatttctctgcattatggacgtctcctttcttggaataactatcaagcagcatcaagtatgtggtgtacaaaggcttaatcttgttcttatatgatagcttatgcaatatggaatcagctttctccacctctcctgcatccgaatagagcttcacaagtgaatccaatgttgagggccctagtctgcaaccatcatcacccatccgctttgctagctctttccccttgtcaaaaagctttttgttggcatacaccttcagcatagcattgtagtattcgaacgagagtgtcttccatgtcttgaacatattctcaaatatctcctcggccttttcaacatctccaagcttaccaaaagcctctatagcagacatgcactcatctagacgagcattgacctcacaaaccttccagatcctttccacatcagcttttttgccaagaaaagcatacaggggtaaaacaaatttgcaagcagaacggttttcattgatatcatccccctctatttgctccaaaattgcctcagctttctcacgataaccaccaaatatgtagtgccttgcaattgtggcttgaatcagaagatctggttcaattccatctgcttgcattgcctgaatgaccttctccatatcttcaatatctctagcagcacccttggtgtctacaaggagcttataagtgaagagggaaggcttcacattctccttttccatcattgtgagaacatcaccaagcttcttcttgtccactctcttgtagagtagcagaagctgattgcaagaaaatacggtaactggaaatccaaggtccttcatcttattgaagacttgttctgtttttttcacattggctatagccacacagttagccaaaagagtcctgtatacaacctcacccctatgagatgcaggaacattctcaatatacttttcagctttgtaaataccgtggactttagctaccaaatccacacgtgaagcataatcacgttctccaagatcaaatagtttggattcttcaacatactccagaagctgcagaaaatgaagtaaatatcttctgagttagaaaacacaaagaccgaggtaaataattacagtgaaagagcacctttcggtctcaggctaacctagattacaaagcttaagtgttttagatatgaggttgttcacatgaaaaaagtttatgtatcaagttccatcaaagtaaacaccgtgtacagctacaaataatcaaagaatagtgaaattttgaaaattggtaacatgcatcggtacaaatgcattcggaaggaaggtggctttgttattatctaagacagctatagctgcatgactaagatctattagatagctacattggtccactaagttaccaataagaatttgttttgtacataagagtatagacagttgacacaattttgctagtaatttacaaagaacggtagcattcatttcatcatgacacgatagattgcacataaaaagaaacaagtatggctatgctatttcaaacatcatgtataaccaaacatgagtattacaacgaaagatttaaaagcacagatggcacaatatgtatgttaaggggtaaacatgcttggaatgcataacagtaaaataaaatggtggtcaataaaagctgcagcataaagaagagagaatcaaagaaatggagtaatactcaaaacgtgcatggaatgaacagaaaaagacaacgccctttgacaaacaaaaccaacacaagcactctaacaaatttcagagtctgatactatagaaaagaagaagcagtttgcacaccattcacatgatctgcaaagtaacaataacattctcatactaaattaagtttaggatgtaacatagaagtacaggtggtgaactggtgatatctcaacaacattgtatttttcaacagtcaaggaaattatgtgtgcttcttatatccctctagctgtctagcatcattcccatagtaagagactaagagtacttcatcacttcttctttttttaatactctaggacttcaagaagaagcatatagacatatcattctaaagtgcccctacctcatctagtgcatgctacattttacaaggctatagctcttcatttatgtgcaaaaccaaaagctcattcaccattgacatcgcaaatatgtttcagaaagtaacattcttaacacatgccaagctaacgagcataacagccgctacatgcattatcgataattataaatgtgcagaaaggacataacgtttgctatcatggaaaaaactaaaacatgtaaaggccaagttaaacacctgcaaggctttggtgtagagcttccgcttccgaagactaagaaggacataaaagagttcacttctttccaatgtattgccatcattaagccattttttcgttgctccagcgacatcaacccttggagataccagcaaagccttaagaagagtggattgtgacttctttatcggctcctcaggttttgcatcagcctccacttgagacaagccaattgcatcaatggtgtcctcatcagaactctcatcggatgtcaaatctaaatcctttttatcagcttctggtggaacctccagatcagaaaacccttcctccaactcatcctgcttatcaccagaacttgcaccggcctgagaagagaaaaccctactccacatgaaacggcctgatgagaatgatgattggcagaccaatggttttggttgatgacagcaatccaatttctgacagtcccgctcatgatgctcttctacattctttgcatctgcatttagaattacttcaaggtttgcacaaccacgggcactcaaagcttggtaggcacggaccctaaagcagcagcaaacagttagccaagccaaatatcagtattaacaatgcatgaaacatgggatgataggtacaagttatgatcctggacatggattcacatgcaaacgaaatacaaaatatctgcttcatttcacaataacatgaccagatgattgaaacaagcagaggtgttgttccatcttccaacatatctactatcgttcgtacataatgttacacaaagtaataatcatgtctacatagacaaacatctaagatcggttacttcttcaagcacatctacacacagtagatacacagtcatgtctctcacatacatccaactgatatatttcagtcaaacccaagatgataagactgcaatttgcatagaaattcaatagattacaacaaaacagagtcccaacctcaggtggataatacaaacaactccctactccccaactgaaaaaataataaatcactagcaatgatcaactttctccccaagcaacgcctatggccattaattacaagaaaccgtgtcctgttaacgggggacgccacacattttggcaccgaggaaatcacacaaataaaccccccaagaactaactaaacaaggcatggatggatctacttgtcgccaccacgcccccaacagggacagaaaataagagtgggagaaaggcacggataaagaacaagataagccacagatttattatatcatcaatcatctgtcaacgaaatcccacatgaacagcggcagaggggggggggagagacaggggaggcgcgggcggcggtacctgagggggttgcccgcgcggcggagcgcccacatggcggcggcggaggagacggcggggtcgtggcgatggagggattccgcgatggagaggggaagagagagagagagaggggcagaggcggctaaaaccccagggggagggggaggcggctaaaaccccaggcggcgacgcgaatggaggggcgcggcgggtgaggtgaggtggtggtttcctgttccgggctttgtgggttgtggctggcctgggccttttagatatttcttttttttcttcttccgtgacggtggctgcggttacgcggggaagtgcacacaaggaattaatggtaatatattgcgcggcgactggcgtgttaaaaagttgggttttagggcattctctaaagggggaataatcatttttctgaagatttatctcttcaagttggtctctctctttttttttttgataaaggaagtagttttatcatttgcattgttttttttaaggatttgtacagcttagagaaattggacattctgccactgccaagagtgggcttcgccacaaatggcatcggtaaaatgccacttccaaccgatgacaaaccgttgctttgccatattcaccatttcaaaagattttcaccattttccacacttcaactgaccaaaataaccctctctccgatgaacatgtgggagttgtgggcgaggagaaggagaaggggcggcgctgttccggacgccgtcgccggcgagagaaggacgaggcggtgaccgtcgccggtgaccgtcccgggggcgcggcgggcgcgctgctttgtggcggaagaagcctgcggctcgcgtagctggcgacgaaccacgccgcgagcagcgggaacatggcgccagcggcgaaggacagcgtcgacgcagccgtagcctgggaggatggtgacaccgccgccgcttgcagtcgcaagccagccggagccgacgccggagccgggccgcgtgctcgatttcggccagctagacatcgagctgcgcgtggccggcgacgaggccggttagcccggacaggaggacggcttgccgatggccaggcgacggcgacgaggccggccagcccggacaggaggacggcatgctcgtcggcggggcacgccgcgccgatgccgagcatgagcgacgcagtggagacaagatcgtcgctagcgcctagcaccgcggcgcgcagccactggaagtgcatgccaccgccgtcgtgggtggcttcctcttcctccttggcctctgccacggttagctcggtgtcgccactggcaaccaccactcagatcgaagggcattttgggtgaaaaattaggtgaaaatggagtgaaatggtccaaatagcaaaacaaatgtaagcccagttttggcagtggcattttaacgacgccattccgcggaatggcattgtggcgaatcccactcttggcagtggcgtaatatccaatttctcgctagggagtaaagaaaacagataaaagtactactccctccgtaaaaaaaaaaactcaacataggcaaagaatgtgacacatcctagtacaataaatctatttacatcggacgatggagagagaggaggcttcctgaagcgaccagcgagtcggaaaaaaaaaactttctcccccaacctctcttccccgggtttccggcggctcgtcgccagcgacgatgggaggaggggtcagatcgcatcccttaaggtgtctagtgtaggtttctggttgggttttcccgtagtttaggtcgagtcattctcgttctattccttcttcctctccagcgctagatctatggtgatgtgaccatggctactatagatacaaccgtcgttcacatcaagatcaagccgtccaagttctgcaatccagttcggctacctgctacagtgtggacttcaaacggccgccaaatatgcatgcaagctccattttggatccatgattacttgatggaaagctctcagagtcatctttccaatgatctagcttcatcgccaaattccaacccagtcggccaaaatcacaaaaaaaaggtgttgcgtcacctataatgggcctatgggcctgtaacttctctgggaccccggcccaagtggggcccatgtggggtgcgccccaaccaggtggagcacgaccctagggtccccttaggtcgtcctcccacctccttaaatagttaggtacccctttagagtttcttgggttttgatagattaaagtttagccagtgctacttgcttgcagcgcacgtgtcggctagatcgtccgtctgcttgctcttcggaaccccaacttatcttgtgtattcattcctatttgctattcagattgctttttcttgttctgggcttgtttcttcgatttgcttgcaggaataaggttatttcgcaccggcaagatcaacaacccaggagagttgtattgaacgctaaggcgcaacagaacgtcttgtacggttgtagtcggatcgttaacgtttctcccaaatcatagttatcacaactcaccgaaagatcgggccaacaacagccttgagtgtcgagaggaactcagggttcatcaggtggtatcagagctttcattactcggtgagtttttatcttcctataaccagaaaatagccatacaaaaaaaatccgtatcatttacctagccatattgtgccattgcattgtttttttcagtttttgctttgttgaattttgtgttgcatcgtctcgtcgtgttgctggtcttagcgtctagttcgtttagagtttcgagttctggtcatgttttataccagagtcgtcgtcgcctctgtgtctctgttatcgtcgggacctacgaaaacggaatcggcttgctgccacgattctatttttgtagttttcaaaagtttctatcggttggatttggagttgttgagttgcatcttgggtttgctgattgccgtgcttctgttttggccgtgcctgtgtcgtgcacgagaggaggaaagtgaattaccaatctgattttggaagtagtcaagtttgttttggaaagatatagtagattggattggttaaaaatcagtttcatttttatcccatacaccaaatcctaattatcggctaccatccactccacctcctggccgactcccactcgtccctttggccgagtccgactccctccctccctttcacggttccaagttgtgtcaaacaccttggtgaatttttgtttggtatcggttttgagatctgtttggaaaaacggaaccggcataaattcagcattccatttttgtataatttgaattttgggtttagacttttacatttgagtccctgtaaattttatatttacgtttgagtccttgtaaccttacattaaggtccttgagtcagtttttgttaaaaaaaatcaagaaaaaagtgagaaaaaaaggcagaaaggtgcataaaaaaataaaagaaaaaaaaactgcaccaaaaaaaacagaaaaggaaaggaaagaaaaaaaagaaaagaagaaagaagaaagaaagaaaagagaaaatactgttatgtttgagctgaacttcatatatcagagttgtgcatgagttgttcctagtgctatcttgtggtatcgtttgtgtctaggctcggtctctagtacgttctagcctaggaccagcacggtacttgactttgaaccattattcaactttacattctctgatttgagcatttgctatccctttgctacatatttaagcctacccagagctccacagatatgattgcagccgtacagcaagtgtttcccaaggcatcgatacatccaatctccattggggtgcttggttaagtcggtgtacatcaccattccgcttgctttggtaagaacttgtaagagcttcgttaaaagcttgagtgtgtgtgatatttgagctgccactacctagtagttgataggagcgtgcatatttttgtgtgtttcttgtttgcttctaaccatggcaggattgcgtaagggaatacgagaacatcgacttctacaccttcgacgagatatgacgacttctccacgtgatgcatatgaggtacatgactataattttgaacaagttgcatctaagttaccattctatgatggaaagtattgattctgttgcatacattgattgggagctagcagtagacaatgaatttgatatatatgatttttctgatgctcaaatgattaaggctgctagtaataagtttacctcttctgcattattttggtggacttatgttagtaataaacctgaaacttaggatgaattgaaaaccatgatgagaaaacgctttgtgacttcttattacaaatgtactctttgggagaaattagaacatctgaaacaaggtgatagaactgttagggagtacattcatgaatttaaggtctgtatcatctacagtggtctcaaagagtgcaatgaaaatacaatgcgtagatttttcaatgggcttaattctgaaattcaggttttgcttgataatgtgacatataattatattgggcacctattcatgcttgctcgtagcattgagagttagatcatatcaaaggcgaggatgcatgaccaatgtgatttatctcctatttctgaatccccaatatacttatgtaatgatgatgtgcaaacattggaggagcaatcttttgtctcccctgttactaacgttttgcaggaagatcagcacatccaagaaaaggagaatggtatacttgagaagaaagaggatgaagcacctacgatgtctgaagaaagttcgcaaggtaaattaaatggtgctgagagaaatgaaggtgagtattctcaaggtgagctatacttgtccacttttcatgctatagtagagcaaccattagtggaatcaattgctgagttgcctttgtcacaaattgatttacttgctgttccttgtgataaagaagagttgtgcgataatgcttcacttatatccatgccacaactagtgaatgaacatgctgttcctgttgttaatactaact

SEQ ID NO: 5594 - DNA, 2316 bp, Oryza sativa
ccagttgagttggtcagctggcttcatcaatttttggaaaagtatgcttgttgctccagcggctgagctagcaaaataatttattacctgcaattagaaacacaaacgagaataaggatgccacagatgttctcttacctgttctgtaagctgattcagattgattgagctgacaccggccatgattcttatactcaaatctgtggaacaatccacacaacacaaatatacacggttcaatttaattaaggcatgtagcttggcagtgaaaggccacgatggtgatgggtgatcataggcatctaccatcaggttggaccaccagagatgatctctctgctgatgacgtgtactaatctacaatctatgagaactaaacatgtttaagaggatgaagtaacatatttaaggcattatatgcgtgattgcctgtccttgctggagagattggatgctggtcgggacatggcagagagctccaagggtatataggcatgcaagacttgcagtctcgcacagtgccctccaattctgggcagttgcaggtaagaaccacggctgtctccggtgggatgatccattgcagtgaaccatcatatttcattgacttattgaaggaatggagaaggattgattgttgagcttaagaggagattaattaaaaggaatgaacagtgcgctcctttggcttcccatctttttattgcatttctgatggtttccggctgtgataccctgggtgatcaaggagtgccgatctgagccacacatggctatcatacaatgcgagcctctggtagtcaatcaggtgtttgtgtacttgcgtggggaaagaggagataggcagcctggctgggctgggcctcaagtatgaccttgattagtactgcaagtttatctaacggctgataatcgagagacatgttgatccaatggctgaaacttgttgatgacgtggctaaacttggtgacttctttatggtaattattgctgtcagtgggttgtaactgtatagaaagaaaggattttgtgatggcacagtgcacaccatatattgctgggggcaaatagaatggtaaattgatttatgtaggggttactaaacttccattttttatatcgtagtaagtattttgtgtatttgtctggtgatttttaccagtattttgcacaaaaggtctttagtgggtctgcttgttaaatcttggaaacaaaaggagggaaaaataatggtcagtgctagttggcttactgttcagatttcaatgaatatacttttaaagtttctgctgatattgttacattatgtaaaaagggaaaatggttgatgcaagttattcttttcagcttttgtacaaattttcatggtcatgatgcaatattgaataacttcatctttttaggcatatgttcaacaattggagaatagcaggctaaagcttacacaactagaacaagaattgcaacgagctcgtcagcaggtttgcttctattgtgtctcgctgttttgagctctggctgcaagagttcatttcaagtaggcttacgggaatttctcacagggcatttttatatccagctcagtggaccagactcattccatgagtggaaatggtatatatcaaatccttcaatgtttaatatataatcactcttttttgcagcagcaactgtttggttgatcattacaatgggatatatgaaagcaatacataaacattctgccttgttgacagagcaattatactgtattttcttgcaggggcattggcttttgatatggagtatgcacgttggttggaagaacacaataggcaaattaatgagctaaggtctgcagtcaatgctcatgcaggtgataatgagctccgtggtgttgttgacaagatcatgtcacactatgaggagattttcaagcagaaaggaaatgcggccaaagcagatgtctttcatgtgttatcaggcatgtggaagacaccagctgagaggtgtttcttgtggctaggaggattccgaccatccgagcttttaaaggtctgtaaagtcttacgatgttcttgttgtttatttgagccatccttctattgcaaagcccctcctattaccaaaaccaatgtttctaccataatattattagcatatcaagaacaaattatcagtctatacctatttttccttctatttcatatactcatatcaccaggtcattgtaaacttgtgctgtaataggcagattgtagttttgataaaacactatcttgctttgcataactcttgcatacctcatttcttgccattggagagcatgttagtac

SEQ ID NO: 5595 - DNA, 5630 bp, Oryza sativa
ttcatttctgttaatcatttaactccttactgatttgtgatatttgagttgaattgtagcctcataggccctggcagatgataaatatttcaattgcataagatttgcagtagttgagaatgggtttatgatgattttggctaaactgaaatttaactgcaactatggttaaattctgttgcaaatatggcagactttctataccttttcagtttcatgtgtggtatgatctatggatctccttattcaagaggatactgatttacttgaatttggtatgagatgttacttggagttttcggttagggtgacagctgagttccaccatctctgattcaaactttttgttgtgcttttaatgttataagaataaaattggctgagttccactcaactccgagcccaattatttgttcttaaactgtatcttctgggaaccttatctcccattgcagactaaagatttgtattttttttcttttgctgttattctgactggaaccattgcagctttatgtggaaactatgtcaattttggtgtatttgagctgtatggtgacagagcacttgctgatgcccttgatatatctttaaagatgagcctctcagttccattgtctgacatattggcattcaaaaaggtattccttgcaactttagtgatttactattgttttgctgtgtagtgctattgcttttattaatatggttattaagatctcaaatatattcattctaagttttatagcattgaagatgtaaagttctcattatatcgcaatgaaagtgaattgaatgttatgtatatcaattaagcagaggtaattacttgtgcctcaggaactggactgagtgattttagtgccaatcttctaatctaactgagaaccctgcatttacgcacttggtccagttagacaacgctgttatgacagaatatacaaattgatcagatcctagtatcttagcctgtctagaaagatttgtatattctgtcataacagcgctgtcatttttttatttgaaaatatacacagtaaaattaccaggagaaaacatgaaatgagtaccgccaacagtgggctccagagttctatcaggaaactttttctttggaacatgggatgctgctgttattttttatttttatgccagacattttcaaacatttttttaagagcattctccaacccctagaactgtactccagttgtgtttgaactttgcatattttttttcaacattttgtttgtagtctccttggcattttaccagcaggtaccctgcatgcgagcttagtttatttatttaggtgatctcctggcaatttttgcccactggtaacatgcgtacaggtttagtgctatgttttccaacaattgtgcttttactggcttgatcatagacaaataaacagcctagacaccattccaggtcttgcattgtcccacattgatttatggttaaccagatgattgagatattcttgtttcatccgtggaagcattcatactaggctctttctttatttcagctgtcaaaagcattctatggatatattgaagttctgttcagcagccatatcacttttgttctcaatttggatacaaacaccttcgtgcatattgtcagcactcttgaatctggcttaaaaggtctagatacagggatatcaacacaggtatacgacatgatgctttttactgcttgtaaaatgttccccgcttcttgttacaacagcatcggtgaatcactgcttaaactgtgtcctatcggggaagacatacttccaatctgtggttgctggtagataataattgatgccatcataatactctattctcttttatgtggtttcccttttagtttcttctcttggatctggatgtcatgtgcaacctggttagggcccacatagaagcagcagtcaacctctctaggcctgcagtactgtgcacatgaatagtaatgggaacaacatctgcctatggttactgtttaatcatttccatgttcttcgatacggggtatatcgtaaaggtttgggttgtagaggtttattaaggaagcaatacacacaagcttttagtctcttttttatctccttcccttatgcagctacctcagcactgcttggttcattaagcctaagggcccttaactatgttcatcacattggaatccatcattgttctttagtgctttctgtttggactaatctgtaaattgttgcttccttttggcagtgtgcctctgccattgatagcttggcggccttttatttcaacaatatcacagctgctgatggccctccttcaccagctgcactaaatcttgctcggcatattggagagttccccactttatttcctcaggtttgtgttaataatcttctctaccatatgcagaaaggtctggatgtaattacattttgttttttttctgtgacagatactgaagacgctttttgagatcatcatctttgaggatgcgggtaatcaatggagtcttagtaggccaatactgagtctgataatgatcagtgaacaggtgcttgtctttttaaaacttttaaatcatgttccttagcatttcttttgcactcttttttccagtttgtattgtctttgttttttttctttttttttttgcgagggtctttagatcttttctaatcagttgtttttctttgtgcagatgtttagtaatttgagagcacagatattagcatcacaggtcagtgaactctctggtctgatattccactatgcagtcctgtctttctagttttatttttgggttaattggatccatgccactgcaaatatgccaatttgaaaaaatgtcactactattcagcattcggctatgtgccactgaaaattggagaaactggaaccgttcacattttccgtcaaaaatccctgttagcccccaactgcacgtgggccccatctccctcccctctcttctctttccccttctctctccaccaccgtagatgcggtaggtgttgtcgccatcgtctcggagccggaagatttgcgattcaccctcaccgatctcgcgacgatgggtgatgtggccgcaccagctgcggcggcgcgggcggcgaggccgacgagcccgttgcgcccgcccaaggcgatccgcagcaccaagccaaggggctcgacgaggagaccgtcatggcaccattcgtcaagcaccttgtctcggagccggcctgctgggatgcgcctgcgtcgtcgtcgtcgttgtcgagcgcctcgtctcggagccggcgagccagactgcgcctgcatcgtcgtcgtctgctcccccggcaaggtccccggccaccgcccccgtgccggtcgtcaccccgcccaccgccgcatcgctgtggccaaccctcgctgccaccgccaccgacctcctcccggagcgctcgctttcatctccttcccccgtgccgctcgtccctccgcacttcaccatcggctccccggctgccgattcccctcagccgtcgccctcctgggctcgccggcgtccatggcggagaagctccccggctgctaattccctcgacgacggcggtgagggtgctgcgtccgccggcaaggacgacgaggaacggacgggtcgcggcggctgctggtggagcagcgagagatggagggggggggggatcactggctagctgcagtggcaaggaccagcgagttcgaggtggagtgctcgccggtgtccatggtggagaagtgaagaaaggaagagggagagagatgacggaggttgacagaaaactggatggaagtggcatggttccaatttccccaaattctagtggcacgtagccgatatgctcaatagtagtggcattttttcgaattggcatatttgcagtggcatggatccaattaacccttttttttcctctgcttgaagctttctagtgtcaagttatcaacaatgtttccagtcatcagcgtgcaggtgttaggagacaagtttcttttcagtaaaaatattaaattctactagtacatcttttgattagaactgtatgtccagcttgtgatgtacctaagttttgttaacatatgtctgccaataacagcattagtaatcattattgaagaactaatgtacgtcttgtttgcagcctgtagaccagcaacaacgcctttcgcaatgcttcgagaagctgatgtctgatgttgctaggaacttggaaccaaagaacagagataaattcactaaaaatcttacaacattcaggcatgatttccgtgtgaagaacattcaggcatgacagctgttcaggaccagctaccagctttaaggtggtgcactcatgtgctgtaaatactttagcttagcttcgttttaggaaccaccattcccgtggggggaaagttatggtttaactcagtttggtttggattggctgaaagatgaagggttctcctgctgcacgtggtggcaaaatgcagttgttgatctcttaccttgtcgtgtactagactggcgagtgcaggagattcttcttcttcttcttcttcttcttcttcttcttcttcttcttcttcttcttcttcttcttcttctttttataccttagtgttaattccatctctttttgcttgtacagcaatattcatgtgtaagcctgtgatcgctgtttccctaagttgttagggcgaaagcagccatcgctcaaaatataattcatttgttaacaggttagaagaatagaaaaaaagttgtaaatggttgtgcttcctgttgctgtcaatgctcaaattggaagtgaggagacggtaaatttgctccttgagcttcaatacaggtttttattcagctaacgtctttttttgcggctctccatatttcggttcattatagccccggactaatgttgtgtacagcatttttcttttggaggtgctgtccagagttttggagctcgacggcgccttttgcctatggacctatggaaggcagttcttcagtcttgcccacggtatttgttgattaatcttgttctttagtcttcttcagagttcagattgtttagattgtctgattttccacttgctcttaagatgtattataggttaatatagctagttgggtttctgttctggtttccttggtttgacactattcaggttactattcttgattggtttcaaacttcccatatttcctgtaaaattcggtaccttacaacaagtatgaaagtacaaactattcatataaagtacgtcttaataattaattaaaataaaagcacagaatttttccagcactattgcttagctcactctttacatataattccatttaagaaaataccttctcaatactgcacttgtacaggaagaaccagtaaaaatctaaaacaagtaaacatctgaacaatggataaattggggattttaacgtctttgtgagtgtcactgtattggcacatcactccccagtttacgctctcactacaggccctatttagttcccacacaaaaattttatactctgtcacatcgaaccacatcgaacgtttgaatacccgtataaagtattaaatataggctaaaaaataactaatttgcatagattgcgactaatttgcgagatga

SEQ ID NO: 5596 - DNA, 20889 bp, Oryza sativa
  unsure (1)..(20889): unsure at all n locations
cacacatgtgaggatttgtgcgggaaacgcacatgtgaggatttaggtcctcaaagtctacatttgcgtgtgttgaacgcgcacgtgtgtgtgtgtgcatgtagtgttgcgttgtgtgagtgtggagtgagttcgtgtgtgcatcctcgttgtactctctcaaaaaaaaatagttcatagatttgtagatgcgcttagggctgtaagtgggtcagccgcgaatccacttatagttcaaaataagcgggttcgcggtttattttagcctataagtgggtttcgcgggttagccacttacacccctagacgcgctctccactcgtcttgttacccgaccgcctcgcaatgctagcttaatgattttgccccgctttggcaagatattatgaccacatgttcttctttgttattcgtgagtgagttgctgcaatctattgtgatatgttttttccttttagctaggaaagcaacgctttcccatttctatatatcagaaatgacaactgtagcagatcctgacaaaaaaacaaactactactgaaaggctacttcctttacaccgagcttcacacgggggtaggaagtccttcaaggacatactacaacacgatagtcaaatcataataatacactcgacagatacaattctcaaaatagaagtagggtattacttttcatcgagaaggtttgaatctgtctaaactctaaaatcttgttcccatcaatccatctactctacgtgctcatgtgttgctcctttattattgctgatataaaacatcgacatctacaatctccaacttgtccttgatactagagctatcgtcacagtatatccaataggtgacagctctacgttgagaatggccggccgtgcagccgcgccggagcatctcgatccatgtctgtcttgcgatgatgccactgtgatttgcgttgccggtgtagtcacgctcatgcagctgtgtgttgctccccaccgtcatctgcctcactccaccgtagaagcctctaagcacacaccactggctattagtgcagatacaatagtagactataaaccagctattaacacatttttaagaagataaaataggagagagaaaagcagtgggctatggatttatagccagctatagcaccgattataagatgcatgtgtgtatgacaggtgggaccaactatgaattatatagtatacgttcatagataactattgtatgaaccggctattaaattgactatagatgatttagagctgatagttggctatactattaaacttgctcttagtgccagccgccacaccaactcaatcgtctcgttcgtcggaagtcgatttgtctattcccttatagttaacgacattaagtgtactactgaaagatgaattctctcgatattgcggttggacaggtgtaatacgagggacaaagtccttcctataagcctaggacggaagacgtcctagtacaaaattttcgttcgttccaactgttggaaatcgcctaatggttatgacctattgtcggaaactgtcggagcaagttagtgatgccccactagttgggcccatggttttgagaagataaatagttggggaatgcctgtttaagagaataatatccttgtctctataacattgttaggcataaacatgcaactatttcagaaattttccaaatcagtcctctaagcttttcttggcgcagggaccttactggctctaagttagtggcgtggaatcaccttctctcacgcatcgctaatattatattatctcacgaccaagatgagtttaaatggaatctaaccactgatgacagattctcggttaaatctctttatcttgcgttggtgcagaccgatgttcccaatataaacaaaagaatctggaagattaaagccccccctaaagattaagatcttcttatgatacttacgttgtggagtagtcttaacaaaagataatcttattaaaagaaattggagaggaaacaagtcttgttatttctgccacaaagatgaaactattaatcatttgttctttgattgtcgttttgcccgcgcagtttggtctttaatccagtttgcttcgaatattagtttacctaataatacaactcatatgtttgggcattggataagaagacaaccacacaatttgagatctttggtcttattaggggcaactaccactatttggtctatttggttttgcagaaatgatgtggtttttgaaaggaaaaacatatcttctcctttgcaggttatctttttgattacacattggctccggtcatgggctatctttcagaaggtcaatttgtggggtactatcattgcggcttgttaacaattggagctagtggccatggagttttctaccccggcggatgggtggtgttctaggctacggttagagggcgcctgaagttctttttgtccctgctattgggatgatgagtttatcttttgtttctttcttgttggctgtgtgcattctttgggtgcagaagccggaggtgctctcagaataattgtatcacttgatagagttttactgagattaataaaacttccattatctaaaaaaaggttgggcccatggtgtttcgaacttggttccggtctatgtggaggttagtgtacaattttactcatctatatatcctactccctccatcccataatataagacagtcaaactcgacacgatttctaaaactaatcttttttcttataatttctcatattctataaggtttgtagcaataccatatgaaaaataaaattcaatgtcaatccaatgatattattttcaacaaataaaattcaatgcatattatactaattgttggtcaagtgttgcaagagctggatctaaaaaaacgtgcacatcttatactccctccatcccgattttgagtttttgcttgcactgtttgaccactcgtcttattcaaaaaaatttgaaattattatttattttttttgacttactttattatccaaagtactttaggcataactttttgtttttatatttgcacaaattttttgaataagacgagtggtcaaacagtgtaagtaaaaactcaaaatcccttatattatgggacgaagagagtattattggatggatggagtatatagttgctatatagttacaaccaataacttcataagtattgagccacatcatttagaaagaagagccattacatcatttccattcttaatcacaaccattcattttgtagctactattccacattaattagttagtatataaattagcattgagtgattcacttagtgtaaaatgttattgccataaagaagttacaccatcaccatctttgacaccattggataacacctttatagttcatatcagcatatatataatctttctcatatctatattttgaaattttgcagttgtattgcacacgccaatatctcgttgcaccatctgcatttcatttcaatgttgcgccatctaaatgcattgacgaatcatttctcagtctccaacatcgtctatcactttttgtttgctgaagtgtgttcctttgttgtgctttcatcgttggatgcatcagattcctttcttttacgtgttgccacttgccagctgaacgtgcaaatcagaaggtgatggcttgtcgcagggcctagcttcttgtttatggttgtgctcgtataagtatgttaccaaccatgtgttgggatcatcgttgttaggctcaacaatcttccttgccacgcaccccgtggactgcttctggttgcatctgtaccatgatctgaaatgttgccgtaaaatccagcttaactattgagtcttataacgtgaccatagaattctttgctagatgacatgcttataagatacaactctttgtttatctaataattattttattataaattaatttaataattttatttgatgaaaacactatcattagattaacatttgggtttacttttatatgatgatttgttgctataaacattatagaatataagaaatttaaagtcaaagattagttttagagggattgtgccaagtttgaccacgtcttattcagtgggctggagggagtataacatcaaccttatcaaaattttgtaacacattttggagataccaaattttggtaatattgtaggtgtttagtttgacgccattccataatttggtactacctctgtttcatattaagttgttttgacttttttctaaataaaatttcttcaggtttgagcaagtttttttttaaaaaatatagtaatatttttaacacaaaacaaagaaactataaaaaaaatatgttcaatgctagatgtaatgaaactaatttgatgctataaatgtttctatttttgtttataaacttggttaaactttcaataagtttgactttaaaaaatcaaaacgacttataatatgaaacgaagggagtagtgtttttttaagagtaaacttatgaaaatactaaagtttggtatgattgtattggtgagatcatgtttagtttgtatcataccagattttggtgagttgaaaatggcaataaagtgaacaagtatctgatcacaaaagcatgtttgttaggatgtgggcagttaacccaagttaacttttatcataatcctgttcagaacatagaataagaaaatgatgtaccatagctttattttacgcaaaataattaagttgttaagttatgtcttgctaaattttgaaagtccaaaaaaaactctcctttctgactgggcagtacatatacatttagagatatatgcatgttctcaccttttgtacttggagccaagtaaatccttttcactatactttctccaattccagccatcatctgtcgtagtcttcttaaggagatattttactgtgtatttgtccctgtatattaggaaaattaaaacaaagaacaataagaatccatatgcatcttttataggcacaattacaaataacaataagaatccatatgcatcttttatgccccaaacatggatggtacttgtagattcgccccagggttgattgcaattgtaaaaatgatgtgtcatgtatatctttctactccctccatcccaaaatataagaatctagtactgaatgtgacgtttcctagtataacgtatccaaacagactctctgtctagatacattatactagaaaatgtcctatttagttctagattcttatattttggaacagatatatagtattttgcaccaagaccaagggacacttttacggtacccttctattgcctctggcagtaggatagtaggaagtaaatgtaaccattgattgattaaggtagtaagggggtgtttggcagagaggggctaaacggagggacttatgttttcgacagagtgccttaacatcagtcccttgggagagacttatgtttttgagagtggggctaaaatttagccccactttagtccctccaaccaaacaccacataacaagggtattttcgataactatttcatttgaaaattagaaactctcgtcattatttttgccttgccctttgaccgatgttcgcgcgctgtggcttctcggattgggtgatgcgacgtcgggatgtcatcccgcacggcagtgatatgccaccggcgttcgccccgatggctcgtcctctcatgtgcaggcagataattacaaacatggaatgcaagcaaacaccagaaccaaacctgctattgttaattggaagccctaacatgtagtattgttcaatcctttatatgttgaatcgaaatcatcaactatgtagaagtatcaattatcaaatcacggattaaaaatagtcaacagaaaaactacgacaatgcttccttctgagcaaccgattccaactagaaaaatcggacgcccgcagcacatacagatttttgtccccccaccctctccttttagttgcacatgtcatcacatcaatagtcaacatgcatacaacacatccccccacctctctcgtcaatctcactcttcgtaatttaacttaatagcaaagctttaaatattttttttatctaaactatgtatctgatatatgatccgattataccgttgtattcattgcaattaaatcttcgtaataagatctcatgattatattttgataaaaaaatatttttaaggtttttttgttctaatgctttttctaaatattgcaataagtagtttactatgtttcactaggtcatttagaatgttgcgtgtagtgctatttgattgtttcagcagttattttgtgatgatttaaatgatgtttcattaggtcatttggagtgttgcatgcagtgctctttgaatatttcagtaggtatatgtgtgatgttacaacaaatattttgttatgtttcagttgttattgtgtgatgtttcaacagttataactgttaaatttatttgcaataaaaatataatcatgtgatatttgtttaaagatttaatcacgacgaatttaacggtgcaatcaattcgcaaattggataactaatttgtgataaaaaatgatttacatattgaccgtcagtcatcagatgaaaacaaatgaatggttaatattcattatagggcactgtaaaattcccaatttacaagtaccatccaactttatggcacgtgagcaagtgtccataatgttcaggcttgtatgttcatattttgcatggagcgaataaaaattactgacaatttttttctggtctcatcattttgttactaggctacccttgataagtcgaccaaatatttatactgaatttaaaatatgcaaaattatatttctttacctttgaagcttttcccacatgagacagctttccagtgaactgcttccaaaacgaagtttggggcacctgacaacttttaaatttgaaatagacaacaaaggatcatctactgataataactcttttcaatcactgatttccagtttctgtaacattggcatttcaggacagaatctgacagacttgagcttctggaagctttcaatcttcagtgactttagtgatggcaattctgagtaagctggaagttgatcaccacagtgaaatgacaaatataatagcgaaatcagtggcggcaaattagttagttttgggcatctgctaatacagagatgggaaagtcgtgggaaatccccattgtttgttccattccagaattgcagagagtacatctcccacagattcagtatctccagtgatgggaatataggggcatgttttccttcagtagtcaaagggttacttctttgtccaaagctttctacagcatacattttatgtatgaggagatatttaagaaaaggcaggtcaccaagatgtgggatctcattacagtcttggcagtcatcgatagtaatcgagacaagcatggaaagtgaagaatcctgaatccagttggggaataaattcccagaataatttcgaatggagagctcctgcaggttagtgtttggctgaagattatgaaggacctgattagcaatttctttgtcactgtcatcttccatgtcctgactgctccaacaccattccagtgtcaaagctcctaggaattgcttacctactagatttgcttctttggcatcatcacttgcagtaatattctgaagacctgttatatgaacatgtccccttagtccactgagattcttcaggtccccaattgaacaatgtgataaatcatcccccgtattaaatactgttaatgtttgcagatcagttagttgcccgatcccatgaggcatgctaacatgaacatttcctggttccttttggacatcaaggtgccgcagctttgtcaaattcattgtgctttccggtaactcaatgagacagcaacaatacttgagttctaatgtctgaagggtttgtaactgacctatttcagctgggagactttggatctttgtattgttcagagccaagaattgcaagtgtttcatcttcataatagaactggggagctctcgtattgttgtacagctcaaattcaacgctcttaaaaatctacatttcatgagaagatcattcagacccagtattttcaaaagtggcacaaatgaacctgggtactctgatgcagatctcttgacaaccatcagggactgcagatgtctttgtactttagtcagcacaactgacttggaatctggaagaacaactgaaaggtggcaaatattttctggaaggctgcaaaatgcttcccctgaactgaagcattcatcctttgagacggagcacgccaaatcatgaaataactcatgcataacaaacttatccttatgatcatcatcgcgagagggaccgttttgaaaaaatgatctgcagaacaactcattaaaatactgcagaccagtgtcttctggttgactgtcttcttcagggttgataaaaccttgagaaatccataactggacgaggtgatgcttgacaaaaacatagtttcttggaaataaggaacaaaatttgatgcactgtttcagacgtgatggcaaaagatcataacaaagtcttagtgctggtaagataccaccaccaacaccaagggaattgatttcaaacaaaagggaactgatttcaaacaaaccagtttctgaatgacataataacctagagctaattccctaattgataaatgcaattaataattggaattggcattgtgggatttttcttgggttccacatgtcacaattgattaataggatttttagtggaattttcagagccctataaataattttaacccatcaaaattcataaaccgcaatatttaaatcctagggaaattcctttttccttttctttttctttcccttctttttctttgttgggccgtcggcccaacctccctcccgcgcgccctctttgttgggccggcccgctcctcccttccccttcccgaagtcctccctccctccctctctccttcgggcgccgacaggtggggcccacctgtcggtcgtctcccacctccagccgttggagctggggctccaaccgccgccgccgaaaccgccgctcccacgtcgccgtccgcgtcgaccgcgcccactccacgtacacgcgccgcgcccacgtcgtcgcccgccgctcctccgcctttcccgctcgcgcgcgcgcccgcaaatcggcgggattcgatttgaatctcgtcccctctctctctctccactctcccacgtctccggccaaataggggccatcaccggccgtttccgcccctcccgtgtcctataaatcactcccccgagtcccctctccctttttccgcgctcgccgctctctcccgtgcctcatatcgtcgtcgcgctgctctcccgagctccgccgctcgccgccgtatttcagccgcgcaccgccgccgctagagccgttgctgcgcctagccgccgccgccgctagcttcgtcgtcacgtgggtcatctcgaccaccgcctcgcgttgccggaatcccaccggaaccctatctccctcgcgagcaggtgagatatccatccccctccgtctccggtcaacaatggtggccgccgtggtcacttaccccacccctaacccatctctgctccctcctagggtgccaccgccgcccgtccgcgcctccgcatcgccggttgtcgccgccgccttcttccttcgcgccggccgccgttctcgccagtgaggaatcccgctctcctccttcctttcctctttctctcccatgagcaccgctgcgatccgcgcgtgcgtcgtcgtcttcggccgtgcgccgccgctttcgcgccggttgccgccgcctcccgcggcgccgcttgccgtcgccggcggccgctcgccgccgccgctccccaaggccggccggtcggttttgtgccgagcagagccatgccaagccaccgcccgcgccgtccgatcggcctcccggccgatctggacagtcggtcccgtggaccggcggtggaccacccgcgtggtcccggtccatggtggaccagccgcctcgtgccgctgacaggcggggcccgcttgccggcgccgcgccccctcccttgatgacgtcagccctggggttttattgcgcaataattaattaaggccttttctttagtagtaaaaacacagattatcttctaaaattcatatctaattcatcggagctccgtgtaagtccattcaagtctcagtaaattcataaaaatccctagaatccattaaaaatggttttgtttcctgtttcagtagtcttatagcatgttttgcttgtgtgctttgtttgtcacatagatctcggccgtttcgtcgatccgcggtttctcgaagacgttgctgaggtctcatcagtgcgagagcaaggcaagttatgcattacaattgatcatattgtacccaatttacaaatatcccgcatttctattaaatgttgcattcttttacaatgtcatgtgggatgggtcctatcactcagccatttattgtttgccttatgccattgataacttgggtatcaaaatgattagatgttggttttggaaatgcttagccatgcttagttcaactagtacacaaatggggatcacattattacatagactttgactattagcatagctttggactagtgccaccgcaatggtgttagttaattaaaatacactgaatggtgggctatgggtgcatggttttgctggtcgcacccatggcaattaaggaccggttcacgggaaaccctgggagacttaccgtgcttaccacaagtgggagtgggtaactgcttgatctgaagtatagctcgaccctttcctaggcaccggtggcgagggtgggcatgatggagttgggtcggccggggtgtccggttgtccagttgccggattcaccacggcacaagaggggaccgcccactgcctttttaggggtgggggtgaaaccttagcatggtgtggatggttaggggagggttatgcggagggtcttgtcacgatttccccctttgcagtattatggtgatacttcggggcatgtcgacatgtgtggaatcgtatcttgtgggtacagttgtacacctctggccagagtaaaactattcgaatagccgtgcccgcggttatgggcgatcacccagattcaccgtgattagtcttacccctagtttagcttaatgaactggtgtagttcaggtggttggttgggcctgttgcaacgtggtgtagcgttggacagtgattggttaatattgattaattactacaactgttttactgctttcaacttctgcttttaaatgctagctttgtgcaaatgaacccctagcctcctttggttatatcctacatcatacctcctcttccggtaagtcttgctgagtacagtgggtagtactcagccttgctctcttttcccccacaccagagttgaagttctttccagttggagctgtatcgaagaagttgatctcatcgctgccgtcaagggatgcctgtggagtggagtcgccccgctgcagaagtcaagcgtccaagtctagctcgttttatctttccgctgcatttgtaatcttttctatttttgtaagacgtggatctatatgtcaacaactgtcgtttgtgtaccctggctggtcctggacagggatttgatgcacattcagcttagaaattctggttcgtgaatttctgggcgtgacaagttggtatcagagccgaccttgaccgtagaacaagccaactggaaacctaagagccctctgaaccccttttcatctgcatatgctctttgtacttggatttgtttcgggaaaatttggggttttgcctctttggtttgcgggaaaaatcttggtcgttcattcggatcggatctttaaaattagctcagtctagggttttagaaaaaaatatttggagtttattcgacaatcagtcgggaatctattgggtgatatgcattaggtcgtgtctatgtttgatggggcatttttatgcgcatcattttccatgcatctgttttatgcattaagttattgtttagtcagttgcattagtgtcgttatctgggttcatgaaaaatgttctatgcataaaaatcagtcatgctcggttatttatttgagtcatttgttgctttgtttaatttggatttgagcatgaattggttcctatcccttgtccatctttagatgtcagacctgttcctcgatcgcaagcgccgctccaagcttcagagtcgccgcccttagctttatcgtcttcttagtgtgtttgcttgctagtttccgtgtttaggtttgttgcttgtgggttagtcggcggtcgatatcatgtgtcagtggtatgtctgccttaattaggagttgtttgcctctttttcagtgttttaatcaagattaagataattgcacgtaaatttataagaaagattagtttctaagccccctgttttcttccttttctcatatttctacctatccccctccagatggtgaagacaaggaatggttcccgtgaatccaacaacgccagtggcagcgaagagcatatcagtggagcatgtgccagcgatgcatctgacaacagtccatctccaccgcccgagaacccaacgatcgcttaggtgttggacaatcagactcagatgatgacgatgatgatgtaacagatgcaacaacagtaccatcaggtgttgcagcaggtgcagcagcaagcacaacagcagcagcagcagaacctgcagttttgtcttccaccactccagtctaagatgttagagtttctccgtgtcaagacaccgactttctcaagcaccaccaacccaatcgaggccaacgactagcttcatgctattgagaagaagctgaaccttttgcaatgcaacgaccaagagaatgttgcttttgctacacaccagctggaaggtcccgcttctgtttggcgggacaactatatggtgacccgtccagctgggacagaggttacctggtcagagttttgtcagagtttcaataaagcacaagttcctgagggaatcgtggcacaaaagaagagagagttccgttctccgcaacaaggaaccagagcagttatagagtatttgcatgagttcaaccgtctcgcgcgttatgcccctgaggacgtgcgcactgatgccgagaggcaggagaagtttttgtctggtcttgatgacgaattgaccaaccagttgatctgcagagattatgaggactttgagaagctggtggacaaagctatccgtcaggaagagcagtgcaacaaaatgaaccgtaagaggaaggcagctcagctcagaacttcccaggggatcagtcagaagccttgcttcacgatgggacatcagggtggaccttccacaatgattatccggcagcaccgtccctaccacccgggtagcttcaacaagaactacaacagtgagcagcacagcctcaaccctactccaagtcttctaatgattccagctcagtcatttcagccagctctgcctgctcagccagaacagcccaagaagtttggagaaaagcccgaactctgcttcaattgtaacgagtcaggatacatggtacgtacgtgcccgaagccaagacgtgccggactcaagttcgtttaggcctgtgtcaatcatgcatctgcagaggaggcgcagtcagcaccagagattatattgggtacattccccgtcaactcgacaccggcagtaatattgtttgattctggtgcaactcattccttcatttccaagcgttttgctggtgcacatgggttatctttagtgaagcttaagatacctatgcgagttcatactcctggaggtggcatgaccacaactcactattgcccatctgtgacagttgaaatccaagggttgatttttccagccaacctcattcttctcgagtccaaggaccttgatgttattcttggaatggattggttgacaaggcacagaggagtgattcattgcgttagccgcaccatcaagttgaccaatgcgaaaggagaagtggtaaccttccagtctccagtaccgcagaagccaggaatcagtctgaaccaggccactggtgaggtagcagtggagaaaacctctaagaagttggaggatattcccatagttagagagtatccagaggtttttccggatgatctgacaacaatgccaccaaaaagggatatcgagttctggattgacttggcacttggaactgcaccgatccacaagaggccttacagaatgggagccaacgagttggcggaagtcaagaagcaagttgatgagcagttacagaagggatacatccgcccgagcacgtcgccttggggtgctccggtaatctttgtggaaaagaaagacaaaactaagaggatgtgtgttgactaccgcgcactcaatgaggtcactattaagaacaagtatccgttgccaagaattgatgatctgtttgatcagttgaaaggagctactatgttctctaagatagacctacgatcaggctatcaccagttgagaatccgagaggaggacattccaaagacagcattcatcattcattatgggttgttcgaatgcacggttatgtctttcggactcactaacgcacctgccttcttcatgaatttgatgaacaaggtgtttatggaatttctggacaagtttgttatggttttcatcgatgacatactgatctactccaagtccaaggaagaacatgagcagcatcttcggctggtacttgaaaagttaaaggagcaccagctatatgccaagttcagcaagtgtgacttctggcttaaggaagttcagtttctcggtcacatcgtgaatgctcaaggagtagctgtggatccagcaaatgtggagtcagttaccaaatggaccccaccaaggacagtcactcaggttcggagtttcttaggacttgcgggctattaccgtcggttcattgagaacttctctaaaattgccaagccaatgacccagctattgaagaaggaagaaaagtttatctggtctgctgaatgtaataggagttttgaagaactcaaacgacggttggtgtctgcacccgttttaattttgccagatcagacgaaagacttccaggtctattgtgatgcatctcgccaagggttagggtgtgtggtgatgcaagatggcaaagtggttgcttatgcttcacgtcagttgcgtcctcatgaaggcaactacccgacccacgatctgaaattggccgcagttgttcatgctttaaagatctggcggcactatctcatcggtaaccgttgtgaggtatatacagatcacaaaagtctaaagtacatcttcacccaagctgatctgaatctccgacagcgaagatggttggagctaattaaagattatgatatgggaatacactattatcccggcaaggctaatgtggtagcagatgccttgagcaggaagagctactgcaacgtcgcatgggtagaggaactatgctgtgaggttcaacgtgatttggaacatctgaaccttggtatagttgagcacggatttgtggctgccctagtggcacagcccacactggtggagtaggttcgcatagctcaggcaagcgatcctgagatagcagaactcaaaaagaacatgagggttggaaaagcccgaggttttgttgaggatgaacaaggaacaatctgaatgggagaaagattgtgtgtacctgaaaacaaggagttaaaagacctgatagtgacagaagctcatcaaacccaatattcaatccatccctgcagtaccaaaatgtaccaagacctcaaagaaaaattctggtgggtcagcatgagaagggaaatagctgaattcgtcgcactctgtgatgtctgtcagcgagtaaaggcagaacaccaaaggccagcaggtttgctatagccccttcagattccataatggaagtgggaagaaattggaatggactttatcaccggtttgcctaggacgtcatcggggcacgattctatttgggtagtcgttgatcgagtcaccaaagtggctcacttcattccggtgcatactacctactcagggaagaagttagcagagctttatctggcaagaatcatgtgcttacatggtgtatctaagaagatcgtgtctgatcgaggaagccaattcacttcaaagttctggcagaaattgcaataagaattgggaacctgtctgaacttctgcacagcctaccatccgcaaactgatggccagactgagcgagttaatcaaatattggaggatatgttgagagcctgtgcgcttgactttggtggagcatgggacaaaagcttgccgtatgctgagttctcctacaacaacagttaccaggctagtctgcaaatggcactgtttgaagcattgtatggacggaggtgtcgtactctgctcttctgggatcagaccggggaacaccagttgtttggtacagaagttttaaatgaggcagaagagaaagtcagagctgtcagggaaagattgagaatcgcacaatctcgacagaatagctatgcagacaaccgccgaagggagctcgctttcgaagcaggggattatgtgtatctccgtgtcactccgctcaggggagtacaccactttcaaaccaaaggaaagttggcaccacgctttgtgggaccatatcggattttggaacgcaggggtgaagtttcttaccagcttgagccttccctccaacatgcttggcattcataatgtgtttcacgtctctcagttgaagaaatgtttgagagttcctgaggaacagacaagtccggatcacatcgaaattcaggaagatctgacctatgtggagaagccagtccgcatccttgagaccagcgagagaaggaccagaaacaaggtaatcagattctacaaagttcaatggagccaccactcagaagaagaggccacttgggaaagagaagatgagttgaaggccgcctatccgcacctcttcgccagctcttccgaatctcggggtcgagattccgtttaaggggggtaggttcgtcacgccctgaagtttccccctttttcttactttaaaaatttgttaaataaatcgtccggagaaattgttctaattaacctagagctaattccctaattgataaatgcaattaataattggaattggcattgtgggatttttcttgggttccacatgtcgcaattgattaataggatttttagtggaattttcagagccctataaataattttaacccattaaaattcataaaccgcaatatttaaatcccagggaaattcctttttccttttctttttctttaccttcttnttctttgttgggccgtcagcccaacctccctcccgcgcgccctctttgctgggccggcccgctcctcccttccccttcccgaagtcctccctccctccctctctcattcgggggctgataggtggggcccacctgtcggtcgtctcccacctccagccgttgtgtcctataaatcactccccgagtcccctctccctttttccgcgctcgccgctctctcccatgcctactattgtcgccgcgccgctctcccgagctccgccgctcgccgccgcatttcagccacgcaccaccgccgctagagccgccgccgccgctagcttcgtcgtcacgtgggtcatctcggccaccgcctcacgttgccggaaccccaccggaaccctatctccctcatgagccggtgagatatccatcctcctccgtctccggtcaacaatagtggccgctgtggtcacttaccccacccctaacccatctctgctccctcctagggtgccgccgccgcccgtccgcacctccgcatcgccggtcgtcaccgccgccttcttccttcgcgccgtccgccgtgctcgccggtgaggaatccccctctcctccttcctttcctctctctctcccatgagcgccgccgccctccgcgcgtgcgtcgtcgtcttcggccgtgcgccgccgctttcgcgccggtcgccgccgcctcccgcgccgccgcttgccgtcgctggcgaccgctcgctgccgccgctccccatggccggctggccggttttgtgccgagcagagccgtgccaagccgccgcccgcgccgtccgatcggcctcccggccgatctggacagtcggtctagtggaccggcggtggaccacccgcgtggtcccggtccacggtggaccagccgcctcgtgccgctgacaggcgaggcccgcttgccggcgccgcgccccctcccttgatgacgtcagccctggggatttattgcgcaataattaattaaggccttttctttattagtaaaaacacagattatcttctaaaattcatatctaattcatcggaactccgtgtaagtccattcaagtctcagtaaattcataaaaatccctaaaatccattaaaaatggttttgtttcctgtttcagtagtcttatagcatgttttgcttgtgtgctttgtttgtcacatagatctcggccgtttcgtcgatccgcggtttctcgaagacgttgctgaggtctcatcagtgcgagagcaaggcaagttatgcattacaattgatcatattgtacccaatttacaaatatcccgcatttctattaaatgttgcattcttttacaatgtcatgtgggatgggtcctatcactcagccatttattgtttgccttatgccattgataacttgggtatcaaaatgattagatgttggttttggaaatgcttagccatgcttagttcaactagtacacaaatggggatcacattattacatagactttgactattagcatagctttggactagtgccaccgcaatggtgttagttaattaaaatacactgaatggtgggctatgggtgcatggttttgctggtcgcacccatggcaattaaggaccggttcacgggaaaccctgggagacttaccgtgcttaccacaagtgggagtgggtaactgcttgatctgaagtatagctcgaccctttcctaggcaccggtggcgagggtgggcatgatggagttgggtcggccggggtgtccggttgtccagttgccggattcaccacggcacaagaggggaccgcccactgcctttttaggggtgggggtgaaaccttagcatggtgtggatggttaggggagggttatgcggagggtcttgtcacgatttccccctttgcagtattatggtgatacttcggggcatgtcgacatgtgtggaatcgtatcttgtgggtacagttgtacacctctggccagagtaaaactatttgaatagccgtgcccgcggttatgggcgatcacccagattcaccgtgattagtcttacccctagtttagcttaatgaactggtgtagttcaagtggttggttgggcctgttgcaacgtggtgtagcgttggacagtgattggttaatattgattaattactacaactgttttactgctttcaacttctgcttttaaatgctagctttgtgcaaatgaacccctagcctcctttggttatatcctacatcatacctcctcttccggtaagtcttgctgagtacagtgggtagtactcagccttgctctcttttcccccacaccagagttgaagttctttccagttggagctgtatcgaagaagttgatctcatcgctgccgtcaagggatgcctgtggagtggagtcgccccgctgcagaagtcaagcgtccaagtctagctcgttttatctttccgctgcatttgtaatcttttctatttttgtaagacgtggatctatatgtcaacaactgtcgtttgtgtaccctggctggtcctggacagggatttgatgcacattcagcttagaaattctggttcgtgaatttctgggcgtgacaagttggtatcagagccgaccttgaccgtagaacaagccaactggaaacctaagagccctctgaaccccttttcatctgcatatgctctttgtacttggatttgtttcgggaaaatttggggttttgcctctttggtttgcgggaaaaatcttggtcgttcattcggatcggatctttaaaattagctcagtctagggttttagaaaaaaatatttggagtttattcgacaatcagtcgggaatctattgggtgatatgcattaggtcgtgtctatgtttgatggggcatttttatgcgcatcattttccatgcatctgttttatgcattaagttattgtttagtcagttgcattagtgtcgttatctgggttcatgaaaaatgttctatgcataaaaatcagtcatgctcggttatttatttgagtcatttgttgctttgtttaatttggatttgagcatgaattggttcctatcccttgtccatctttagatgtcagacctgttcctcgatcgcaagcgccgctccaagcttcagagtcgccgcccttagctttatcgtcttcttagtgtgtttgcttgctagtttccgtgtttaggtttgttgcttgtgggttagtcggcggtcgatatcatgtgtcagtggtatgtctgccttaattaggagttgtttgcctctttttcagtgttttaatcaagattaagataattgcacgtaaatttataagaaagattagtttctaagccccctgttttcttccttttctcatatttctacctatccccctccagatggtgaagacaaggaatggttcccgtgaatccaacaacgccagtggcagcgaagagcatatcagtggagcatgtgccagcgatgcatctgacaacagtccatctccaccgcccgagaa

SEQ ID NO: 5597 - DNA, 25684 bp, Oryza sativa
ctccccacattctccccccggcctctccctcggccccacagacacaaccaggtgaaaaatgtcacccgcccaacccccgtaggggacctggcgggccccactcacccggatgcgtgaacagtgagtggcggtggcggggattcgtaaaaatgtcatttcaaaaaatatgtttatatataatctctcatattttttaaaataggagtaaaaatgtcatttcaaatttctcagtaaaaaatatctctctcagtctcatacggtgtttgtgtaaaaaattttagaaaagtgacatctcaatagtgccactccgtaagataggcaaatagttaaaaacccaatgtgagggagaacatcaggaagttatactaatggaaagtactagtacttgatatttcccaaatgaagatagcaaggggtgtattactccctccgcctctgaataaatttatttaattgtcttctgttgtttatcacaaaataaatttacttttacaaaattatattgaagatcgattatgaaagtaaaagataaatgtgttgaatgtagataaagtagaaaaataattatatcgatatttgataaaattaaagtattttaatttatttcttacttatgttgaaatggagataatatcagcttaggccatgtttagttcccaaaaacttttcccaaaaacatcacatcgaatctttggacatatatatgaagcattaaatatggataaaaagaaaaactaattgcacagtttggatgtaaatcgcgagacgaatcttttgagtctaattaggccataattagtcataattaagtgctacagtaacccacatgtgctaatgacgaattaattaggctcaaaagattcgtctcgcggtttccaggcgagctgtgaaatcagttttttttaatcgtgtccaaaaatccctttcgacatccggtcaaacgtccgatatgacacccaaagattttcatttcaccaactaaagatgcccttagctatgggaaacctcgggagaaggcgcgtgcacctataaggtaccactttgaacgtacgtgctctccaagaactaataatagagaaaaaaaataagaaaacgcaagagtagactaaaaaggttattgaaatataacaacagaagattaaggagtaaataattaagagcgtatctgatcgtacgcatggcaaaatggatgaaaaacaaatttaataaaaggaaaacaaaaaggaaagaagaggtagcttaattaattagctatagctgtagctcttacaggcgcatatgcagacgatccagatgtagaagaagttgaggtaagggatgccggggtgggcctcgcacctctccttcgtccggcacccggggcaccgccgccgcctccccgccgccgccggtaccagcaatggcgccgccgccgcagcgtcgtcgccgccggccttgtctccggcggccattattactagctcaatcggtcaatccctcctcgatctcctactagctagcttagctagtctgtctccggcgagcagagaggaggaaagaggtgtactgtacaggagcagctacacggagtacaggagcttggctatatatggcgcgcgcgcgttttattggcgatggcgcccacggggactgtcgctagggctgtcaacgagcggagctcacctgtgcaggttcgagctcgatataagcttcagccgagctggctcataactcatgaagaagtcacctctgttgtaaagtatccctgagagagtaagatgttgttgtattttgttcaaaatatgataatttcttcataacattcttttctcagccaaaatcacaacacttcaccattcaattttctcgcctaactctatttctcgaccaatcatcattttcttccatttaattctaaatattttcttagtactcacattcaaccctaaaaatctttatattctggaatggagggagtaccactatacatatattttaaggatcgaatctctcaataaataaaagcaactaatttctatttaatcatatacatacataaataaggagaaaacaaaacaatataaatatgtggcaccgatacaaactacttcgttgtgttgaatacttatatataaataatataatatatactttgatctactaatttgtaaagtaaaaaataaaatacatatattgtcaggctcgataatagcttgagctcagctcgacaaagctcacgagattttggtataggctcggacttgacttgtcagaagctcgagccaagctagaactattaagcctacgatgagtcggttaaaggtgtaattgattaactagtgaaacttatttataaacttgttttattttaatatataagtgagtttatggattagccacttactactgcacctctcgtggcgattgagcagcttgtgagtggctactgagtgcccagctttttttttcttttacagccctagacgtcgtcaaacacaaacgtacggagcggtgaggtccgtgaggaaattggtaggtcgcacgtgctgggaggatggacctgctggggccgcgtgcttattaggtgtgtggcacgttcgattagtttgcacgttccgatgatcccgtgagatgtacagtacgtataacgtactcacacagtctccgagctttgcaaatgccagggctagctatcattactgtctttttactatataagaccaagtttaatataatgtatagataactattagcttcaaatcatttatagtcaatttaataactaattcatacaatagttacctataaacatatagtatactattaatatctagtcccatctgtcaacacattgtgtcttgaagtccatgctgaagctgctcttttttctctttttttatcttctcaacatatgtttatagctgatttatagtcatctattgtacctgctcttaaggttataagtataaactccaaagtgttatgtgtatgtttaaataatgatgtggaggagagaagagaagagaagagagaggaagatccacctcttatgcaacgggtaacctccacacaaactttaaaaatcaagagaaaataaaagaggttgattggtggcaagtgcattagtactagtgtattaaatgcaattcatttatataagttagttttaattttatagatggatgatgtggataaaattgaaggtgaccaccatctctattataaaacttacctttaaacaactgagtctgagtgattatatctgaccacgcctagccccattcgaatctgctaaggatgaagattaaaagcagacatgtcaaacaaaaaagtcattaatacttgattaattaagggcctgtttggtacagctccaactcttaaatttagctccaggagttgagtctggagtggagttgtggagctgcctaaacctagctccacaactctagttcattttgtgagagagctccatccagctccactcccattttttgtggagctgaaactgtttggctgagttccagctccaggaggggtggagctggagctgtgctaaataggccctaaattttaattattacaaacttgaaaaatagattaatatgatgttttaaagcaactaccgcatagaaagttttcgtataaaatacattgtttagtagtttaaaaaacgtgatattgaaaacgagggaaaatcttatcttgatgaatgtaatgcgcccggtgatacatcgagaacctcatggctcatgccttcctaatcgtgctaactacgccattatattggattcggacgtacgtaatcgcagtgttttaatccaattgaccattagtggcgcgtgtcacgcactctcaacgatctcgtacaggggagagagagagagagagatccgcggacagaggcaaaatggtcaattgcaatataatagagggtttcaacaactgcaaaacagtctataaaggtgatgaatcatcgaggtgacaaagaaatagtcaaatagatggtaatcaattgcaatatagagggtttcagtgaatcaattggcaaatcgttgattttctcgcaaacatgagatatataaaatgtataataagctagcttgtgatatatagctctgagatcagtcaagacaacgcggcgccgtgccgccgtgcaacacaaaaagcccccttcaccggccggtgttgcatacctctcgtgctatgtgcatcgcgtccccaacaccacctacggaccgtggttagttttattttccctaattaaccaactgaatcaaccaaaaatccaaaactcaacaacgtacttgcacagttgcacttgaaaaatacgtatttgaagagaagcaaacgtgtgcaacttacgaccccaatattttagcccctttgattagaaaaaaattaaatgatcgtattgctatagaaaaaactcataagggcattgaaatttgggattggatcatatcttttttgaaattcatatgaaattgaaaaaaatggtaagccccgtgcagacggtagatagtcggaagttgtctatcatatggtaaaagacgttggtcgaaatcgtcatatatctgtgacgttgtcacgtcgcagaagggatcagaatgagcggggcatctagatctatactccctccgtccctaataaaatcaaaccttagcatccaagaagctattaaggaaagaaacaaaagatcaaataacccttaactaatgcaaaaattgtaggcaaaatttgcttcaggacatcgaaaaaaagtgtaattagttaggggacaccgtaagaacgcgtatttgctgtagggcattgcaaaaaactagtaattagctgttgaatacccgcgggattattttattatatccggacgaattggagagagaaacagatgtgtaagtatgattctaccctttaattttttcctttttctttattcttccttattcttttctccctctttcattctttctctctttcttttcttctctttcttcaaccaagcccgaggaagagggagagcgccggcaacggcgtgcgggtcggtgcggtgctacgcggcggaggtagcgccagagcaggaggactctgcaaggtatgctctccttctgctccgtctccgtggtgcgcgcatcgttcggtgcgcgatccgaccactaggacaaagtccctgcacgagctcaacgaggcagtgctgcatcgcaggtgagaaggtggcggcggctgccagggcagtgtagccgccgcttcgttcgcccatcgcttgttgctcctcccagactcgcccgctgccaccgctcctcctaagctcgcccgccgcatccgcgaccacgatggcgtgccactgctagagcgagatgaggacctgctcagtgtggggcccacgttggactaatttaagccaaggaaaaactggttttaaatgattatttctctctcctattccttcgaaaataataaagtaatatcacggggccagcagctaattatctttttttcgatgccttacaacaaatacgcattcttacggtgtctcctagctaattacactttttttatgtcatgtagcaaagtttgccaaaattgtattggttgatgtgtattgaagtaataaactttctggatttgcggattggtggaaggagttggtttattttgggacaaattttaaactctaggagttgatttattttgggacggagggagtgttaaaaaaaaagtaatgttagattgtcattgggcaccgggccgtagcacattgataaagggcctcctaccaccatacggttaggcccgggaacttccaattcccgccgtttcgatcgagagagctttgggccgatgacttccggccattccatggcacgccgagctgccacgctcgcgtcgcgtccagatgcgcgcgcgcgcatatatcttctccccgctcaccacagccattcgtccccgggcctcgccgcgccgcgccacgccacgcctccgcccgcgttcgcactgactgacctgtcacgcgcgcgcgcgggggggagagcgcgaggaggaggagaaaagatcttcgcgcccccccgtcttgtcctctgtggagccgaggccgaggccgagctgagctgagctcgcttccgtgctcggccagcgcacccgcgcacgcaagcaagcaagcaaccgagcaagaagacctgcgctgcgcgcgcgcgcgctgacgggcggaggcgaggcgaggcgatgctctacctgctgccgctctccgtctcctgccgggtccccggctcgccgccggcgccgcgctcgcggcgcttcctcgaccccggcggcggccggggagttggggatgggttaggcggcgtcagggtgttccggaggcgggcgctgcgagggaccgacgtccggtcgaacacctcgtcgtcgtcgtcgcggaagggccgccacgacgacgcgcgacacgacgggggatacggcgacgacggcgacgctggggcgctgctggcgtcggtgaggaggctgctgctctccgggtcggcgcaggacgacgcggcggagggggaggcggaggaggacgagcagggtcagttccccaagcgatgggccatcgtcttcctctgcttctccgcattcctcctctgcaacatggaccgcgtaaaaattcctcctcccttctctaacgccctgatgaaccctagattcccccccccccccctcctcaataattccatttcgttgatattgtaaaatgcactaatgcccaaatgaaccaaagatgcagtttcttgatcggatccaaaaacataaacttgtcaaatgccgattcctaatgatgattggtagtagtatatgttaaaagcttcaattctttcttgggagattcatgctttcaacattttgcaggtaaacatgagcattgccattctgccaatgtctgcagaattcggatggaacccacaaactgttggcctcattcagtcatctttcttctggggctacctgctaactcaggtctgtgtgcagtactaatccagggaaatctgtaactaggattcatgcaagagcagtttgagttcatttggtaccccatgattctgatgtattgccattgcagatagcaggaggaatctgggcagatacagttggagggaagactgtccttggcttcggcgtcatttggtggtcgatagccacagctcttacgccttttgcggcgaagctggggttaccattcctccttgtgacccgtgctttcatgggagttggtgaggtgagcatttctaattcatattatattcatttgttatgtcatacaagttttgtgcaaatgctaatgtagagcccttatcagatgatgtctagcttctattgaactatagtcaagtgacagaacattttaagagaaaaaaaatgaatttatgttgaagttgaaaaatctggggtgccctaaaattccctttgatcgtttccacagtattgcacctttcatcatttctgttgttcagacttcttcagtgtttcaaagagtggatttcatttgtaatacaaggggtagcagaacatgcctgactaaatcacttcgcttgtaattcacaaaaagaatattaacttttttttatgcattcttagtcatggttgttttggtggtatttgatattttctatgcacctcttattgatacggtaaacatataaaatctttccccagggagttgccatgcctgcgatgaataatattctttcgaaatgggttcctgtatcagagaggagcagatcattggctctcgtgtatagtggaatgtaccttgggtcagtgacagggcttgcattttccccattgctgatacataactttggctggccatcggtcttctactcctttgggtctctgggtgtattttggttttcgacatgggcgagcaaggtatttctcggtgttctgttcaccatttcactcggaattggtgaattactgtattacttttctaatttttttttagttatctcttaaatttgtgatctgcttctataaaggcgtatagtagtccacttgaggatccaggaattagtgctgaagagaagaagcttataaccagtcaaaccacaggaggagagcctgttaaagaaattccatggggactaatattatcgaaaccccctgtttgggctcttatagtgtctcatttctgccataactggggaactttcatcttgctcacatggatgccaacatactacaaccaggtatgatcagcatcatagttttctacctgaggatcttgaaccgcaatcccttgtgtataataatatttaaaaacaggttctgaaattcaacctcacagaatccggccttttctgtgttctcccctggttaacaatggcagtttctgcaaattttggtggttggatagcagatacgcttgtcagtagaggattatcagtgacaacagttcggaaggtaaattaatcccttcagtcgtgaaatttacccatgcaatgaggtgctatcaaactccaacggaatattcaatatgaatcattgttctaccattggcaaaccatgcttgaatatgtgaatttgtgtgcggcataattaatcaacataatgcttagaagtgagaatgaagagctaaacctaattcattgtgcatgactttctatctacttcgtgcagatcatgcagtcaattggattcttagggcccgcattttttctgactcaactgagccatatcgattcaccagcaatggcagtgttgtgcatggcttgtagccaggtaaatggcagtttggcttcttgtcattttcctttattctgtcatagaacagccatatattatgtacctctttttagaacaactgtgatttgtatctgaatggccattttgagatctatctcagtatttccagcataacatgttgcatttcttattctcagggaactgatgcattctcacagtccggtctatactcaaatcaccaagatatcggtcctcgatacgctgtaatcaactctctttagcacaaaacatttcttcaaatgacgcattttcggagttctgtctgaaacattatagcttcaggtgaactcacatgttgtcttgcagggtgtactgcttggtctttctaacacggctggggttttagctggtgtgtttggcacagcggcaacaggatacatcttgcagcatggtttggcctgaaatccccatctccctagtgacataatgcacatcaattttacaatcttttacatgattttttgttgctctgtttaataaacgcaggttcttgggatgatgtcttcaaagtatctgttgtgctgtatctggttgggactttggtctggaacctattctcgaccggtgaaaaaattatcgattgatgcttgtatatagcctgcttacagttcaaaatggaaagtacatacggttcagtaactggtgagatgagaattgcattcgatcaacatccattccatgtgaagctcaactctttgcagaaacagaactacagactgcaaacttttccgcgcagcgttagacatgcaattcttggcagaagaagtttcaagtgttcgaatttttcacatgattcaggatcttcgcacaattttgcaaatgaagcatgtgcaagaggtttgagttgagcaattaccaacagccagttttttaggactctgtaagtataggtatttctgtacagcttagatgaagaatccaccatccaccgtacacccctattatttttgacttgttacacaattttcttgaacatcgtatttctgtaaagtttgtagttaacaagtttaggaattcggcaatcttacctgattcttgtgaatttaactgtttgagatatggcccttggcatttgatgggcatggtttcatctacactttgtgtgacatgtgttcctaagtatagttttccaactatggtcaatatttgtataattatattaggcaacgcatgtcagaagaaagaaaagcgccaaagaggaattgaggcatggctacaagtgaacaatttaagcataaacgaatagaataatcagtagtaccagcgctgcttattatttattttaaaaacatatttcggcatatcattttggaccataacaacatggcatctcaacagtcaacaatgcaaaagtaaagagaacttttgaaccagtcccttataatagggcaactaaatcaaaactggcaataaatatcaagacttagttcatcaaagcaaccatacattaccaggtattatcagtcaagagggcctcaggcttgcgataaatattatctacactacaagggttgagctgcagcctagtctttacttgcagtatctcgtacaagcaaagcaaccaagcttgcacatttaccaggtactccgataaagctaatttgctattgatctatatcacacgagcgacagggactgattggcacgttcagcagtttgtgtcatatgttgcaagcccttgcaactcgggcccctccaaccttggatttttgtcaaagctgcagagagaaaaacaatggcttagaaacaatgcaaactggggcgatgagttctgcatatgccaagtgacgacaattaatggaagtccacaatacatagaaaacaaaatatggcacttagtgagtcatttgttgtgtcgattaattctgattcagcaattagcgtatatggaaaagaaataaaaaaataaactctggatctatggcataccacagaaaaatgagtagctcttagaagataaagaattcaagaaaatgagtagagcactctttttatctggtacatagatatgtgctacataacaaccaaattagtattatggcaaaagatgagctgcactgtcaaatcagaaaaacttagccgaggttcactagtaatcaattttatgacttcgggtgttttggtttttggctgatggaatagtgtggctaatgtctcaagtcctctcatttatacagaagcacaacattggatgtgcaaaagcaaaaaacaagtcaacataattgtaaaataaattggtaacaaggcttttagatcttacttgttcaggggtatatgctcaaaaggcccgctagtaggaatcgtgccgcaaagatcattgttcgagacatctctggaagcaagaatagatagacaaataaaagatcatcattaatatgtacagaacataaaaattatgtgaaacagcattgttaactgagcacttacatcactttgagactagatatttttgccagatccctcgggattggaccgtttaaactgttgtcattaagccgcctaaagaaacaaaaataaaaggattaacatagcgtaaaagtaccagtgtaccatagcataaaaagaattaaaaagaaagtgatgcttgcatatgtggcaaaatggtgcaaaagtggatatatgttaactaaagtatagttgcttaaaagaataagtacagctaatcacaagaataagtatagttactcacaagaatactaaggaactcagcttgccaagttctttcggtatggttccagtaatgttgttgttatacagatccaagctaataaggttcttcagactcccgagctcagctgggatagtgccctgaatattgtttttgtacagctctctgtaacaatttttcaaaaactagttagagcactaacatgaatgtcaagctcaattgcagtaaaatagcatcggaaattaaggatgaccaaagcatattttataaatcaaatggatacaagacttaatgatgcagtcttggcacaaatcacgagactgaaaacaaacagttcgttggaaaaactgtacaatatattgtcttatagtggaccatgttcaatgctggtgtttattttgcatatgaacagctcatatcagattcatatgttctgatatagctgagattcccagcatttagatttagttcatcattttacttaaaaagaatcatctctcttgctcattaaaataacactccgaaaatgctctagtttcactccactaggaaacggaagctgcaatcacataacaggaagtgagaagatcaaaacagtaagtcaataattacgtgccacaaggaactgttgaaaaccacaaattgtgttctagatttctggtaatgtgagagtttccatttttcccccagttttttcaccatttgccatgatatttgcagtttaattcatgaagcctagctgtttaaatgactttacaaatccagcgctgaagctttatgagttcaaaaaagaagtgatgaaagaaaggaagctaggtctaacatagtattccagctgtaacttctacatgacaagcagttggcagtgttgctgaatgctgaccatatgtaatgcaaacttaacaggacatgtgagtttttagcttatcagtgtcggtgatcattgccatcagagaacctttgctgaatgaactctacattttaacacttcagaaaataaagtgcatcaatatgtagaaagacttacagatattggagatgctcaaggtgtcccagttcaggagcaagatggcctgacaaatttgagttacccaagtctctacaagatacaaaattgttagaaagtatcagaaaaatgttaagatggacaaagacaatgaattgaaccaagaacataggtaaccataacaaaatatatctcttgtatggtaatggcatcatggtgaacgctgcatcgaaagaaaccacttcgatgaatcaatttctttccttcagcaagcaaacatatataataggtaccctaagtccaaaccaatggaaggatgcaagtggaccggtccgcaagcccccatataggccatttttgcaggccaacctatgggtcagcccacgaaaatgtcccatacgcaggctcgtgagtcagcctgcttgcatccctacaatggagtacataaaagactacaaaaatctagtcgtacagtgaaagcagtaagactctatctagggtggttgattgctaagtactccctcgttcacatttgaccagcgcattccatcttgacacttccatttaatccccatgataatatctgtattaattggctacatacacatcctcgctacatgcggattggatacacaactttttttttctttttttaagctgaccattagcaggcgatgcattgttcccgagatgcatggcgtgctagcggagtaactcacgtgcgaactgtgcagccaatgggtaacgcgacaatcatcattggataattgctttttggttttacgtggatcaattgcgcacatagagaatatagcttgcatcagcgatatttccatgcaggatcaaggagtactccccggttccatttatagctatcatcagcataattatgcaaatacatgatgacatagctaacgtgcaaagtattgatatcaaactactacatgcaagtaattagtagatattatatagtgagtagctttactgttgctacaaactaactagtaacatttactattacagacaaactgtattgcaacgatgattccacatgggcagaacaaaatcttttaaaaaaaattaaatgacaatctacaaatcacgttctttgccagtagatcacggtctcaccagaaccgaatgaacaactaaatcaccatatccctttcaccaactggtgtcaattaactcacagatccatttgaaactgtatttaagcattagcggcctagcacaaagccctcgcatttccaatactacggcagaggtcagtacaccgaagcaaacaaaagcagtacacaacggagggagcaaaaccggccggtagtagccagctcagtcggcgaggcggcggcggcggtgggggggggggaggtggactcacaggcgggtgacgcggccggcgcggtcgcaggtgacgtggaaccaggtgcaggggttgacgagggtcgggtcccagctctggagcacgccccgggggtccgccagcgcgcgccgcagcgcgtacagcgcgtccccctccgagttggacgccgacgccacggccgccgccagcaaaaccgccgcgagcgccggggaccaggccgccgccatcgccatcgaagcttagctagggttccggatgcgggcgaggaggagtggggaaatgggcggagtgagtgaaggtagtggaagcggaggtggtgaggggagtttaacctcgggagtcgggggagggatcgctcggatcttctgcggcgtaaatacgcgcgagtgagcttgttgtgtgacggtgtgagggtgagatgggacacgcaacgcctcgctgtcgaggggtacgtcgcctatcactgaaagcacaacgccgttaaatcctggaaaattcgcctatcactgaaagcacaacgccgttaaatcctggaaaattcgctctcatggggagtcgaacccaggacctcaggtgctactgaggctcttgtaaccaccaggctacaggcccgtggttataaatgaattactctatctgttttatattttaagttatttgaattttttcctagtcaaactttgttaagtttaatcaagtttatagaaaaatttagtaacatttaaaatattaaattagttcatatattctgataatatgtttgttttgtgctgaaaatactactgtatttttatataaacttgatcaaacttaaagaagtttagctagaaaaaaagtcaaatgacttataatataaaatggagggagtagctgttactccataaagttataaataagagtaaattttataaaattacatgtattttgacatcacaaaactacaaatttaatatggtatatcacaaacctacatatatggaagatcaccactgcatatttaataataatattatcggttttgcaccaacctaagtacaagactacaacatttataactctcaccataatagtagtggtagggatttaaattgtaaaatttgtagttttatgataactccagtattaaagttttatttttgtgatacttgataaatcttatgttcaatctgtagttttatgatacaacatctcgtagttttatgataatttggttcaagtgtttgtagtgttgtaaaatttagtctaaaaataaattttaaataactttctaagaaatatatttatacatatgtttttaaagaaaacacaagttcagaaagcatgtgcattcatccatcattccattaatgagaaaaggatagcccaaggtaaaaggattaaagtgaaggcattgtattcgatagggaattttatgtttggaatggaggattagcttttgcttttcctttggaatgagataatgagaatgcttttacagcaccatactaaattatttgttgatcggtggcataaaatttgtttatttaggtctgaaaagaatatagcataattaacacccatataatttccagaatcataagggccacaatacaattttgtgtggcttactaagaatgccctagcttcattcagatttccatctatttctctctcacatgtatgcaacggtttaaaacatacaaaaaaaactgaaggaaacatagaggattaaaaatcctatggaaaattgtcagggccatggataccacatacctaatagtagttgactaaactcggcagggcccaccacataccatgtcttatacggatacaaacctcgtatataaaaggagttccggataaggaaggacaaaaagagttttatatggaaacgacagggattactcggatcgtatccatatttatctccctagttctacttggacaaggggtcatctatgggtataaatacaagccccccaggaggagagaggggacacccaccacaatctacgacgccacaaaaccacaagccaatacacatcgccagatctcgacatcagagattagcctagccataccccatccggtgtctacggaaatcggcaagagggatctagcgccatctctgatctcgacgagttcatgttcgaggaggaagactacctgttgtcgactacgagttggttatctagccgctaagtcgacaacagatagataggttatcccaaatattgtatttgtgtgatacagatgaataaagagcaacaccggcttcggccaacaggatgtagggctattacctgtaagataaggggcccgaacctgtataaaaatccctgtctccatctcttttacctcaatctcgcatatactctggtaccaataatccccataccatccaaataccctagtcgtaactatcaaacgtcgacaaaaataatcctactccgtccttagaaaccgtcctttggaattcctatggaatataccatttcatgggaatttttgaggaaaactaaggttcctataattttcctttggtgttgctaaactacatttgttccctatcgaatacaatgccttcacttgttttttgggacatttatcagatcacaaatcaaatatatagtttaggtagaaacattttactttaaccatgctaaaaaaaggtgaagccacccaacctacaagagcatgccacatcatcacatacaatatatgaatggcttcatctagttgttttgatcggattttgccatccaatatatagatggaatatgctatgggtgacaaccatatcctcaatcgcccatgaactaaacaccactaaaaatgtaactgctatatcatgattgttaaaatggtacgacgtcctaaggttgtgttctttacccccatcttccaatttctatcctctcatcttttatacgcacgcttcccaaactgctaaacggtgtgtttttttaaaaaaaaaatctataggaaagttactttagaaaatcatattgatccatttttcaatctttttttgtctaatacttaattaattatgcactaatttaccactctgctttatgtgcttgaagggttagtttccaactctctataacgaacacaacttaaagcgatcccgaattggcactcccaaactaattaggtgccaagccaaaaaaaatcttatatggcagcaaatcaaggctacattttaagagcagtataacaaacatatatatctcttattcttggcaactgagtccatatagcatccaccaccttcatggaccatggtagcatctgtccccttaggaccatcaacattataaattgggcttttagattttcgggcctttcccgtgtgcaaccaatttgccttgcacatcagccattcaaatcaaatcgaacaactgtcattttgttgctgacgtggcttaaccacaaggcaaaggattcctattaactacaccaggcgtggatgaactatataggtatataagattcacatagaaaagttatttgactacaataatgaaaagactggaaaccaaaacaatgaagaggttcctcgactagcaatcataaaagcattttgattggtatcctattagattgactcagatcatgaagctgttgaaggtggatcaccctcggagccaccacaccgtcttcctttatgcttcattaacatccatagctttatatacgtcactaacaatcatagtagaaaaaaccggactagcggttcaaccggaaaaaaccggaaccagctccctgaccggctcggttccctcaaaggatcgttcacgcaatcgacccggtgtgaaccttgccgaccactaggctaagtaagttgctgtgactggaagacaacacaaaatatacttaggaaataaaccgcggttcaaccagtgacccaacggttgaaccgatagaccggtgaacccaacactccaccgggtcaagcaccggtccggttttttctactatgctaacaatctgtgttgttgtgtacaacctgcaaggaaccaagcaacacatgtcctatattatgtatcttttactatgcttactcaaactaagttgaagtatctttagcaatcattagacaatatgatttgtactataattatgtttccctcatgttatttgatttgctttgaatactactcaatcttaccctacaatcatccataagtaacatgttgaaagttcatgtgccattaatttggttttggtgattaatgataaatccaaatatgtgagactaatgtttttataagcatttctttgcctagtctcatgtggatatgaaagtagagtgtgtgagaggtgattcccggacttcatatgagttgagatagaaacattcattgatggtggacctaaatcacaaggatgaaatgcatggagatcaagatatatgtatcactctttctctccatgtacatattgatatgttcatatataatatttccatgtgattgacatatgcatgtgagactaatgttttgtttgagtcttatttcttatttagtctatttacattgagaacatggagatgatgaatgtatgtttttattttaatgtctatatttgagaaatgccttctattcttgtataggataagctctccatgtttcatatcttgttatgcatgctcttgcttcacacaaacattttgtatgcatacatttagggggagcaaatcctataccttagttatgcatgtatctgatccaagttattcacttttatttaattgggatctttacatttgagcatatatttgagtatatgacacttatggtgttgattaatactcatcatttattcatatccttttatacatgcgatcggttagtcaacatgtggaggttgacaaccggatcattgagactaataatttcactaagttgaatgagaaaaataggttccaagtattgaaaaggtgttgacgctcaagtgatatgattacacctaaaatacaaagaataacaaagcaaagatattgaagatgattacacctaaaatacaaagaataacaaagcgaagatattgaagatgtgggatacgaagtggctactatggcaagacggtgaagggcaaacgatgctcggtcgcgatggaccatgcggtggtgaagggcaagcaaggggcttggcgctgaagaaccaaatcctgtggtgaagggtgagtgatggctttgtcatgatggaccgtgcgagaccatttgaagctacaagtaaccgcatcaatcatttgaagaatatacggtgaaacggttttggcgttggcgtcccttaagacaaaggaaggaaatagaaagaaggcattcctattggtataattctcttcctatttatatttgattataggaatgccgtactattaagagggatgcaacgtcgatgcgtttgtatatgtcccctctcggtgctcaaagtgacctatcatagtgctaccttgagagaaacccaagctttaacctatcatttgagtggttttagatcttgttcttggttgagttgggtagtcctctaagtgagctttccatagagtccaagattataaaaaacggactcccgagcaaaaagttatggtcgttttactctgtgcttttcggaagttccgaaaattatcgaaagttccgaaaatggctgcgaaactgagttttgcttctgtaaattttcggaagttccgaaaattcctgtctttgcctccaacggctagtttttgagaggctcaggtatataaactcctccaccccttccttgagtggctgttgttcttgggcaacattagacacatccaaacccaaatagccatctctatttcccatcctttgtggtgcctctttgtgaaggggatttgagaagggaagaaagttggattgagagagtgaggagttgagacctagttagcttcactccatcctttgtggtgcccctttgtgagagggatttgagaaggggagatagttggattgagagattgagaagttgagagctagtgagcttcactccatactttgagcactcgggttcatagcaagcaaatcttcgattgtgtttgttactcttggggactaaggtctcctagacggctaggcgtcgccggtgagcaccgaaggttgtggtgtgccacggaaagtttgtgaaggcttcaatttcgcctccgcaagggaagaaatcaagagtgaaaccgaggagtgcatttgtgcaacctcgtgaggaaatggttgaaataggcccggcccttgtggctcctcaacggagatgtaggatccgtggatccgaacttcgggaaacaaatcaacgtgtctcctattttggtttgctcgtttttgccatcttttatattgtgctcgagcttatttttacccgatctacttgcatgcttaattgatttagttggtgaccttatatcttgcttagatactttatttgtcaccctttgattcatatacattttatttgttcgagctacaagttcatagctagtgttttgaggagtttggttggggcaatgagccagttgaagatgctcatggatgtgacattacatgggatgatgtggatgaagctgttggtacgacacactatcttcgaggtcacaatgttccaaggagagctcacaatcgtgttggtctaataacctttcaaaggcgtcaaaggaatacaacaacaactgaagaagatgagtaaaatatgcaatctgaccaagaagaatatgaggaggatacacatgatgatacaaatgtgagtgattgtaatgaacctcccactagagtgaagagaatttggatgctaatgacaattttaatgagtttgatgatgaatactaagaggcaatgagttggacttacaatacttttgtttagagtgtggaattgtggaccactattatctatatatgccattaggcgtatgataactcccactattttgctatgtcttttgttttatttgcctgctaggctggactgcttgttagttggttatgtatttgttgttgctcaaatgtttattttgttgtctctattttttttgtttatctaattatcttgcccattatccgcgtgcctggctgcttggaagaatgaatggcagggcatcaacaaggtatgctactcaagtaaatataaacaattcattaaccatcaatcttcaattctgaatctattatcttcgtaaaaaaatatcgatgcttctaaggaggatggatactgccatggaggtggtggatgctacatgggctcatgagttaccaataacaaggtatactaggactttaggcgcacttcgtggcgcgctaccgttcgttaaagagacatgtgaaaggaccttgatgtcgcctagaggggggggtgaataggcgttcctaaaaattatcacatcacaacttcatagcatattagagtgatgaaaactttcgattcaagttggaacttccggtatggggttggaagttttggtctcaaccaaaaagttcggcggataacggaataaaaagtttatgaaaaactgaactgtttatagattttctagccgctagcttatacaagaatctgcacttggaagaagctcccgaaacataccctcgtttctcacccccaaattcacctcactccgctagcgccgctctccctcctcacgtcacgcgtgccaagtgcgatcccccctcctcgccccaacacaaacccctctctcatctctcctctctctctctctcgcaaaccctcctcctctcctcccctctccgcccccgccgccggccgtgcccctcctcctcctcctcctccggccgaagcgcgccgcccacgagcatcagctccccctcctcgtccctccctccctccccactgtccgccggactgacggtggggggcgcctctcccgcccacgaggatagaaagccctagcttcgtctctgctctgtgcctccgccgctcttcccccgctggccggacggcggctgcccctcccctcccctcccctcccctcccctcccattcgtcgctcgtcgacccctctccgccgccgaggctcgctgtcccaaggtattcctcttgtccccttcctcggctcctcctccccctgcgccgcaactctgccgtggcccgcccggccgcccggagatccgtccgggctcggctccgcctcatttctttcgctggcgatgaggtggtctaacttgccgatgcgtccagagtaggctctgttcttttgtgttcttttggttgagttgggaacccatccctccggtacggaaaacgaagcagtccattagcacgtgattaattaattatttgctatttttttttcaaaaatagatcaatataatttttttaagcaactttcatatataaactttttgcaaaaaacacaccgtttagcagtttgaaaagcgtgcacgcggaaaatgagatgggggagttgggaactccaggaaacgaacagagccttaaatccagatggatgtttctcttttacctccagctaatccgtccgcttcgttgaggattccattgaatgcttggctgtggtggagtgctacacgactgctagtagcagcttgcttctcagcaatttgggtgaaccccccacattcttgaggtatcgctgcattttatttggcagcgcatttataattgctgtcttactaaaaaaacacatgtttttattttctccttttaacattacattttatatgcatagccatgcaaagttcatggtacagtagggtctactttcaccttatttgcttgtatacctgaaaagcctgactgttggacatagccacgcaataattgtaaagaagaggttagaataatctatatgctaatattgatccttttatgttactgattctgcgtgtatttcaattgtacctcctgttggacataggcatgatgaagcaaactgtttacatttagagtgtattagagcataggaattctatcatcgcaaatggacagatggacatgctatatgaaaatgtaaaatgcattagtctggagtagctattatgtgtgctccatttcaaactgtatatgtggtacttattctggttgactcatcatgtgcagtgttatctattttcaccaaattttaattttttaatagccaacctgtctctttgacatgttgtatccgtcaatacaggcagtaacaattggatctacatcttgccactacaaaaggatcaacgatctgtactagccttcatttgtgggttcctcattgggaattgggattctttacaatggcagatatgagccctaggacagatacatcaacagatgataccgatgataaccacatggcaagtctttctttctttcttttttctagactaattcttgttaaccttgatatgattgggcacaaagcatcaattgtccagtttcatgtttggaggaaactactaaactattatactaattatcattcaaaagtgagaaagagcatcaattctagcaatagaaaattaaaacagcaaggttgtctgacgaagtaaggatgtatactgtagaggatgttttatatgaaaattaggctatcgttgtcagctgttcagtaataatctccaaaattcatggaatatgtatatattgaaacgttcagtatatgttggcattctctacatagaaagttagtttcatacgaaaatcttgttatcagagaatgccctttgctgcagagtttgatatgttggcatttaataatccaattgagctactgagcaatgcatatgtgctgtgcatgggacctacacataggtctatcaaattagggactaccagaaaacaatataaacagttgggtttccccattaagaaagctggcaaagtttgcctatggcacgtttttgtgagatttgtggaattcgttcatgcgatttggatccttatgcaccttgaattcgcttgagttccttgaatacattttgtttgatattttatcccttccaatagcttgtgtaatttaacttttggtatatagcatgatcaaaagatatagacacgtttattgaaaaatatgaaatgcaaatcgtaacaggcctatttataagttgcgtaatatgataaagatgtgggcttttttgcattgagaaatttgttatggcagaaagtaatttaatagatactaaggctgtgttctttcccttaggtgttacggagattttcagtgcatgcaaaacgagaaaccattataaacttgaaaaataacaatttatatatagattttttttttgcaaaaaaaggcaccatttaacagtttgaaaagtgttctaatggaaaatgaggaagctaaagtttggagttgtgcaaaagaacgtggcctaagtaataggatgcataaacaaaaattacatgctaatgcctgttggtttacaaaattaaagctaagtgatcaaattcatttttttgaatatgttttagtccacagacatttcaaaacaaactgatctttctttttcataaaagttggagtcttattcatttttttatgtaaaacatcaggaatcaagaaggtaaaattcattattatataaaataggaatatcgggagcttgatagttatgttgtcacctgcagcttgaaccaggtcagcttgctcttgctgctgcttctgactctgacagatccaaggacaaacatgaagatcaaaaggtaaaattttgcaagtagctctctcctttttgtttcatattatcgttgttgcaacaaatattttccttatcactttgtagacattgcgtcggctcgcccaaaatcgcgaggctgcaaggaagagtcgtttgaggaaaaaggtacttgtgttctgctgtagcttttatactaaagaagtttattccttttcaagttttgaaaattgatggtttataccatgttctatttttttcattctgttactaggcattattaaactgtattcttgtattaggattccactatcatttctactagaagatagcatgcgttgcattgggaacttctatatcacttgcagattcatggaaaatggaaaagttttgccaaaattctatggggaatcacttgcaaaaatcggctgggtatgggggtaaatagttcagacagacatgtgcacacctcaaaaatcagaaaatttgtttgttgggcaacatgagaaacgatattcccatcataatatataaggctgcactagatgtgtacatgtctaggataatgaaataatcaagttagtaatagtaatgaattttattgaaaggtagaagatacctggttttaacttatcatccatgcaatggagtctagtggctactcattatttaaacacttgcacaatttgagggatgattattaaaacaagtagtacatttacagtcttacacactatatcagggtaaaccgtcagttgagttggtcagctggcttcatcaatttttggaaaagtatgcttgttgctccagcggctgagctagcaaaataatttattacctgcaattagaaacacaaacgagaataaggatgccacagatgttctcttacctgttctgtaagctgattcagattgattgagctgacaccggccatgattcttatactcaaatctgtggaacaatccacacaacacaaatatacacggttcaatttaattaaggcatgtagcttggcagtgaaaggccacgatggtgatgggtgatcataggcatctaccatcaggttggaccaccagagatgatctctctgctgatgacgtgtactaatctacaatctatgagaactaaacatgtttaagaggatgaagtaacatatttaaggcattatatgcgtgattgcctgtccttgctggagagattggatgctggtcgggacatggcagagagctccaaggtatataggcatgcaagactgcagtct

SEQ ID NO: 5598 - DNA, 17366 bp, Oryza sativa
cttgccaaagcggggcaaaatcattaagctagcattgcgaggcggtcgggtaacaagacgagtggagagcgcgtctaggggtgtaagtggctaacccgcgaaacccacttataggctaaaataaaccgcgaacccgcttattttgaactataagtggattcgcggctgacccacttacagccctaagcgcgtctacgaatctatgaactatttttttttgagagagtacaacgaggatgcacacacgaactcactccacactcacacaacgcaacactacatgcacacacacacacgtgcgcgttcaacacacgcaaatgtagactttgaggacctaaatcctcacatgtgcgtttcccgcacaaatcctcacatgtgtgtttcccgcacagacccactgaacacgcacgcatgtgtgtaccctattatctacttgggaccaaccgaagtgagtcccaaaaatgagggacgagcatcgagtctgggagtcgaacgctggccggcaaggagcaagccacaggctcctgccacctgcgcgtagcgcagtcctcaatctatgaactatttgagtggcacataagaaacaagaagatatcctttcgaggtaaaagaaatcaggagctcaatttagcgactcaacttttcactacttaaacattaatcatatagttaaaagaatttacataataggtgtatctacattaatgctaaatataaatccaatcaaagagaaaccaaataaactcattcatgttggaatatattttttaaaaaagaacattaatatgcatggattgcaacaatggcctatgtcacttcaccaacatgaaacactaaattcaaatatacacatcttgcaaaaaaaaaacaagaagaaagaaacataaagaaatttggctatgagccgtgttagtactatccataattgaatttaattattttgactcactgcatgaatttgtacttgaaatttttcaagttagtctatatattatataaacgtcatcaattttttttgttgatttttctataactatttgattggtacttgaagaatgagaagcaattgcatagaggcgtataatgttagtaccaaataaggcaacaaacaatcaatttatatattcataaattgcatattgtagttccttttttttaatgaattgaagagcgacaatttgattagggatgaaaacggagcggataatttccgtccgctatggacaaaaacggatacggatacctttcggatcggatagttcggatacggatacgaataacgctatggtatcagggtttcagtcggatactgataataattcggatatccggtgaacagtactattcggatatccacagaagccatgagacataccgcatttctttctaactctataaccttcaaatagattttaattgtagtttatctcttaacactagtccatactattaatattatttatttcttaaaaaatatttataaattatacttcattttatataaaatgagctaattatatatgttgatatttgtttctattagaagttgagttggttttcgtgttccgagaaaaaattgtttctgtattcgtgtctgatcatattcgattcttatttgtattcgagataatccgtatttgtttctgtattcgagctatccgtattcgttttcgtgtccggtaaaaaatatgaaaacgaatatggtatgagcattatctgttcgtatccgcttcgttttcatccctaaatttgattgaattgagcagaaaaaaaaaactatacaacaagaaaaatgtgtaaaagtacatgtttggcccttaaggtctgctatggctaaggcagccacacaacaagcttaattcctagccccttctcggcccatgttgtggcctcctccttaatcttgctgactaggcttggtgcaaatagttctttgtgttgaaatatccggtgcagatagttctttgtgttgaaatatcctttggttcctttattgctatatctcccaggagactagcaacaccaaggtgctcgcctgccttggcactccccttgtgttagcgattgccttccaccatttctgcatcgtcgtggttggttcccacaagacgagtattagcttgtcgcaggacgtccaccctaacatggttctccaaattctctttgtatatctacgttctgtcaagtggtggagggtcgtctcctgtgtccaacgacatagggggcatatgtagatgttttaccaacacgtgttaccaatctattcgatgtccaaactctattatagatcaccaaccatgcaaaatcttgctctttcatggggcccatggcttccaaatgagggtatcaaattctgactttgttgtgcctaggagttgcgctttgtaggctgatgccaccatatactcaccatggttggttagcttccaagtggtcgtgtcttcctcgccctctacgagatgcacttcttggactgcattccagacagtgacgagctgactgattagtttggtcatcctagttgcaatcgccgataggttgatgtcgagtagccattggccagatttggtggcctactgtagagttctgtttttcttccagaaagtcgcttagaccagaggggccaacttccttaagccttctcccttgcaaccaagcaaagtcccagaatttcgcttttgtaccatctccaactgtcgtcgtcgttcccacaaagaggagtttgccaatgttgtcgcaaggcgtctccgaccccactcaaagctttcttagataaacaatgtagcaatcagtggcgcttggcgagcccatggttcaatttttcgttttcagtatttgtattggggtgctgatataccgaaatttggtccagaattatttgaattttcgaacaaaatttggtcaaatttgaataaatattactaaattcacacaaaagaataaaaaaaactttggtcgaaccggaaatttgaaccctgcgagccagcctgcgagacttgtcgtagattctgtaaatcttctctgacactgatacaacgatggctcgtgcatcatcctcatcctcctctccggcagcattgatgtccatgtcgaagctacgctcggctggaggatctctgcacgctccataatcttgatgggtgtccgcgagctgaaggagcagaagcttccatccccaatggcgcacgagagctgacgacccggatcaaccattggcagcagctcctgtacagacacctcctcgtcctcgatgctgaaactgctctacgccggcgacggcgacggcgacggcgacgacgaggaggagacattcttgatgcggtacacggcggcgccggcgcgtgcttcggcttggagtgggagacgaagaggttgtcgctagctgctcttctcatcaccgatgggcacccgcttggccgtcgaacgggaggttcttgtcgtcggcgagctcccccacctcttgctatccacgtcgaacgcaggatgtggcggccggcggcggcgtaggacgcgacggcgagcgcggccgggcggaggggacgccgccgatgcggattgtcgccgccacccgcggcggcggcggaggcggcgagaggagaaaaagaaaatcaaaatcaaaatttctctccacctatgacatgtgggccaactgccaagcagccttacttgacggagattaaatctggccgttgattctccatcggacggcggagcgctcacagcagcacaggcttatctcctccctccgggctgatgggtggataggctgacgacgggccaagaagccgaatcccacactgcccgtggccatggcgctgctcctctccccgaccgtctccttcctcgcctcctcctccgcctccccgcctcgcgccagagctctccccgcctccgccaatgtcgcctccaccatccccggtaacctccgtgaacgccttctccgtaccgggacttttgcgcataagttactcgggttgtggggtgttggttcttggattggattatgctgagtgggtacgaggctatccattgttgtgaggtgtgatttgtaattcggtgggaggattggtctagatatttgacgttggtgattcgtggcgtttctgattctctgggatgcggttggctcgttagggaatttcttcaaacacgtcgtgtgcagatgcagtaattcgtgggagattccgtgcatttatcatctctgtacaaagctaggtataattcatctcagtgaactctgcagattctcgaagctttggttctttcgtgcttaaatgataatatcagatgctatgtaagcaccggtcactggcaaagggtgacattcgtagtacaccctacatttggggcctgattgttaatagatgagtagattttacatatctgtgctctgctaagattcatcataatatgtaattgagaacactaggattgttactagttattgtactatatactatccatgaagtggcacacatgagctagacttattagctttcaagtttcttatatgacggagattctatcaaaattttgaaagtagcatgcatgtactctgaattctatatctaaaatgatgcacattgaggcttgccatttgtcctttctgatgctacagccccaaggctccagtgcaagaatctctcctcgcagagccctctgaatgcttctttcaccaagaagaggctagtttctgtccatgcctcggcagaggctggcgcagaagaagctggcacagatcaaccagaggagccaaaacccacggtttcgattgagacaatgccgctcgaaactaagcagaagatgatcatggagcagagggcgaagatgaagctggccaagaagctgaggcagcggcgcaggaggcttgtccagaagaggcggctgaggaagaaaggtagatggccaccatccaagatgaagaagctcaagaacgtctaaccagcagtgatgtcggtcgctgttcttctgtacacctctatgttctgttcatccgtctctgtatttcctaagctgatgcccagcgaattttgctgttcaaaatatgaaacacaatgtttgcaaaatgtgattatttctttcccgatgaaatttcatcttgtattttttagataatggataaaccggtcaccgttaaaaacacacaaagcccagtactgaacaaattttcttctaacatgtccctcctttttctcctttaggctttagctgtcctacagaagtaccactaaatctaatgtgtgttcccatagtggaaatatcatatgcaccttgatgccttctgtgtttgtcaaaaactcaaaatcatagcaaatttcaagaagccttgctgtgctgcactctatatttgtgaggtatttgcctgtatatacacttccatgatgtgttttgttagggcctctcacaactctttcgtctgacctgatgttgattaaagcacaaaggatcaacctggacaaggaaataactggagcaaattcgggtttgtttgttgtttgccactttgtcaggcacgatgtgaacaatctgaagagtgccattttcgattttttttctgatgcccttcctgttgatgtggttgtaaaatttatctgaaatttagccttcttgagccatctttgtgacttgatggtgtaccgtcacaagttcttgaaatgttaaccacgatgttttttgtggaaacaaaatttgtaatctctctatcgtaggaactgaacatggccgtagctgactatgtttttgacctttttcagcatcagtctgacagtctcataagatggattcctagtttcctaagttgctggaaagaatctttgtttgcttgccttgcttggctacatggtgttgttgcctgcatgtgttctactgcccccacgcttctctctttagggcccttgatgcttcgatgcccaaggaaggaacaatcaccacataacctcacaaaactccttttcagttattagttttttttttggtgtgtgtgtaagagtaactaaccatttttagtttttgttataaatattttgatgttttctgctgaaagaactataaagaagatggtagtacaaaatggacttgaatgactcatggttcaaatttgttcaggtaacagctggtctgaattttggatggaagagagccagattttctgtctggatgaatgaactgcaaccgtttgcaccgacaaacaattcgggctttcttctttgcaagatcaccgggatcatggcctgatcggtagcaaatatagatatcaagcaagaacactccgttggcacgctgccttctgaaggagcaaaagcagtcggtgtgtgctgtgaagacacttttttctcatgtgccggtactgatggtcagtataactcacatctcttgtttactttctcactttactcctagcatctttgatcacgatcagtatgatctgatcatcaccttggatcttcagccccattaaaaagcaatcatcggttgtcgatgatcgatcccactattgggttatttggatattacaatcgcattcaatatgaaagaacgaaagaaagatagagagaaaaggggcactgatcagaagaagaaagaagcaaatctgttgcaaaaaaatgtgttctggtgatgcctgagagttgagatgagagctcaactaccagaaaacgactgacactaactaaaggcaagctgatatatgtgctccatggaattcttcactcaaaagaagacagccaggtgaccaaaaacagcctgcctcagctttgtcaacaattgtcataacgcaccgacatgattagctctgattcccaatctattgacaagaattttgtgtggttaaaacaggtaacaacacagcacacactcttaactaactttgtgatcatccatcactttccttgtagtaatttattcagtactaacatctagttgcctttcagatcagcaaccacctggagatattcagatcattaaccaagaaacaatgcaattgtaggacaccaaatgcagactgctaattgctcactaactaaagcttcagaatgagatcaatgaaatgataagcctaatttaagtgcaagaggaaaaaaaaaaggcaaaggcaagcaaagcaaagcaaggcttcatctccaccaagtagagacagtgtcagaccgcacatattccattcctcgcagccaagcaatctcgtcagaaaacaatcatttgggcagaattaattttgatctcaaccagccatgtggctggtcaggtgacggcgacgacgacaacaacggcgactagcggatcaccatgagaagtttctatctgccatgctcccatggaaagagaggagctactaaagaatcatcaaaagagatagaagggtacataaagaggccagtcagagttcagatgaatctgattctgcagccatcagaaaagcaaggcagaattccagctacaaattgggccccattctgaagagtttcatatcatatcatctcctacttagaacttgcacttcagaggaattttgcacgagcaaaatatttagccatatatatatattagtaggaagggaagctagctagtgtggtgtgtgtgtccttactgcaacctgcttcactgaagctcagtgatctttgagaagttccatccatggtgaaccgcgcacatttcgtcatcctcgtcctcgtttaccgcctcctggtacctctctcagccgagccagaccagaccagagaggtagattttgaccatgatcagttgatcaccattagattgcacctgcaagagttggagcagattgttaattgcataatttgcatgagttatcaatttatcatagtggttattgtgaccaatcaatgttggatggaatttgttgcagtcgtatgtcgtctacatgggcggcggcggcggcggcgccggcgccggcgccggcgtggaggaggaggcggcgcgggcgatgcacatggagatgctgacgtccgtcgcgccggccggcgacgatcaggggagggcggcggcggcgctgacgcagagctaccaccacgcgttccagggcttcgccgccgagctcaccgaggcggaggccgccgcgctgtccggtccggccaccgccaaccaccatccgatccattgttcttgatcgattcctttcccggcgatcgccgtgatcgcgccgccgccacggtggtgaatctttttttgttgttgttttgcagggcacgagagggttgtgtccgtgttcagggatcgcgcgctggagctgcacacgacgcggtcgtgggacttcctcgacgtgcagtccggcctccgctccgaccgcctcggccgccgcgcctccggcgacgtcatcatcggcatcgtcgacaccggtgagcgacacgtggcacgtgacattggcctgcgtcgtgtgtgtccagagctctgacgttgtggtgtgatgtcactactgttactgtggacggcgacaggtgtgtggccggagtcggcgagcttcagcgacgccgggatggggccggtgccggcgcggtggcgcggcgtgtgcatggaaggccctgacttcaagaagagcagctgcaacaagaagctcatcggcgcgcggtactacggcagccagcccggctcggcgtcgtcgtcgtcggcggcgggggcggtgacggcgacaggcggctcgccgcgggacgccgtggggcacggcacgcacacggcgtcgacggcggcgggcgcggtggtgcccggcgcggggtactacggcctggcccgcggcgcggcgaagggcggcgcgccggcgagccgcgtggccgtgtacaaggcgtgctcgctgggcgggtgcgcgagctcggccgtgctcaaggccatcgacgacgctgtgggcgacggcgtggacgtggtgtccatctccatcggcatgagctccgccttccagtccgacttcctcgccgaccccatcgcgctcggcgccttccacgcccaccagaggggcgtcctcgtcgtctgctccggcggcaacgacggccccaacccctacaccgtcgtcaactccgccccctggatcctcaccgtcgccgcctccagcatcgaccgctccttccactccaccatcgtcctcggcaacggcaccctcgtcaaggtaatcataccatcgccatgcctcacttcttggccatgaatgagacctcaatcccttctcctcgtcaatggcagggaattgccatcaacttctccaaccagagcatcaccggaggccagtacccgctggtgttcgggccacaggtggccggccggtacacgccggtgtcggaggcaaggttagtagtagtagactatactagcaaccttctttcccatggaggcaaatcgccgagcagttgagctgcgtcgctcatcacaccatgcactgtgcagcaactgctaccccgggtcgctggacgcgcagaaggcggcggggaagatcgtggtgtgcgtgggcacggacccgatggtgtcgcggcgggtgaagaagctggtcgccgagggcgccggcgctagcgggttggtgctcatcgacgacgccgagaaggccgtccccttcgtcgccggcggcttccccttctcccaggtcgccaccgacgccggcgcgcagatcctcgagtacatcaactccaccaagtgagtcgccgtcatcaactaaccatgttttgttacgtgatccgacggctgatgttgcccccggtgcaggaatccgacggctgtgatcctcccaaccgaggacgccaaggacgacaagccggcgccggtggtggccagcttctcggcgcgcggccccggcggcctcaccgaagccatcctcaaggtatcgttggggtaaaaaaaaaacattttaccccctacaattcgttgaaagctgattgaaattctcgctctttccgtcagcgtacaacaatgcgtaagaggtaaaatggctttcttatagtagcatttaaacggagtttgctaacgaaaacctaacgatgatagtatgtttggataaagacacttgtacgacggtatttttaaggaagttgagttcgtcgatagtactttttgaattaggatgaatgatcacctggtaaaattctagaaggataaatggcggtaacttccattttgactgcgtgttggtttttggttagcctgatctgatggcgccgggggtgagcatcctcgccgcgacgatacccaccgccgacaaggaggacgtgcccgccggcaagaacccgtcgccgttcgccatcaagtccggcacgtcgatggcctgcccgcacgtcgccggcgccgccgccttcgtcaagtcggcgcacccaggctggtcgccgtccatgatcagatcagctctcatgaccactggtacgtagccgatcgaatcaagaacgcgacgagagcagaggcgtgtccgattgattgatcgatcgatcggttttgattttggcagcgacgacgaggaacaacctcgggcaggcggtggcgagcagcacgggcgcggcggcgacggggcacgacatgggcgccggggagatcagcccgctgcgggcgctcagccccgggctggtgttcgacaccaccacgcgcgactacctcaacttcctctgctactacggctacaaggagcagctcgtccgcaagctcgccggcgctggcgccgcgggcgccgccttcgcgtgcccgcgcggcgcgccgtcgccggacctcatcgcgtcgggcgtcaactacccgtccatctccgtgccgcggctcctcgccgggaggacggccaccgtgtcgcgcgtcgccatgaacgtggggccaccgaacgcgacgtacgccgcggccgtcgaggcgccccccggcctcgccgtgaaggtgtcgccggagagaaaggtgttctcgagcaggtggacgacggcggcgtaccaggtgagcttcgagatcgccagcggcggcgccggcgccggcgccggggcgagcaaggggtacgtgcacggcgccgtcacctggtccgacggcgcgcactccgtccggacgccgttcgcggttaatgtcatctgattggtgtctctctctctctctctctctctctctctatctctctcttttttttttcattttcattttatttttgattgctgaattccattttttttcttgccttttgtgagtgtatggttttagggtcagtcttggatctcgaagtatggtgttgagtgtccttcctttttttggaaaagcaaggaataattcagattttgagtgtatttacagatttttaattaaccattcacaattgctagtagctgctatcataagtttggacaacctaaggctaatataataacctccaccaatcttagagcacaagtgcacaaccctctaaacctaccagataaaaatcaacaaacttgaaacccattatatcgaatcatgtcgacagaatcatccagttgttgccacttgccaggtgattgggtaatcaacaggagctatacaagattacaagtggaggctactgattgaatttatcccaaaaagttttgcccacagaggattaattagttgcagttgatctcttcgatcaaaactagggccgtttgtcttcagcctaattgcccaccacccgtgtccaaattaagctcaaatcacatgggctaaaagcatggaaaccaaacatttacatatgagcgactactaattttgtgaagggtttaaatatttaaattagatctggtcctgcaagtcccgcaaattgtaggattaattgggcaaagatagtactgcccaaagcatcaatccaatatcaaaatcaagatcatgatctccaaaaaatggaaaagattaaacgttagttgttggcacgtactaccgtgggctctgcttcaattttgtttcgattatttttgtagactaagtcacgtacgtgcagaccatgacctgctctcccaacatttgcaatatttgacgaatttaatttttccgagccctctctaaaattgtctgatttggatcagagcaaagaaaaaaagatagtattatcatagtaaacgatatcacatttcctgaaaacagaaaggagattgcagtttttctctgtgaaacaaaattaataaactcgttaattttctctaatcagatttttttttggcgaaataataagctctgatgagtgattggctaggtgggagagaatatttgaacgtgaaggcgggctagtgcaccgaccgacaggtgggccacaatctacccgcgccggccaaatggatccaccctgtcgcagcgccagtgcaggcgggcacgttgggtgtgtagccggcaggtagccagcccggtcgttaagcctagcttcgtctcgtttccaacactttcccgcggaaagaaaaaaaaaagaaaaaacagagcacgagagagctggagaagccatggccatggcaggaaggcgatgagaaagagataggaagctgacctgcctcttcgtcggtcatggccgcgttgtgacggcgccggcggccggaggacgggacgaagctacgcgcgctgcggcggcggcggcgatcgactgctggtgttgatcaggattcaagggagagaaagatagattgttcatgggggagccaaaccagaggaggttgtaccaagtctggcagggaagcaacgtacgacacgatacgatcatctcgcctctctcttccttccattacttctctttgaaaatcttcttgcaacctgcaatttttgttgtgataatccttgtgaaattcagatcaatattttttttgtttacactttgagatgacagacagctttgctttctccatttttttctttttcagaaatttctctgcggcggacgcctgattttcggtccggatgcgggttctctgttcctgtccaccgtgctcatagtggctcctctggtaggcctatgctgccaatgcatcacaaagatgaactcgatcagttcagagaaacaagttcttggcctccctgtcctcattgccaccatcgttcttggcctagcagtaagtcacaaattctgaaattcagcaatcatcaccactaactacagctgtttatttgtctgaataatctgtcacaactgctcgtgttttttcttgtctgaataatctgtcacaactgctcatgctttttttttgtctgaataattgtaacacaacagctcatgtttttttcttcccctttcatggatcaatttcgagttcaggatttggcattcctgctgatgacatcgagcagggacccggggatcgtgccgaggaacgcgcggccaccggagtcgtgcggcggcggcgacgaggagggggtcgccggagacgtgacgacgccgtcggcggagtgggtgacggcggcgagccctcacctccggctgccgcgcagcaaggacgtggtcgtgaacgggtgcgtcgtgaaggtgaagtactgcgacacgtgcctgctgtacaggccgccacgtgcctcccactgctccatctgcaacaactgcgtccgcaagttcgaccaccactgcccctgggtcggccagtgcatcggtctggtgagcaccatactgttactgatgtagtactgtacattattaagctgatatattgaattactgaaacaaattatttacttcatgcttcgaaaaacaagtttccagctatttcaccggattacttaaacgaattatttacttcaagcattaaaaaataagtttgggggtttgctgaaagtacagtgggctcctctgcctctgcccttccttgctattttttttcctttttaagtagcctttttccttagtatcagtcttctcctttttcggttttttctttctttattctccaataatggcaatatagccgttttgtgttgtgtaactaaactcttttttcttttgatatattgatgtgtaatcttttttcatgttcgtgaaaaaaataagttttcttaaaaaaacttcttctactgcgttgttttaaactatttgttaaatttatttttctaaatatttgattaatccctacaaccaagtagataatccactcgataaaataccaatgatgatatatttgatgagacggaggattgttttcgcattttgtgcagcggaattaccggttcttcttcctgttcatctcgacgtcgaccctcctctgcgtctacgtcttcgtggtgtcctggctgaacatcgtggcgcataaggacggcaacgacggctcgctgctgaaatccatggccggtgagccgttgtccgtcgtgctgatcgtgtacaccttcgtctcggtgtggtttgtcggcggcctcaccgtgttccacctctacctcatgagcacaaaccaggtaggccgcatcaagccatgttgttaaattgtttgttgagttctttcctgaagaaaatgcacgcaagaattgtcacaaagatgtccaatttcgcgacaaaattatcatgctcatcactacttagtgaccaggttgtcaaattctcgattctatcgtaccatttatgactttacgatcgaaggcctgaatctatgattatttacgattttatgattgtaaccttacctagaactatgattatttaccatttttaatatattttttaaaagaaacttccgattccgatctaggatcgagattttaatgaacataaattgcacattttgatttcaagtaaatcctgatctaggattgatttacttgaaatcgatacaaaatttgttctgaaaaaaatatttgtgatcactgatgtgatgcttctctactgcagacaacgtacgagaacttcagatataggtacgacaagaaggagaacccgtataacaggggtgctatatcgaacatagcagaggtgttctgcgctgggatcccgccgtcgatgaacaacttccggtcatgggtggcgccgccgccgctggaggagccggacgacgtcagcgggcagcttccgccgaggaacggggccgatctcaccggcggcgtgaaggagaaggtggacctggagatgggccgcaacggcggcatcatcccggcgatcttgcgggggctggactacgacgagatggagaagaacgatgtcagcgtgcatatcaaggatcggggagcggcaccggcagcgccggacccattcatggccggccggtggcacaacgaggactgtgagagtactccgacggcggtgagccaccatgtaaattcagaacgattatgacgtccccagatgcctctagttgttgcaaatttaaattattctttttgggcgttttggctctaaagcaagttggagaaatcagaaaaattgtaggtgtaaattgggtacacatttctgatggttatcttgaatacctgagattgttcctttgtttgcacggaagaataccaatgcgtgaacatcgcggggaaaatggttgatttgttaacattaaggttgttttgttgccgtcgcggttatggtaagattttctttcaataaattagattccacacgtcaatggctcaaaaagtatggtaaaattcacgtagacttactaaggtgtgcaaagattttgagcacctacatgttaagtaattgttggtaaataagcaaaatatgactgaatcaagcaagccaagtctatgattttcgatttatagctctaaaagatgggaacgtattacacaagttctcacatgtacacacggtacatatgagctagtgattatcaaaaaaattatccatgtgctttcaatagtattgcttctacaagtaaagtcccatttttaaattcatcgtacacggagaacaacaaaaaagataaaattctaacagacttgtagtataaaatagtaatatttttatagctaaaatataataaatttgaggttaagattttatatgtaggtataaaactattgaaactatatgcacaaattttttttagatttttcgatgatatttgttagttcgtgtgtacggagtgtgcatgtgaaacttaagtgtacatggtatatttacctgaaagatatggattaaatttgttagcacctaaaattctacctatagttttttattttgtgttttcgtcgtggcggctaacatatttttcctgtttttgacctatcttgaccgaatccatccttaatattggccctattcactgcaacttttttgcatggctgtgcagccgctacaataactatgttggtgtagttgcaacggctgcagcagcaagctgcaccgaacagggccattaaggtgatggaaatgatttgcagcaaaaacataaacaatcgctatatatattaagttttttttccgacaaagctaacctgtaactttgtatgatgttataaaactgaacttttgatcttctcataaccaattttgccaatggattatagcacctcgtttgccaagtccgaagagattttttggctgactccagtgatattttacaagttacaaaaatgtggtccatcatgcatgcacatatttcattttagactatgcctgtgatatgtcatccactagatatataggttttctccccattttctcttgccacgacatgttatattcctggccagacacgtggctccgtcctagccagtacttgaaccttgaagaaacccgttggacatatctgccaaaatcttgctccgttttttcaattatttttgcgaggaaaaacaaaagagattcgttgttcgtgcacatagaaagcgcagcctgtgaacattagcacataggaagcttgtgcgcctcttgtttctctcattttcgacatcacatcttagtccttttcactaaactacaaaccaggcagtttggttagttttattgctcacagggtgtatcacattgtgagtttaaaggaattctagaaagggttttaccggttcgtgttacttaaatcctatgtggcatgggtgcataacttcatctattagtgttgagttcgggagtaaggattaattggggaccctctcgctcccaacacgtaaaacggagtaatagttagtgtatgatttattaagtattagctaaaataagttaaaaatagattaatatgatttttaaagcaactttactatagattttttttttacaaaatatgcatcgtggagtagtttgggaagcgtgtgcgtggaaaataatagaggtgagttgggaaaggtgggagaaagaacacaacctaggatttaaatcataggtttacgaatatcacatgtaattaggtttccatgtaagagcaagtttaatagtatagccaactactagctccggatcatctatagtcaattatagtcaatttatacaatagttatctataaacatatactacacttttaatatctggtcccatttatcatacacacattgcgtcttagagtctgtgctgtagctggctcccaatctg

SEQ ID NO: 5599 - DNA, 22178 bp, Oryza sativa
gagttactaaaagtaagaaaactgcagcttctttcgacacagcttgaacctctcactgagcagcagctgtcagggatagccaaccttcagcagtcttcacaacaagctgaagatgctctttcacaaggaatggaggcccttcagcagtccttggcagaaacattggctgggtctcttggttcttctggatcaacgggaaacgtggcaaactacatgggccaaatggcaatggccatggggaagcttgggacccttgagaatttccttcgccaggtaccatgttttttctctctctctcttttctagtgtaaattatgtatgtaaaccttgggtatagtcttatgatgtccatggagtatgtagtatgcggattcgagtaaactatagttcaaaattgtgtactaaatcctctttatcttttccactatatgaaggctgacaacctgcggcagcagactcttcaacagatgcaaaggatactgaccactaggcagtctgcccgtgcgcttcttgtgataagcgattactcttcgcggcttcgtgcccttagttccctctggcttgctcggccgaaagaatagcaagcgcaagtaacttgactgcaaccacatttttcgggtttgggaggtgatggtgatcttacctggaagagttgacaatcctgcaaaggacttgattcggagatatttgcacatactataatccaaaagagatccttgtgttcaggtagcttagtcttatggttaagtgcattaggccctggcccatgttgtactgttagccgctgtaaaatactgttccattattacttatgtatctgtaatatcctaattttcagagaatcattagaatgggaattgggaacggtcttattgactatcccgtgggtatttgacatctcttaggaaaaactagcttactgtcatggacacagcgccatgtcaataatctaatcaaggatatgtgaccattcagttgcattggaatttctgtgactgatggattgtgttttgtcgattgaacactacacatgtgatttgtgaacttggtctatgatagcttgaacactacacatgtgatttgtgaactatgacagcaatgaaatcattgtcagcagcaatgaaattagcaacttctactcgtttgatcttcctgggaattagttcattctgctgcgtctcgagaattttcatggctgtcagcagcactcaaatctatgtaatgttttgatgaataacctgatgcgtaacggatggcaaataaatagattcaaaacaaaaaatacaaatgcataatcgtcctcaaaattactagttgtacaagaccatgtgcgatcagttaattacatgtaagggaaccatggtttaaaagaatatattacacactcataaataggctttcaataaaattttagtgagatagatgtgatgttagtttcgtctctttgagcgttggtgggtgcatgggcaggtgtggtgttgcgtgtgtgtaccgtgtaatcgaaaaatacatacatgttcatgccacttttttttcaattctccgaaatctacaatacatacatgttccaagtgtatgtcaacgatggttttatctgtagcttactgccagcagcactgaaagtctgaaaccgtgaagcttttttttaactgtatcaactatggtcattgatttgtgcttttggtagaattagaggtgctcccatgattatgatatgcttcccaacgctaattataggccgcacatttacgctaatgctggaaaagttcttatatttataggacgaagttttagcatctgatttaatacttctaaatttcaggaagaagacaatgatgatgcatgtgtgtatactctgttctaacaatcactcttactggcacaatgtgagcaaaacaacctgcaagcccaaacttcagacatcttgtcgcacaaatcacacctacgatggtcccatcttttaagttaaaaccaagcgtccacaaacttaagattattcatggataaagcatcctaagcagcatctgatcccccccattctcttctatcaacagaagtcagtattgacaggttagacactacctagttcaaacttccaatagtcttatgagcaaagttatatcatatatacgacgagggaggcgcagcaagccaaaccaactgcaaactagtagcctcccttgttaaaagctccaggtctttgccctccttcggatttcggatttcgcatggaggcaggatttcattttctttcatgacaaccatacccagtagtcacagtttgccccccttgtggatgtccagtttccgcatccgtagaaatatcgaccgtgcatcgggcctggtctgtaggtaactttgatctggctcagcacgccgcagtggcagtacatcggcttcttcactgtgatgccggcgtatgggttaacctgcacaggagatcccatcacttccattggcttatggtgtgattggttgggatacggagagtgcgcaggggacgactggcacgttattgactgcggggcagattgccacacaagcgagttggtgatcgaaaacttgaagccccggtgcatcagcaatgcaaggaggcgagcggtgttgcgagcatcatcgagcccacagtgggcacggccctcccatgtaaggccagacaactgaactgcctcttttaagttgcaccggacacccccaaacacttcctggaaaggaaccttcaagtttatccacctgcaatttgtgcaaaagacgtcaatattagaaccacggttggcttctataagaatattcaaaataaactcaggccttttaactcagagactccaacatgacttttaatcattacaaagccaagtaaaaacatgttactctgtacattggatttttacaaggcactgtttgatttggttgggtctccaaaactgaaagtttgaccgttacttttttacaccatattgttcaaacaacaaaattatggccataggaaagtattttaaaatataaatccaatggtgccaattcttaaaacaaaatctagataatgctggactaattctagaagaaaaaaatacaaactttgaacattgatattcgcgtgcgccctatgaaactgaacagagtatcgagtatgcatgcagaaacatctccactacttctcatcataaataagatgagacacgcagcatacagaagaaaaaaacagtcaaattactctattaacctaaccaactttatataaaaagtctatagtgctattcttgtttttaacattatacttccactaataacacattcaaggttgtttctcaccttgttaattacaatgatttcttgtgcaaattggatatagtaacagagcatgaaacataatctcaaaccaggaaatataaaaaaatatacagaacatatatgatgaattttccagttcatgtctaatgagtgtcctgttctcatttatggcacttttttcttcactattttcatatttgccactaccacagtgacctcctaaaaatgtcattttccttttcttacagggcagggtaactgttaagagaattcaagcataatgcatggaaagttcagaaaatcgtaacagaaaaatacaaggacgatattttctatagaatttgtaaactttcagaaaacttaagatcttaaggatgttgcataaatgataaataaacttatcattgtcacctagtagaagttttcatagatttttttcttagtatatcaattttctgagccttttttttcaaatgtgatccttcaatattctgtactttatgatatttttatgctatgagttttgtctttttctcatttttacttttcaaccccctgacagtcaaaccggaaaaatgccttttttttagaagactgctaatgtcgcaaatgtcaaagaccacaaaaattagtggaacaaatgagaatgggagtttcatttgtggcaaacaatttttttccccaaacatgcttgtcttgcaacatatagtctacttctaaatagactatctacttccacaaaatttgaacttgatacctttggaaaagtgaatttccatagtaaaatgtgtcaatgggggattttgcactgtttcttacaaagtccattcaaatttctatgttcaaagacttcaaacaagccctaatatttcatacttacatcatagcgaatagtaaaaacttatcccataatctggtttgatcagagtatagcaactgcagttaagacacactaaaggcacaaggtgaaagaataccttgcaccacagccaaaacgaagaaacaaaaaagaatgcacacagaaccccaaaccggccaattaaagcagctctcctctgtgttcgataaaaaaaagccaaataaagcaccaggcccagccccatagtcaccggtaacccgagtacaacaactggatgggacttgaagaccatcaatgtaaaaaattacaaggggatagttttcttcgaaatgctagttcaggatgcaggatatgacccgaccccaacaaatcagtgtcgatgaattatagaattatcaaataacaaattaaggccccactatttttagcctatagccccagattatcaataggattattcgtgccacacttccaaaagtacgatttctgtcagcgttgcttagttttttctaagttactgtaactttattttatatatatatatatatatatatatatatatatatatatatatatatatatatatacacatacacacacacacacacacacacacacacacacatatatacatacctataaacaagtagatcatccatcaactttcatccggatttcagctaaaaagaacatgacctaaataattataaaatacctacaacacgtattatcaataatcacataattgatagtactctacaaaaaagatcctaatgtaccgctataataaaaccataaaggctgctttctctggctactcctttcattgatgtaaagaaatgtgaaagcaataaaaatataaaagctgcaggctgaagcctctcactcttcccatctctcataaagcatccaagctgcttcctccacaatctccttgtgctcctgctctcctttctccatgaaggagctgtggaaggctgctgtatttcttcaattttgtctaggagtctgagtggcttaccaacttcctacaacctcctaggctgataggcccagcccacatccccctcgtccctctcctttcctctgttctcatccctccctgccacacttcatgaccatacagcaaaccaagttaactactaactcacggatccacaatgaccctgggtcttgaaatgtggcttcaaccctcatcttttttgttctgtccactaggccaacccacatatcgtcctctctcactcccaggcccttatatgagcttgttcagagtgggaaatggaatagcccccccccccccctaaaattctaaaattaggggcaatttttttttgcttaagtatataatactatggcacaagaaagacttaatggattgcaattataacacttgcttgcatcattttttttaaaaaaaaaattcttacgtaaaaaaaaatataacagttgaaaaatatgtttggcagaagattaattattatcagatatatattgttgaagaatttgtttcaagtaattttagacggatgtcgcttttcagtataagttaagatatattaagtgtttacaagcaatctttactattttagcatgaatgcgtaatataattcttaacattgtgaaatgaaaacatatattgcagtaatataatgagaaatatatattttggttattgacacaaatatatgtatactttgtgttttgcaccagggtctcaaattgttgggtacagcctgctcgctccctcaacctccctggcaccctgcccctctcagtgtctaagcctagctgccacaacagcaagcagcgacagcatgattaggtggggcaagaagcaaagcaaagaaaggatgggggagggagagcagcaaatcaatgttagatcaggagaaggagcagcagaggacggactgcattgtaacccaaaaattgcaagaatatggtaccaagctggccgatggggatgagctggggaggaagatgccgcaacatcaaggcagggagaaaatgctggctttgaggcgggtagcacatatccactacacagcgagaccctagggtttccagggtaagcttctccctctcattgtctcccaataaatgcttaggtcacgcctatgtgacgtcttaataatcatgatgttagccaccaaaaatcttggtattaataacttaatctgtaagcctttaacttagtctaaaattgtgctgcttagtcccaataaacaagttagtaaatcccatcctatcttagcttgtttgacgtcacgttccagaaccagaagggaaaccaacaagcagtgatgggtaataggtgggttcagccccaggcctcactggccagttgccagttgccacaatgcaaggccaggcagaaggaaggacaaaagcaggaaataggatggatcggtaactgtggctttaccactaatcaactgttgtatccagttgtttagaggatgagtctccctaacaagggctaaacaatctctctaactggaaattttaacaagctgcctaattgaagatagaatctcaggtaaacatacaaggacagtacagctgctgactggtggcctgcctgattatggtactgacacagtaaaagaacaagaaaaatgtgcaagctggcactttgtacatgatcacaaaagaagtggttgcataatacatgttctgaatctaatatattaccagattgacccaggaaaagaaagttcatcctgtaaaacttttggtctaatgctatgacatggtttttgctgcgttcagataaattactttcttttttcttgtttctgttcagtgcaataatggaaaacacttcagtttactacaaaattaacacgaaggctcctttaaaaagaatcaagtgcatgctccatgtagtgctccaacatactacaaaaattaaaacattagggcaagcaagaaagggaagtttgtttgtgccggtggtttgcttttcgtttttgttcccctttgcttcttccaactcatgttcaattcaaacttgattctaagtagatgtatgctaagttaagaacttcattcagtttcctttggactttttatgctgattttgtagtgaaattaaataagtgtacaggtttaaaccaatgccatggtttgcaatacacaaaatggcatggctcctcatgttaatgtttgaagatgccagaaaaaaaaggagttcccttgagaatggtaaatatgtaaactgattgtcatgggcatcccctagcggatgaacagtaccacgggcactgtagcagttggttaggagatggataagattagtttgagttagtttcttaaggatcaagtcatatcatctctatataagggaagtattgtattcatctcaagtgaagcaatgaatatcaattagtctaatgtctccctcccaacaatgttcttctccctagcctaaatctacatcccttctccaggagccgacgccgcccggctatcttcccgacggtgtttatcccgtcatggcctcgggtcatgacaacttggtatcagagccactcaccatggcttccaatgccaagtgagttctccgtatcacggtgagccatctagtgtacccggtggatgagtatctactccaccagttgtttgatggttacggagcagaaaagaatatcaaagtgttccagatgggaacacatgtggaggcttctattccgttccaaactagagcggccgctgagcatgcttggaaactcaatggccgtgccatctatgacggctgttgttggctgaacatacagtgggcgcaaccttctagtagcacccccgcagcggcaacacctcttgtcgggatcactaaggaattgatagcaaatgtgcttgaattgaaggccatgttgaaggagagtaatgcatcaaaagaggtggaagatgggcgcacaaagcagaaggtggcagcggtagacctagcagtcatggcgccagttgctatgccattaactcagatgtccccgccggcggactccttggtggagcaagagatggcaacacagcagaagaccgtggagggcacgacgaggacattgccagcagtggtgccatcgtctcagtttcctccatcagaggctggtttctcgaactcaaaggagcaagaggcagcgccagcgtggtcctcggaggcgggcggaatggcatggcacgaaggtgggtcggcgttttgcgtgaaggtggagcacagtgatggcgcgtgttgcgcgcagccagggtacgaggccattgcgtggcagcacgattttctgttttagatgggctgcgtgtctccgattcgttggcggcgccgcggtttcagagagatgcagctttgcttcctcccatgtgttggctgttgggctggccgggtcgactattgctgaagacaacggggacctccaaatggtcctggtttaataggtggccacgtgagattttttcagtaacgtcaaaactaagttgctgggcttacaaacttaggacgtggagaacttcaatccttcctgtaacagcatccggatggggtccaccagtgagtgtcgttgacaagatgatattgataccctagcttctgtcatcttagatttattagtttgcactaaagtagcaagtcgagatgtaaaaggcttaagtcactgttaagttttatttagagagtcatcaggcatggcatcactgtgttgcagctcgaggacgagctgctcaaatggaggggtgtagtgtcatgggcatcccctagcggatgaacagtaccacggccactgtagcagttggttaggagatggataagattagattgagttagtttcttaagggtcaagtcacatcatctctatataagggaagtattgtattcatctcaagtgaagcaatgaatatcaattagtctaatgtctccctcccaacaatgttcttctccctagcctaaatctacatcccttctccaggagccgacgccgcccggctatcttcccgacggtgtttatcctgtcatggcctcgggtcatgacactgatgacctaaatttcacactagaaattgaaaaataataatacattgagacagtaatctattgttacgactgaataaatgccaagtcacattaacatggcaagttgtaacataattacaaatccatgtaaaattttgtgcaacaaacacaactaaactattacgtgcaagagagtacaaaactaaggggctgtttgaatcagggactaaaattttagtccctatcacataggatgtttggacattaattagaagtattaaatgtagactaatgacaaacccattccataaccctagactaattcgcgagacgaatctattgagcctaattaatccatgattagcctatgtgatgctatagtaaatatgctaattatggattaattagacttaaaaattttgtctcgcgaattagctctcatttatgcaattagttttattattagtctacatttaatacttctaattagtgtccaaacatccgatgtgacagagattaggtttagtccctggatccaaacaccacctaaacacattagtatagcatgtgaatgttatatcgaaacagaacaggcagcccaagggccaggtaaatatgggatatctgttacctgttaaagtaagggggcttcctgattctctttaatctgcactcagattccaacattacacggcaatcccagttagaccatgtcacaacagcgaagttcttgtgcttaatccctttttcctccaaccacttatcatgcatgagcaatgcctcacttagaggcacacctctgtctacctagacatgcatggaaaaaactatattacctctgaatgaaagaatacttaaaactatcgatcgtatttgtgtgagtaagacataatttttcaaagtgggtaaaatgcagtttcaataagataacaaaattcacatattaatatgtaaatattatgagtttaaatatatgaaagaataaagaacgataatttgttcactaaacatattaggtatgatttgtcatcaaatggattaaatatgttgagttatagactccagagccaaccttgccattaaaaaaaccatctttaaacataaactttaagcacaacttgaagagctcgtaaacaaaaggttataagtaactatgcctgtcatgtgctaaacttgaaatatgatagctaagaatagctgacataatgcaaccaaatctaaatttatatggaaatgcatacttccttacagtttccactttatcagtgtcaaatcaaatgttgcctgaaatacagaacctagttgttttcttgacagatcatcaattgcaaacaagaaacagaaaacaacaagaccctgctcataatgttcaactgccatctctccttggatggctctgaagacaatatcagcagaaatgtgatggctctatggatggttcaggtaaaatagtgagttggaatatttggaagaagatgattcagtaaagctcttagccaaagaaacaaagcttcatatcaaagagagagaagatccaggtgtgaaaggactgtgttcgaccaatcatggattgataggataagtagaacaccacagtacatctttggactatggattgtaaattgatctttgtcatacaaagcacctaaggaacaaatacataaatggtgatttatctaatctagcctacaggagacacatttgaccaagaaattttactgaattctaagaaaattttagtgtgcttataccagttctctaaattggctaataggtgatgcaagctggtaagccacccaacttggagcctagtgcctcaactgtacactggtttttcaatcggcagtaacatgaaacattggctctttttttcctatacacttttaagtacataaatgatcacttagcaatgaaggctattaggccaagcaatcatgttgaaacctttttaatcttgcgtggttatcaaagataacgaatattcaaaactataataggcaccaacctgaatttgttgaatgcccgtaagctccttgcaaaagtcagtcaaaagttgattatatgccggccgaacatacgtttggaaggaagcttcaagttgtccagttgcactgttaaccaagacagatggaaactcaatgatttcttgtggatgtggattgttctccttgtcacaggttgcttcaaagtcaataaccacaaaatattgaaattcctgaagttgtgcatcaggagggtaaccttgagggggcatcttgaatggaagatattgaactctactctcaataggaaaactgtggtccctgtttatttgataaaattggttatctaagttgtaaggttgtggctgtcccggcatttggtaatcagcataaataaatggataggcataatattctgtccgttgaacgggtctgaaaaagccttgatttggaagaggagatgcctccaagactctttctgttgcaatactatcattctttttttcactattctcaggaaacccgttgcttctctgctcttgcaggttatactgagaaattggcttgaggcaccccagaggtgcctctttattaacttgcatttcctctgcataaaataattcaggttaggacataataaattaacactgcaatgtgacaaagttcatgcagttccagaaaaatattgaacttgcaccatttactatcatatcatacgcaacctgatcatttgcaatgaatacttcaggacatcaaaagatgccaagataacatatttccctcaaacaattaatggctgaagtagttcatacactaaggtccaagcaggatattttcatagcaaaggcggcatctcaaaagagcaccgaaaaattaatgcttaaatacagtgtttgacactgggaactactataacagaaaaaaaatgtttcattagtctctgggttaatatgtagggtaccacttgacaagaacaaccgccaattcaaattattatataataaaaaaaaagctatgctccttagtaagctggaaatgtgggttaatatgtagggtaccacttgacaagaacaaccgccaattcaaattattatataataaaaaaaaagctatgctccttagtaagctggaaatgtaggctgtaattctatcgctcatcatccaaacaagaaaagaaagtagaaccttttttttttccatgtaaagggacaaaaaactttttgtttgcaagattacagcactttctgataactatgcactatcatttgacctgagcgcaatatgagtgcaaaaaaaaaaaaaaagaagctaaaacagcagtgcaatctccattggagtttgagttagcttgttgatcaaaggaactgggaaatattcgtgtactagatcatgaactataagtcactcgtatgcaggggcggatccaacttgggacatggggattcaattgaacccgcaaacttttgggcgaacaaaaaaactgttattacttgaattaagagaggtttaaggctatcaaattaaggaggaggagaagatctagaagagaagctagtagggttcacgaacgcaagcaaattccagtcccggtggggtgggagagagagagagagagagatgaatcagaaggaggacgcggatgctcaccaggatcccctcccctccgctgctctgctcgccagatggagatcgccgcccggccctcccctgttcagccgcgacgcgactcgtcttggcggcggcgcaaggagcggaggagacaacgagaacgagacggggagatttctttttcttttacgcgatactcgactagagatggcaatgggaaacatgacacgatatccgacgggtttttactctatcagggaaaaaatgttctaacttttatatctacggatctactaaataactcttacctattaaataagtgtgtatggatatgttttttacctatacctatatgtacccaccatccgttggtgaaagaaaaccatagattgaacctaaaaagaaactcgtagattgaacctaaaacaataaataacgtaagtccctctaactactaaattatagcataaaactcctttcatatattaagcattattccaatttagttatatgaaattattatttaatttcttgattacgtaatgttgttgtataattttctttttactcgcgttgtagaattttctttttactcgcctttgaatgataatcttaatagcattgttgctagagaaaatattaatggtttacagttctaatatggctaattacagtacaaaactataaattctacaagtcaattatatgggtatgggtacccgttacctacacgggtgtgggtacgggacgattctgtacccgcgacgggtgtggtatttaagtgggaatatttatccatcgcgggtgtgggtatggggcaagagaacccgatgggtattgtaacgccccgattttcattcgggattaaaaatcattaaataatgcattttctagaaaataaataaaaattaaagcaatttaatcaagtgaaataatgagggactttaaaatttcctttaaaaatcatggccaaaaatattttgtaatattctcggtgtcctaaaatactctctgaaatttctcgcgaattttcggagctcaagaaataattttaatagaacaaagttcatttaatcaattaaaataaagagaaaacgaattaaaatccttctcctttgctttgggccaaaaaccgcctcctctcaggccggcccagctcacttcccctccccctctcactcaaagtccacctcccctcccattccggtcccctctccctccctctctccgacaggtgggacccgcagccccacctgtcatccccaacctccagccacccaccggcagccgccagccacgccgcccacattgccgcttcctccagcctcctcgcgccttctcacatgcaggcttggacgccgcccatcccctccacctcctcgaccaaacccccctactcgtcccacaaaaatcggcatcggccaagccgccaccaccccacgtcgctacccccactttcccccttcaaatccgccacgtccggccacgatcttcatccccgagccctataaaaacactcccagcacctccctctccatttttccctattctccccgagctccctgcgccccctcccgttctccccacgccgagcccgtgctccgccgctaaccgacgagctctggccgcgcgccgccgccgctagagccgccgccgccctacgccacctgcaccaccagctccgccacttcacgttgcagaacaaccgacgcgcccctctttcattccaccgcccgaacgctgcttccaccgccaacccaagccgccactaccatatgttgcctccggccggccgttgccgccgcgctagccatcaccacgcctcaccgcttgcgctgtcgacttcgctgcatcaagctccaccccgggggctgctttgctcctccaacccaccgcctaaacgccttctccctcgcgctcccaagccacagccgcctttggctgccttcagccgctccccgcgtgcgagaggggtttcgcccggccgtgccaccacctttcctaggtcgtcctgatcctcggccgtccctctgtcgtcgccgtcagtcaccggagcgccgccgcctccctccgcctctccttttttcccctcctccgctgctccccttgcccgcgttgtgctgccgtcgctgctggccgtccggccgggtgccgccgccgcctgttcgagccggctgacgagccagcccccttcctccgttgcctattttggcgctgcccgtggaccgcctgtgctcctggtcctcggcgccacctagaccgcggtggacttggtccaccgtgtgcccttcccttggagccgctgacgtgcgaaaagcttctcccttttgctgacgtcagcgatcacctattttccctttaaaaataattaataattacgcaataaatcgagtttaattgtagaaatccatttaaatggctcaaaacttctaaaattcatatataattcattcgaactttaaattgggccattcaaattgcaaaattcatcttaaattgagctctacatgtttgtttacttttgatgtattgtttacttggtttttagggtttttcatcgttttgcatgccagtgtgtagaatccgtcatttcggaagttcgcgatcgcgaggaaaagagttcagaagatcttttgaagaagcaaggcaagtcatacattccccccttgagcatattgagcctactttataaatgttttaccgtttgcaaataaatatgcatgttttgctaattacatgggataagggtacaacctatctgctcgcttgtgccatattatttgatgtccgtcctttgtcaaacttgggtgataattcgactagcttgtgttacttatgttgacctagctagaactacatgcttagccatgcttaattaccactagctcacataatgggataattacagttttagacatctagtatcttgacgagctgcatgctcgagacatccggccatgtttcattggtcataattatccaactaaaatgcggctgaatgtgggctgtaggtgcatggttttgctagtcgcgcccatagtaattaaggaccggttcacgggaaaccctggaagacttacagtgcttaacacaagcgggaataggtaactgcttgatctgtagtatagctcgaccctttcctaggcaccggtggcgagggtgggcgtgatggagttgggtcgaacggggtgtccggttttccagatgccagattcaccgcgatgcacgaggggactgcccacctccggggtagggggtgggggtgaaacctttgcgtggtgtggatggttaggggagggttatgtgaagggtcttgtcacaatcactcaacatagtgatgtgtctgcgtaggcacggtgacatgccggtggattgtgacttgtgggtatagttgtgcacctctggcaagagtaaaactattcgaatagccgtgcccgcggttatgggcgatcaaccatattcaccgtgattagtctcacctttaactggcttaatgaactaggtagtttaggtggtttggttgggcctgttcaacgtggtgtagcgttgatcagtggagatttaatattaccttaattaatcaactgttttattgtttcgctcaataaaatgctttgcaaccgccactacaagaatctatttaatctgtgacgaaattttcgtgatgtttttagatattgtcacggatatgcaactatggatacaaggcccataataccgtgacagtttatcgatttcgtcataaaccggcccaaaacctgtgacgttatagcaatttcgttgctatttaaatacttcaaaaccatataagagatatgtaaattttgtgaacaatgttactatcacttcatcggatgaagaaatgaccaaaataaaagttatagatattgatgagttatacaactttgatgttgataactttttcagttgaaatcatttagtatttgaaaatattgtttgaagttgtcataatttgaaattcaaattcaaattattgaaatagagtcatatagcaaaatgaccaaaataaaagttgtagatatcgatgatttatgcaactttaatattaccttaattaatcaactgttttattgttttgctcaataaaatgctttgcaacgcgccttcatgcaaatagccacaagccctccgttgtatccccttgcacgtctgcatcactggtgtggcttgctgagtacagttattgtactcagccttgctattattctccttttttagaagtgtagcgcttctgagctgaagacgatgttagaggaccaaggctcagaccccagttgagttttgcctgtggagtggagctgaagcccccgataggattgcctgacatggagccagtgcacaggcgcactaccccggccacatcggttattcgactggtcacagaccggtcacggaacagtcaagcgcaccacgccagcgcgtggtgcgctctctcagaccgccttaaatgcggttaggtgggcgctggaagcgcccgtctaatgcggcacatgcgacgccgcgcggaggaggtcggggtagcccgatgcccgggcatgcgggagcggctgccgccccgcctcgggcccaaccccctctgggggagggccacgtggctaccgggggaagcctctcctctatagcctttataccccgggcccatatcaccgtcacaatgtatttatgtttggctccatctcttaagagcaagtgtaataagattttaagcgatgtcccaaaagtgccacatatgatcgactttagttaaatttgtttattttatatcgtttcaagcatatgaatttctattattttttattggtcttagtattatttacctttgtagatattcaccgaagtgtagtttcttaggagtatgttacaattttcttttatgtcccatcctgatagaaaggaaagcatatgtagttggatgttgatttagtagctgaatcaataattgataggtatgaaaaaggaagatcaatgcatgactgtagaagaaaaatccattattgagagcaataccaaacacgttacagttgttaaatcaactattttcctaacaaacattgaagaaagatacagtagtgagagctatggtaaggactttatatttgttaatcaaccatttttcctaacaaatattttgaagaaaaccccaatggtgagagctatgactagcgctttttatttgttcaccaataataattttcctaacaaacgtttagttggtggattgattcctatatctttttgtcaactgctaaccatatacataaatatatcaggcatacatgtatgaagtttttattgaaaaataattccactagtcagcgtagcatttcccggtatatttgttttgttgccactttcaactttatcaatttttaataggacaataaaccaaatcatctcttactataaaattgtaacccactaactactaaaacttaacatgcaaaaatgtcacatcatcatccactaacaatcattaaatttaaacaacatgcaaacatgttatattatctataattttataaattattaaattttcgagctttcaaaaatgtaagcatgttaaatcatcatcgcacataattcacataatattttaatatatatttattatttttttataatatgctatatacatatatagttcatcatcacttaattaatatttatttctctcttctctcattaagccatatcacatcaattttttttaagtgcttaaatgaataatctatggtccaaattatctctctcattttcttctctcattaatccatatcaccttaattatttttagcctttagataattaatctacggtccaaactatcccaatacttttcttctttcataaagtcatatcaccatacttttacatttaaatcatcattctatatactattcaaatttaaattatcataaaccacgttaacttacgtaatcttatattatctagaaatcctacacattatttttatttattgttaccatactaaagtcccgcagcaacgcgcggggtttcacctagtatactataaccatcattaccaaactaaatcaaacgtattccaaccattgttaacatacaaaattttggtagttttgagatctcccaccctttaaatcacatcaaaatctgttcgaaccaaatatatctcctcatagtcaaaagagtaaaatacagtagcggtccttaaacttgtcatgaggtttcacttaggtccacgaacttgcaaaacgcacatcaaggcctctaaacttggtttattgtatcatcccggtccaaaatctagtttgaccatggtctaacctacgtggcatgccacgtgtgcgtgtgccacgtgcacgatgagatgggattagtgagaggggcagggtgggtgccgcagctcctgcacgccactaccgtcactcccttcttgcgctgccgccgctccctccgtgtgccaacgccgccgtcgctgccccctccgtgcgccgccgtcgctcccactgcctgctgccccctccctccctctgcgcatcagcgccgctgtcagaatccagacagcattcagaggcttcctggtaagcaatgggtgctcgtgttctagctctgcttcgatggagtaatcatgccgtgtgtttgtgcaggcgaagaaggcgctggtgaagctgcaggcgctggtgcgtggcttcctcgttcgccggcaggccgccgccacgctgcagagcatgcaggcgctcatcgcgcgcaggccaccgtgcgcgcccactgcatcggcgccggcgccgccgcccatctccctcacatccaccacgctcccttttggccccgccgctcgctggtacgccgctggcgaaatctcgccgacgacatcaccatgtatatattcgccgtactagttctgttcgatcttgacgttgtgtgttggcgatggatgcagcaggagaggtgcgccaccgacgatacgaggagcgagcacggcgtagcggcgtacagccggcggctgtcgacgagcatcgagtcgtcgtcgtacgggtacgaccggagccccaagatcgtggaggtggacattgggaggcccaagtcgcggtcgtcgtcgtcgcggcgggcgagatccccactgctcgacgccgggtgcgcgagcggcggcgaggagtggtgcgccaactccatgtcgtcgctgctgccgtgctacctccccggcggcgctgccgcaccgccgccccgcatcgccgtccccgacgtcacgccacttcccggactacgactggtgcacgctggagaaggcccggccggcgacggtgcagagcacgccgcgctacgcgcacgcgccgccgaagcagcggccgtagccgcggctgccgctgctcctcatccctccgcgcaccaaagccgtccctccctcccttccgccatctctgctgcatttgtcggtcgccgtgcagcgttgtcgttgtcactaaccatggcgaccggatctggcgacctcgctgtcctcgtcgccaccacggtcccccgacagtcgtgaggagagtggagagacctcgagctcgccaatggagaggggagagagctcgagcttgttgtcctctgccacacggagctcgacgctgccgataccgtcgcccttcgcctaggagttcgttggggaggagagaggtggcccgatctgcgcagagagagagagagagaaagagagagaggaaaggcgatgccgccagggatgagagaggcggcgctgccgccggcggtgagcggagtgggaggggaggcgtcggtggcgtcaggccatctccgtcagtggggaaaaggaggtggggaggggatgagaggggaataagaaggaagaaaaaaaataaaaaaagtctatgttatcgtccacattgcgtgccacgtaggcaacaccatggtcaaaccagattttagaccaggatgatacaataaaccaagtttaaagatcttgatgtgtgttttacaagttcgtggacctaagtgaaacatcatgacaagtttaagaaccgctggtgcattttactctagtcaaaactagttatcgccaaacccaattttgacaagtttgcaagtttcaacaagtaatatttttcttactccctgccacctactccctccgtcccaaaatagctaaacctaggaggggatgtgacattttctagtgcaataaatctggataaaaggctatctagattcattgtattatttttttctttgaaaacacaaaccttttattagaggacagcattagggaaataattcccggtacatcaacaaaagatgaaacataaagtacttaaccatccatctagagaggaagggtagttcaacaaaggaaacataattcctaatgaaaccatggggctgtaaaaagatgtgatcagcagggagccgcggcattgccgcgacgattacatccaaagacctcttttagcatacaccctacttgacaaactggtaatcctcttcggctgcctccacgggaacggcacaattttgaggttcgttgttaagccgtagattttggtgtgcttcaccgggatcaacataaatattccacggagttctccgttgaatctgagaagcactaactgcaatcctgttgatcaggactgaacatgcgatctgtgctcaacgtaaacgaaaaaccctgcatggttactgccacaaggaaaacaataggaaaagtgcttgcctagatcttggatttggggctggctcctccacatcgattcctgccacttgtctccacttgatttgccaaaagcaggtagtagaggccaccggtccttctctcggtcaaaaggccatccaaaccatctccaaaaatctccgccgccctcttctccaaccaactccgccgccatatgatgaaccttgagttcctctcaacactcaaggctgttgttggcccgatctttcggtgagttgtgataactacgatttgggagaaatgttgacgatccgactacaaccgtacaagacgttctgttgcgccttagcgatcgatacgcctctccgtgggttgttgatcttgccagtgcagatcaatcttattcctgcaagcaaatcgaagaaacaagcaagaacaagataaaagcaatctgaattacaaataggaatgaatacacaagataagttggggttccgaagaacaagcagacggacggtctagccgacacgcgtgctgcaagcaagtagcaatggctaaactttaatctatcaaaacccaagaaactctaaaggggtacctaactatttaaggaggtgggaggacgacctaaggggaccctagggtcgtgctccacctggttggggcgcaccccacatgggccccacttgggccggggttccagacgaagttataagcccataggccattataggtgacgcaacaccttctttttgtgatttcggccga

SEQ ID NO: 5600 - DNA, 29339 bp, Oryza sativa
catgatggagttgggtcggtcggggtgtccggttgtccagctgccggattcaccacggtgcaagaggggaccgcccactgcctttttaggggtgggggtgaaaccttagcgtggtgtggatggttaagggagggttatgcggagggtcttgtcacgatttccccctttgcagtatcatggtgatacttcggggcatggcgacatgtgtggaatcgtgtcttgtgggtacagttgtacacctctggccagagtaaaactatttgaatagccgtgcccgcggttatgggcgatcaaccagattcaccgtgattagtctcaccctctagtttagcttaatgaactggtgtagttcaggtggttggttgagcctgttgcaacgtggtgtagcgttggacagtaattggttaatattgattaattactacaacagttttactgctttcaacttctgcttttaaatgctagctttgtgcaaatgaacccctagccttctttggttatatcctgcatcatacctcctcttccggtaagacttgctgagtacagtgggtagtactcagccatgctctcttttcccccacaccagagttgaagttcttcccagttggagctatctcgaagaagttggtctcgtcgctgccgtcaagggatgcctgtggagtggagtcggccgctgcagaagtcaagtgtccaagtctagctcgttttatctttccgctgcatttgtaatcttttctatttttgtaagacgtggatctgtatgtcaacaattgtcgtttgtgtaccctggctggtcctggacagggatttaatgcacatttagcttagaaattctggttcgtgagtttctgggcgtgacaatgatcttgtgctatattagttcatatgcatgtgggtgcatttggtgggcttgtctagccaagtgtggtgagttttctcaagtcccaaacaaagagagaagtgggcacatcttataggtttgggtagcctcatgtggttttgtccggtggagtatcctttggagtgtgagcccttttctcccttataaaagttgtgtttcttggatggattgttcatgtgttggataaccctttgactaagcttcccatagagtccaagaacgtcaaattccaagacctgagtcaagagatatcgccgttttactaacggtcggttgagctgaaaagtgacctgcggtctgactgcagcccttatagcggcctgaccgaggtatgctgtccggtctgactgcagcccccatggcggtctgactgttcatcctgatttagaaggaggcctcgtcttggcgatccagagccgccagagccgcaaccggtcataccgagcccctagcagtctgaccgggccgtggatggtctgaccggccactacactgcggtcagaccggccaggttgagtgggctcaatgattgccctgtaatggctagttaactagccattacaaagtagttcggcctgaccggccacactatggcggtctgaccagcggagcacagagttggggatttcgactccaacggctagttttggtggttcggggtatatatacccactccccagcagcaagggcaaagttttggcactccattgcattatcttgaacccttgcaagagctctcaaacccttgggcacttagtttatctagttaggtgttagagagtgagttaagccaatccaagtgcattgcttcattgttagagctagcatggcacttgatcatcctcggcaagcatcctagacttattacttttggaggttgccacctcctagacggcttgtggaggtgttgcttggtgacctctccgaggagattgtggaggaggcccggcaccggtgtgagtggtttggagttcaccaccttcggaacgaaggaagaattaccctagtgattgaggcttgggtagtcctctccgtgggccaactcccaccttgcccaccccttgacgaagggggcgtgcggtggcttcgtggttgagcggtggagttgggctcgcctgaagcatctaggcccccgttgttaattttggtaattaatgacaagcgctaattgtggactaaccgttgctattgagatatatattaagttaggttcacattatgtatgcgcatggatgtctactgatggattaaaattgacggcgcaaagcaaaaggaagagaagacggtaaactagtgttttcattttaaattgatcggggcgttgggcgatcaaaattgtgctagtttatttatagctttgttgtactattaagaggagtaatgacctagcaaagagatgattttaattgccacattaggtcattgcattttcacttgtgctcactttttcacaacatacacaacaccttgcattcactgagttcggcctgaccagggggcggtcagaccgaccacatagtggcggtctgaccggcgtgccctggccggtctaaccggccccaagcggacggtctgaccagcgcacaaggtcggtctgaccggcggcttatgggcggtctgaccagccccttggaggccgggatggtgttgctcggggtggctgatatagagccgacggagtcgtattcggtcagaccgagctgatggcggtctgaccgagccatggccggtttgaccggccactcaacgttggtctgaccggccaggccgatggggccctctgacagggctacaacggctagttttctagccgttgcagagtagcacggtctgaccgacaacatacctccggtcagaccggcagagcatagagttgggggatttcgcccccaacggctagttttggttggtgggagtataaatactccccctccagcagcaagggggctctcttggcacccaattcaattgcatacacccattgcacctctctcacacacctttgagcttagtgttcatccattgtagtgttgagggttgattagccaagagtcaagtgcattgcttcattgtagagctagtgtggcacttgatcatctccacaccgggtcatcgcttgttactcttgtaggttgccgcctcctagacggcttgtggagaagttgcccagtgacctctccgagaagattatggaggaggcccggcgccggttgtgagtgggttggagttcagcaccttcggagtgaaggaagaaccaccccgagtgatcgaggcttgggtagtcctctccatgggccggctcctgccttgcccaccccttgacgaagagggcgtgcggtggcttcgtggttgagcggtggaattgagctcacctcaacggggagtaggaaaccggcgagtttctgaacctcggtgaaaaatctcttgtctccttgtatcatttgattgtcgcatttacatttgtgcaatttacatttctaaagacatacttgagatcatatcaccctaggattgctaaacattgacataggagtgtgatttacttttctagagatataattgagccactatcaccctaggtttgcaaaacataacttagttgcttcgttagagttgaccatcaccgagcctagcaacttaggttggttttgattaggtgtaatttagttttaaatcgcctattcacccccctagtcgatatctcgatcctacatcgcctcaacggggattaggaaaccggcgagtttctgaatctcggtgaaaaattccttttctcttgtctcatttatttgttgcatttacatttgtgcaatttacattcatagagatatatttgagcttatatcaccgtaggtctgtaaaacttaacttaattgcttagttaaccttatatctcacattgcctagcaatttaggttagttttgtttaagtgccatttagttttaaattgcctattcaccccctctagtcgacatctcgatcctacacatccaaagcaaacgttgtttctactttttcagattgaccaaagcgcaggagcagagttttacatccctcttgcaatgctatacacacacaaaaaagaaacacagttcgctatcgttaattctttttttttctttgattgatgtgcccatcctacatcctgatatcagaaagggataatggatgtaatttcatttcctcatgaaatgcttcccgttataaaaaaaaccatctgatcaactatatgacatttatttacgatataatatctcaaatgcttagttaaagatatggtatgcgtacatttatcttggaaggtgctaccataatactatttccgtttcacaatgtaagactttctagtattgtccacattcatatagatgctaataaataaataaataaataaataaataaataaattaattaatatatatatatatatatatatatatatatatatatataatgtctagattcattaagatctatatgaatgtgggcaatgctaaaagtcttatattgtgaaacgtttcacaatgagctcattcaaataatagtataaaattaacgattaaaattctaaaattttcgatcatttattcaagatggaattcggttacgctgaacgttaaatattcgtggtcgaaaagggcgcgtacaaatccgagatcggtcacgcggcccagtatccacactgttaggaaacctccggcccacgaaggcccggcccggttacccactaattgggcccatcactaatatggaaagagagcatggcattgccctataaatagagggttggaggagagggttggaggagaggtctcgtacacttgagaatgcaatggatgaatgagaaaggatgtcacacccttatatcttgtgtctctacttgtgtagaattacgagatcctcttggactacttcgtgtagcaggagagttgcgtaatacgttatcagcacgacgttctaccggagaccgagaaggaaggagggtaagatctaatcgcgaaaacgaagtcctctcccacttctcatccatttttgcttttcccggagaaatccgcaacgccgacttgaagtcgccggtgaaaaccgttttgggatttttcggaattgttggccaagccgtgctcatttttcactgcgccacaccggccacggacgtcgcatcgcgctgaaacggcaagccggcgatcgcacgcgaagcctgagccaccgacgcacgaaccgccgtgcaccgacggcaccctgcaaggcgttgtagtacggcatactacgccactgtgccagggaggcgttggcaggagaggaagaaaaacaagaaaaatgaagaagaacaagaaaatgaaaaacgaagaagaggccatcgatggagacgacgtgccgtgctgggtttttcgagccgccgccgtgcgccgaccgcagcacggccacgcagccaggcaggaaggggaatagaaggaaagagagaagaaaaggaaagagaaggaggaaaaggaaagaagaaggaaaaatggaaagaattggtgattttgcacaaatgtccccgtgttttctgaaaatcatgcacatactcctctgcattggaaggtttgcattttaaacactgtattttccagaaaatacacaattaaccctcagcattgggctatttgtttgaatggccttcataatttgcaaatatctccaaaaatcatattttcgcacaaaagggaccacaggactctggacttcgaccctcaactttgcattccaggtaccccctttattactgacttatgtgattatgaaatttatttatcgcatttacgattattgattatttatgatgtttttattacttataattaatatcgttgcggtaaaattgtatagaatagcatagaatatattggaactatttgcgggaattttgtgtaccattatattgcaacacttgtgcattttaccagcgtttaatttgcgcatattgaataatggaagatgactggcatcgcgaattaaaaattcgctaaatctagaatatctctgacatatgcactcaatgtcgaaattatagtggaccttgcagctccattacataattaaacctagcgctttatttactgattcgacgagattgatcaagcacttcaatctctcgttggtgcctccaagctactctaggaatgagtatgctaaatggataagcgtgttggtactcttttgactgcacggaagaagcaacttacaagattatggcgcaaaccctatctctcgtagagcaaggactatgaacaagagtgggtatatttcgactatggttcactgagtagatgacccagagagtacggtaatacggtgcaccgaatttgcaccgaatactgcggaaactcttgatgttctacccgaacgcgacaaaagtcacacgcatgcatcactggtgcccatacgagaagtatgcctaactagttgataatagaattgcgtatcattcggcatagtgttcgtcagaagaacattgtcttcccaaatcacctagcacagttgataataaatttaacacgagcatctagcccggtgcacttacctcaatgaaagaagaggacaagggggagtagaacacatgtcaaggtgaacaatctaggaacatgaaaaggacaatcctaatagcacactcatcatgaattgagggggagaactcctagcctatttgcatggctatgaccgtagaatctcctatgctagataggatcggccgtaagatttatgccagaatagtaaagcattgccataggtgttgagcaagaaattcgctatgaagtaaattgaatccgatgtaccggaatacttcgttgaatcaatatacttcgtcatcacgtgttgcaattttttgaattgaacattgcatcaaagaaatggtccttgcccaagtagagcacacattttctctgcaataaagaattatttttagtataaaatagcatatttaaggcatttactattttatcactcctttctggcacatagttataatgctttcaattttgtgtagcgtccaaacataaaagaaaaatgaattgtggtccgcataaccacaaataacactttaagagaaagaggtatttccagacccatagaactggaaatattatgaccgttgctaacagcaacaactgaatttgtcgacctagaaagtgccatggtcatattacctatggaacaaatgatgcactttatagaagcatctattgttcgtcaaccccgttgaactttctaaaagtgtgatgatttgggctacaccttttagcaacggattttcaaccattccggtcttagaattataagaataaatattacaactcatatggtcatagcacatatatgcataattttcctaaatcatgaagatttgtgtgctagtatgcaccgataggagattaatgcataaacagcgtatagttctagcatccctgaactggattgcgaagaatatatgtggctcccatttggtactgtatggataaatgcgcttccgaagcagcaaacatccagtgtctcttagacaccgtgtctttgccaagactgattcaacaagatcacgtgaactccaatagaactcactaaatcatcttcagaagtccgcgaggacaatgctagcattgcatttgatgattggtgaattggtagcacgaagtaccaaatatccgcataagccgactaagtataagctatgaattgcaatatttactatatcattgttgtaatagccgcagtagaaaaggacatgtagtcttgaaagcagcggactctgaaagaaaactcagatcatcggcatgaacatccatcctgcgactagtgctattgcatctgtttggtttatgtgcatatctcactatcataatgcattgcaaaatgctctctccgaaagtcggaaaccttttacggagatagttatgaagcctaaattccttgacaaataagaattatttccagtcatttagggggagagaatgaacccctagataggaaatgtcaggaaatatgatagtagaaagggactaatgcatgttacaccgcactagtgaatgcagtttgcacaaagaattaaaactgccaaatcactttgtaaatacttttgtgactttgaagagtttgactaagttgcatgaatgcaccggaggagggtgaaataccgaagaaagtaaaggtatccctcatcttgtccagaggcctcgaacaaaaacaattggacaagaaacttcggctcctcacacccctaaagtaaccggagatgtctagtgaaaacagggcaagagggactatcatactcaaagtcacggaaagtaccccaccgaatagaggggagctagctgttggagtgcacactaacgctggtacatgcccatatcaagaagcattaagcaagaagaagaagaagaagaagaagaagaagaagaagaagaagaagcatatgaaaaatgcatctccttgtatatccatggatactcgcataaagaaattggcaatgagacctatcatcggcaatgtctcttttagacaacaaaactcattggcagtcaaccaggagttgaatggaattaatgaactagaagttgaaaagaactcaacctgaatattgataagcattgaagatagaatcaatggatgcatttcaggagcttggatcggacacttgcataatagtacatgaagaagtactaggttccgaaccaacatcaaaagaatagaataaatcataaaagaattgaagaaaagaaacttaatcgttttgaatttgagtttgatttgaaatatttggccgaatccaaatcatgcttacgcttgcaggtaaaggcatgcgacagatggaagtctagtacatcagtccaactgcacttagaaatgttcatggtgcatggcttttgaatagtcaattatcgtcaaaatgggatggaattcccaaacacaagtgtgtcatagcagcacatgaatatttggctaattgaactaaaccgaactaagcatcgttgaactgttcaaagcctcgatatggttttgagagatggttacccgcaacagcaatcgcgatttgaaaactatctcaacccccaccatttatgaaattaaagcagcatatatcacacatatgcaaatgagttatgtgagtagcaaactcactaagcatatgaacccccaagctcttctatgtacatgaattgcatagaagcgatgaactaagtcatgtgaaagtcttgcagattcatccgctaactcattattgacatcttcattgaataggtgtgtccgagaaatcggaataatgagacttagagaaatgcaaaatttagggggagaatttcgccgactcatttcagaatcttgatatagaaaatcaagtacccaaaatcaatctagaaagattgaacaaagaattgggtggattgtactctttttcccttgaataagttttcccagcagtttcttattaaggtttttaacgaggcaattcgtgcgacattgcaagtgtatgctatgtactctttctccaaatttttcccactgggtttttgtggagttttgatgaggcataggcatcacgcagcgagagcccaagggggagtgttaggaaaccgccggcccatgaaggcccggcccggttacccactaattgggcccatcactaatatggaaagtgggcaaggcattgctctataaatagagggttggaggagaggttttgtacacttgagaatgcaatggataaatgagaaaggatgccacaccctcatatcttgtgtctccacttgcgtagaattacgggaccctcttggactacttcatgtagcaggagggttgcgtaatacgttatcagcacgagagaaatactagtatgacttacattgtgaaacggaggaagtagattttataagctcattcaaatagtagtataaaattaacgattaaaattctaaaattttcgatcatttattcaagatggaattcggttacgctgaacgttaaatattcgtggtcggaaagggcgcgtacagttcctagatcggtcgcacggcccagtatccgcactacaaaggacaccagtgatccgaagtgtagcccacgaccacgatccaatgactactttagtgctctctacgctgccgccccaactctcagtgcatcccaccggcgaccacgtggaagtgaggaagagagatgcggcgagccaaggcgaaacaagaggatcttccatctgggtgacgatgcttccgacggcggcgacgaggaggacagctcgaacctgtgcttctacttccccgtgcaccactactccgacagcatcccccttcaccctatactgtacaaggtggatccccccatccctcgacaacgacgacgaccacgccgccgctactctttccaccgggtcgctgggctccttgatcgttggagttggatactgttccgatggttccggaggcgacgagaccatactgttcaacaccctagaccgagggagaaaattgcaattataggactccaaacaatgcgcttcgcagttataggaccccaatcgtcgacttcgctaaaacgacccttgaaacgttggcactttattttacatgacatttggtccttttaatcacttttctcaactaagatacatgtattttgccctaaagtgaccgtattgcccttctgccttctgtatacttgatcgatggtatcttttcatctcatccgactccgccgttgttcctccttccctccccacgccgccgttcctcctttcctcaccacgccgccgttcccttcccatcctcggctcccatggatagagtgtcgccgcccgaagatggagatggacgcccgatcgccatggaaggccaagcagtcgaagacctggcggcctctgccctagccgctcggggtctggtcacggcgcctggtggcctgggcgcgccggctgatgccttggctgtggcagccaatggccatgtatagtagaacgccaacgctagtgctgtagccgctgctagaacattgctgcccaatgctcctcttccagcaatggagttcaaccttcctgttcttcaagtgcaaatgtattggttgcactagatttctgttttttttaccacgatagtagtaggcagtagtaaaacttgatttcacttgtttaggtcccaagtagatcatgtggaaaatatggaaagagttgattggataacatacacatggtcgagacacatgatgatgaaggtcgtattgcacttatgagtcacagatttgtgagcttttaggtgtgatagaggaggacacaacaaatatacctgcacagggctttgattgtcgaatgtatgaacatgggcatgatagtgagcttgggcaaaataatgatggtgctgccattcctactagtgatgaggtaccgggtgagatgctcatttcatatgataagaacaacccatccatggctttaggaacaatgtacccaacaatggaggagttcaagttggcagtgcggcaatttgccattaaggaggagtttgatttaggagtagagaagtcatgtaagatgagatatagggcttattgcaagtccggtgatgaagattgcccttgcacttggaggataaatggcaccaaacaaaaaggccaaagcactgtggaggtaaataaatttattttttctttcattaattctactttttatgtaaattaacatgaatctctttgattttttgttttgcatgtaactgtcgtagtcgatgagcatacatgtgtgtctagcatgaggcagatagctacaactccaactctgaagtgggtagctagcaaggctgtgagtatccttagagatgatccaaatattggtgctaagagattgcaaaacaggttgcagacagatcacaagtgtgaaatttcatatgacactgtatggcggggtaaagaaagagctcttgaagaggtttatggcaaatgggaagagagtgttgagttgttgtttaggtggaaggccgaggtaatgaagcggtgccccgagagtgtcgtttaggtggatggtcaagtatatttccaccgttttttctgtgctcttaaaccatgcattgatggtttcttagaaggttgtaggcctcatttgagcatagatgctacaacacttaatggagggtggaatggtcacttggccgcagctgtagcagttgatggtcacaattggatgtatccactcgcttatggcttcatagcttctgaaacaacagacaactggcttccataagaaatattgcatacaggctacctgaaggcaggatacttccagctataatgcatcagctaaaggcaaatactagaggcttggggcatttgaaaattgtaccatgttctaattggagtgcagaggtgtgggacaagagcagcaacgttgagaggcatattgtcaagttacaccaaaggacctgtacatgtcttgaatggcagcacactggtaagccatgtcaacatgtattggcctatgtaacccgccaacggggagttaaccttgaacagtttgtgcataactactactcggtgaatagattcagggctgcttatggaagagagattgagccgatgacagtcaaaactcaatggccacaagttgacctaccatttttagttggtgcgcctcttgctaaattacctgttggaagacgaaggaaactaagaaggaagggatggatggaaggtggccacaagaaaaatggttccaaagatggtccatttaccaatgagagtgaaggtgagaagggaggtgacaatgatactgctccaacaaatggaaagggaaagaagatgatcagaggacctatgacttgccaaaaatgcggagaaaaaggccacaggcaagctagtgccaagtgcccactcaataggacagcaaaaaagaggtaaggactgattttatttatcaaaaaacttaaatgaaaatgccaatattaatttatttgattacttgtaggaagcgtaggcaacctaggaagaatgttacaaaagctgtggcagcagaacctaacactccacggaagccgactagagaagaaatcctacgggatagtcagaaatattaacatatttactgtatattaattttttccaaacatctaattgtcatatcctatttatgtgtagcaagcttgcgatgttactaggagaaggtatatcgtcacaaaccaacaccactagtcccgtgaggatacctaccgcggcggcaccaaaaaagatgactccaaagagaaagctatacattggttgaataattttagttgtgatgagatgtaaactcatactttatttcatatgacttagatttcgtttggaactaaattatggtcttctgagatgaacttgtttatgctagaatctcggttttatgagacaagcttgtttgtgcaaaattcatggttttatctattacttgtaattgagatctcgttgtaattgcgtatggatcatctttgatcatctttcatttattcattgggttagtgttgcaatttttgtgcatgattgaccatgtacagtacaattttggggcatatgcagctggcagctgcagcaagttcaagagcggctagcagcttaccagccatcccaggcgagccagtgctctagccatggacaggcggcggccggccagccatcccagtcccaggctgcggctagccagccagacgaccggctagcagcgtgggagcacgccaattgaagctgagggaaatacggtcacatcaaggtgaaatacatgtattttagtagggaaaagtgattaaaaggaccaaatgtcatgtaaaacaaagtgccaacattttaagggtcgttttagcgaagtcgtcaattggggtcctgtaactacgaagcttattgtttggagtcctataattgcaattttctcagaccgaggagctcatccgcgggctgacacactatgtcccattccgtccctgatttgaataggcaacatttaggctgtgtttagttcagcgcaaagtttagattttggttaaaattggagatgatgtgactgaaaagttgtgtgtgtatgacaggttaatgtgatggaaaagaactgaagtttggatccaaactttatatctaaacacagccttagtactctacaaacttgggaatcatccctttttctctgcgaagagagcagagcacagacatgtatttgaaagtaatctatgaaatttgggaaatgatcgatcacagacgcacaagcacaacacaagtatcatgccgccaaaacttggctgcatcacccaggatttagcagccacaaacttttgcaatacagatcacgagccacacagacatcacacaagaccacaacctggccacatcctgaaacagaactgagcaagatcagataaacaacaccagcagcggttcaagtcacctataaagatcaacagcagttcaagtaatggagaggtcaataattagcggtggcgccatggaacttccttgtttcagcgatgacgtcggtcatcaataatttgggcgacccgctgttgtatgatgtcgtgtttttttttttttggaacgggatgtgcaaaatgcagagggatgtaacacaggtcaccgggccggacaaattgtgtgggtcagacctaattataacatgcatgcacgtagatgaactgcacctctaaggctcttaacaccttccaatagtatctcgtctgaccttatagctagggatcggtgtaggccacctgtatagccaaagaaatgggttgaatgtaaaggagaacaaaattttatcaacaacaaacaaaatactcctacgtctacaggagtaaagaaaaaggaagtcacctgttatagttaaactcttctatcaaaccagcagatatagttttctctatagtgcttccatcattttctcgctttataacaatctagtagaaatttccataattgtgaaaacaagtttactgattattaacaagcacaacatatgacagataattctaacatgtagaacaatatgacatcatgagctacctcaactgttatccttttcgctgaaaaatcaccattggtttcttggtcatactcttccatagtttccttgcatttatccatcaacattgcaccgaactggtgccattacaaatatggttataaacaaaagcatgattctaatcaaaagttcacaacatatataaacaaaaaaagcagtagctgactctggaaattattaaaacaaattgtcacctcaggggcagtagagaggaatttcccaccacatttcatgagaatatcaccctgacatattccagcaatatcagcgggtgatccctcagccacctaattgtcatttttttattcagttcatctcgtatatacattgagcagagaaacattaagatggcaactatagctaaaagaataacactgctataaacattctgaagaccataaaatttagataatgttaaaagtaataattaggagaaaaagttgacgaattagcagcatgtattaaaaaatgcacttgaatataagctagaatggatatgtaaagttgtatacagttactacattgaaaaaaatagcagacacaacatgttaagaagcttgttaaaaatctaagtttttggtacccaaagtataaacaaatgttatagagttctcatccaaatgttaatgagcctctaaacataatttacaaggaatgacaatatataaattttaaatacctattctggaagtccacaaatctagggcaaagtatcgcaaaaataaacataggatagaggaggttcacacatttgaaatatataggccattatcaacatccgagaattttctgtatatgtgctctagatgactaagcggaaccatttgaatagaggtgaaccagaatccaatccaaggtcgaattattcttctgtaaaaagtaaagaagaatattactataatgcagcagtaaacataaactaggcaattgtataataatgtatagaaattaacaatcaagtttttgaccttcacaggtaataaagtaaaaataatatcaggataaaatattcatcaccaatcaccataaggactggacctacccaaatatctggtgatgttccaagcatttgaaaacaattgccatcgaaagaaatggcgtttggttctcttcaaagaagttaatacctacaacatggccattataatttacaaggggtcccccggtgccagcctagaaaaaaggaatcacaataaattgtcaagatatgtacacgaatagcaagaggtaaaaaagggaaaagtccatgtaaaatgcatcaaagaacatgcaaaaacacgcagagtagaggaggtcaacaaaagaaacattttaaacaaaaatatggattgcacctccacgaaatattaagtgttcacacaatttgctcagttaataaagttgtgttaccctggccctaattatcaactaatctcagtagctgagtttgcttcagtagatcaattcagtattaattcttagtgtccaaagaaaaacaaaacaagctttgacaaagcaacaacaaaattatcctgtctgaatggagaataggtattcaatttgaacaagaggaaaagaacagtacagaaactagatcacactgttggatgatgctcacatggaaaaacactggtgcatccggcaagagtgagattctctagcaagttaactagagaatagtgaattctagctacctttgaaaaaagaaaaacattgcatacagaaacctttgacaaaatgatattcatctatggaacaatctagctataggatgtttggttttttaaaaaaaagatgtcaaaggatccactcaatcctactctctacttaacgagttgtttggtcttggaaatgccatgggtcaatcaccaaacatgcctcaaaaccagatgtgaaaaacaatgaattggtgggttgtcccaccaaaatcatgggatcatcctatgatcaagcaatctcatccaccagcacagaaatgatttgattcctcaaaacaaacatcacactagtaactgctggtaaaatgatcttaagagacacaggtcaatcatgcttagaaactattcacacagattgatgtgatggacgatgcttcaagttccaagtgtttcaactacttaaaagaagacgataattaaacattcacatagaccaacctgctctatgatggacacatcagcaaaaatgaaacctgaattgttcagtactgaaagacacagagaagcatataacatcatctcagtattgacagaatctataaattgagaacaaaaactatttcacagaataaaaccacagaaacagctgacaatttctgtttggctcttctatatgtgattaaattagttcaggtagtttttggatgccctatgcatattctgatgttcattcaagtttgcatacatgagttgtgtgaagattgtgtgtgctttagtagtaaaatctgaacagagaaggaattaaaagagtctcagttaatttgaatcagtagtttgcataaccaactaatgaattaagcaaggaaaaaaaggcatgtatcatatcggcaacaaagagcaaattgtgttcagatattatttaccattgttatctcgcaacttgatactaacagttctgaacactcaaatatgctggctctgttgcttatttctccccttgagcacatcagaagaccaccttcataagaacggccaagggctaaaacatctcccttgtcgataatatatttaaggataacagcctcttgaagcttgaaattggatgtgacttcaactaaggctatgttatgatggaaatctaccatggaaatctggcaaatagatatatccccactaggtagaaagacctccacctaagtaagtaataaaaaatcaggacaaaaataaattgtgggtggtaacatatttcaacaaaaaaggaagagtaaatttcataaacgccatgtctggggcccattggtaacaagaaaatagtgcaattttgtgatttttatcactaaaccacatgttttgtggcggttgtttcacaaaacccagggtccatcctagtcagctgttgcaacatattaggcccacctgcaggtgccacctcaatagccagcctggcaatctctggaaaggaaccacctggctggccaccactccacacctcccaccgcagtgccatttgctatcaacgacgattgctgtggctcagccttgccgccgcagtgttgtactgcctgttggttgacaacttcttcccctaaaccaccagcacaagctcaagctctgcttgtttgctttgttgatgatctttcctgtccgatgatggttaatgcttttcaagactcttgggagtgtggactcggggatgttaagaacaatgcctctgccaggccggaggactgcataattcaattggttttaacatctgttattccaaaggaaaatggtagtccagtttgagatggttcaattgcttttgctactgcttgattacacggtaaggatatgcatggttcatggcaggaggttgcaacgattgagctgggttctgtgattttgtgaaagactgcctcaaaatatgtggtggttatatgttaccagtgcccccaaacctggtattttgtgaaatttacaccccctccccacaaaaaaaatagaaaaaaagaaacttattacttaccctgacatcatctccgcatggaggtctaacaagtgctgctgaggttaatattgtaccaatgctggtactatcgttccaccgtatcacaaatcctgagcaaacccgtatcctttttcgacctgaattacataacaaagttagtggaggtctaagatgtatgttatgaagaggtttgtttctagaaacaaaaatacctgcaaaggaagataaactgacaattgactgtgaaacacccaaagcaacctttcgagcaacttggcttttagcactaccatcatcaatatcacaaaatgtatcctccagagtgagaattggaccctcagcctgaactccaactagaataaaacattattaccgttagttactcagacagaattagaatatcaatagctttacttgcatataattttcatgcacaaattgcattccagtagaaacatgagttcaattgtgcctccctctatacataaaaatatgcatatgcttccatggtacttgaaatcatgaaaagcttcaaaggcactgcaagtaatacatacagaaatgatcttccatgtctagcatataagcaagaaaatcctagcaatatattcatcgataagctgaaaatcctgaattagagaacatatagaacaataagaggagcaagctggttaatctgtctagccgatactccattatatgaagagtaaattaatttgacaaggcacattcatatgccccggtatttgtgcaagcaatgatttccctataggctttgttcatcaaaatccaaatttcttgggcattttatcacagtttttagtgatgactatatatctggagttcgacgacaaatcctaataacatttaaaagtagagcaggataggcagagatgtcatacatacttcgttcagcgattcggccccttctctctgcctcgacagcaagcatacggcgaatgtttatggccagctgagccctggcctccgccccagcggcggtggcggcgggctcctctgcagtggcgggggtggcggggggagggcgcggtctggtctccggctcggatgaggcgccctcctcctcctcctcctcctgctgcagcctcgtctcacgggcgacgacgcgccggcgcttcccccgccccggctcctcctcggcatgcgcctggggaggcggcgttgcttctcccgtgcgcagcgtcatctggggaggacgcggattctctggcgacgatttggaggcggcgaccggcggcggcgagcgtgagcacgcgttgttcggccggcgagagcagaaccgcggggtggcgatcggaattctggtcggaggacaggtcggtgcgtttgggctagtcgtaggcgtttcttttttttttctttttcttttttttttgacctttaaaccgtgtgctcagcgatatcacgagccacccagtcgcttacaaactctgggaggggtccaaccaatgaaccaaacagcagattgagctaaattatgaccacacacattacaagatcttggaataaaagaaatatcagccttgacaaactctaagggcctgtttatattataggcaaaataaattttatcaaattttagtaaaattgtcaaatatgtgcatctatttagtttttaaacaaactctggtaaatacataaaaaattctgccaaaacttagcaatattgccaaattgacaaaattttggtattgccaaaatttggtaaggttcattttagctacaatctgaacatgtcctaattggatgaggagctttattactcggaaaataggattgctcgcagctggctcatagtcctgcgtttttagcgccgctactagcattgccgaatcagattcgattccaatatcaactattcactgcactacaagggctcgcagtgcagcattcgtccagctccagcaagtatcaaggttcaccttaccgtttttggcgtggttaccgcacccccgcggttaccgcgaaaaccgcgtggtaaccacgagacaaaccataatttcaaaaactgaaatagttaccgtctatggtaaccgtgataaccgcatggttaccacgcggttttgtaaaccctagcaagtatacagcatccactatgatcacgtaccacaaaaccccatcctccatctttggttgcttccaggtaggaaccatcaaagttgagcttcagatttccctccagagctggtgaccagcttttgacagcatgactgccagtgttgctcttctctggccatagaaaataacaagggcattctgtttatttgatttgattttgaagtgattaattaagaaaagttgaaagaggcaagcgctgggctacatgcattggctattattgatttatggtgtgcatgcattagcaagtattagtatcattctacagcacaaggctgcaagtatgcagtctctattgtcttcttgctttgcccgctgtgtttttttagataatggattaaaccagcttctacactcaaagaatgtacacagcctgctttgcctgctgtgttgagggtacacttaactgaactgaggggattgataaacataggattactatagataaaatgatctttggaaccgagtgcctaggaaccccattctcaatgtagctccacccctgggggttctagcttgttcacccacatttatcttatttcggttatcccaccagttccagaggagcaagattatcttcaatttaatctgaccaccagtttcttttttctagttgaatccgtacaattcacaacaatattattactattcgggtgaaactgcttctacgttaatctatgctccctctatccgtgaatataagggattttactatataataaaaggatattatgtgattggacaaaaagtgatgagtgaaagaataaagtggtaataaaagttagggttaattagatccatgccattacaaatatgtcaatttagaaaaataccactacatttcgtctattcgtagtcgtgtcactaaaattttacaaaattgaaaccgtgccactgccgtcacgttttccatccatctcttcttttttgttcccatttgcttcttcctctttccttttcttcctttcactttctcccctctcatgcctagtgaagcccaggcctccactggagctcctcctcctcctccgacctctagcctcccttcaggcgctcctgcgcccgcccactcgctgaggacgagcagaggatgtgatgcgaggaggacaagcaagcaacggcggcgcgaggatggcaagtggactacggcgatgacgcgagcaggacggatgggctcccaccagcggcttgaggatggagagtggacggcagtggcggcgacgcatggaggacgaccggacgacgccaacgacgcgagaaggaccagcgaacactggacgacatgagggtgacgttgttaggtctcgaatctggccgacgatggagcttgagcaggtgacggaactctagagggatggcctcgacagatccatgcgggaaggctcgggaatagctacttcggcagcccacgaaggaactctggcgtagcgacctactccgatgggcgggcgtttgctcgtccgcgtcctcctcggtggacaggcgggcgagcaaaggagcgcttgaaggacgttgacttgctcggctggagtagtagttggtggcggctaggctttggagtgatactcgtaaagcggatgattagggtattggggtacgttggaacgaggatctatgtaatacgatatcaagcaaatagaagacagagattatactggttcaggctccttatcaggtaatagccctactccagtttatataggattgatgatggaaaaccacatattacaatagaagtagacgaaatcaatgataccgataagatcgtagtcgtggtattcgacgagatctcccggcgacttgacttcgtgtactccagcttcataagctatggtgggtgtgttggcgatgagattcgatgccttccacccctccctaggggtccttgttataccgtggatcatcttgatctccaagtaagactcggagacatcggatcttgtataatataacaaaaactctatcccctccgagcaggactttggaaatcgcttgattcgtagagatattttccataatttgtaacagattcctacggcgtacacgggaacaatctgtgtacgtgaaggtatgccatatccgtatatttcataagtcgtaggataggaggttgttaacaccaaaattttgtaaagcccgaagtcaccatagacctggagtcagtgtcagcttcagagtcctaggatcggccgatgagagttatcaagtcgccagttgtcgaattcttactatattcggttaagaaaattaatctattaaaggaaacttatctagaagtgaccgagttcaaggaggatacagcatgacaagttatctattaattaggaatagtttgttagtttccttttatctttgggaaagtgtgtttagtgtccaataagaactttatgttttccttttatctttaggaaagtttctttcttgttaaggactagtatctacccatgggtataaatatgtacacccagggtcattgtaagaatctctcgatcaatacaactactcggcgcatcgccaccctctttaccgtggtttttacttaccatccggtggaatttggcacctgatgcggggctgcatcggttcagttcgttctccggcgaaggggtaagtcctacgttccgccgaccctggtgaatctgtcggctgtattggtgttgttcaaggctgcatcgcttcgatcttttggatcactctagtttggttgatatatttgcctacctgatatcttagtgctatctctaattgcattgtgtttagagacgcatcggtttagttggaactgtcttggttaggtctgatcttctatcttagctgatatatttctacaatcacaatgctgttataaatagatttgttatatccatcacattagacagatctatcggctcatcaagtattagattaccacatataatgtcgtgctgcatcggttaggtccgacctactagattattgttgataatataaatcttgttaagccgataggttcatgctaatgttttatcaggttgctagccgataagttatctggacattgcatcggcttataaggattgcatatacatataagttggatttagccgatcgcaacaaaggtttcattgatctatctaatcttgtggattttatgacatcagacctccaaccgatgtatgctttaatcttcggatcgatgcttatctatcatatcattattagccaattggtttctactggattatattgttatattttattatatcagccgattgccttcatatcatcatctacattgaacatatagccgatagctcaaaaccctatcgacatcggctgatatcggcatcggctgggattactccatcggcttgtcagccgatcggctgtttgatctgttgtttacatattttgtcagttgcaggatgaaactgactggcacactcgcatcccaccaacctttggacctgcactggagctaaacagatatatgccagtgtgtgtttttcgcatcaacagatatatgccttatctgtaaccatgacagcggggggaatgagacgaccgtcgacgcggtgcagctcgggctcgggctccatggctatcgccccactcgtgctcgtgcggagcggatacgcgccctactcgccgatgcccttgccgaggagctcccctcccgcatcgccccttccccatccgccgtcatgccttcctcctcctcaaaggcaaactttggtggtgttctttttcttttaaagatgaagatgaaaatgaagattaagttttttacgcaaaacgaggtggtattaacgtatgattgattgagttttaattattacaaacttgaaaaatagattaatatgatattttagagcaactttcgtatacaaagttttcgcacgaaacgtaccgcttagcagtttaaaaagcgtgccacaaaaattttaatcttcatccaattcttgttggagaaaaaaaggaaccaaagccgttggtttcatcgggtctgtccgttgttcatcaaagcgctgcatggcttggtccacttcaagaactaattaacaactaattaactcatcataattagctctgctaaatcgcttaacgaccgattgattgatagtactccctctctcccaaattatctcctatatatttttttacacggtcttcaataatatattttgatcggtattttattttattctgatcccaataaatatgaaattagcatcacataaaagtatattaaaaatatgaatacagtgatataacatgcataatgttttgtctagatatagtaataattatcagtcaaaagttaccgagtttaattttccttaaagttaccgagtttaattttccttaaaagagggagtatagctagtcctatcttactataaagttataaagctatagcccactaattctaaaactcaatatgcagacatgccacctcatcatccattagcaataattaaatacaaaacttatgcaagtatacaacatcatttataattcattgaattctacaaatcaacatccaatcatcttccttcacattatttttcacaatatttaacacacacacatatatatccatcatttttgtaatatttaacatatatttatccatataatcaaagtgcgtgatatcatatttcatctataatcttatactgagcctactaaatttatctctcttaatattaatatagtttgacaaattagttttatttgttattaagaactaatataattttttacttttagctcgattattaatttttttaaaagtcacatagtaatttctacaacaaagcgcggagaatcacgtagtgaactaaatgtgccagtttgttctttaattattgacataaacaaatagctcttcttgtacaataaaatgtactgctaattattactacctatattttgtaagctaatcgatctcttgaacaccggtgacataattttgaatgtctcattttttataattaccctttctaactaactgttacgaaaatttaaaaccataagacaatgttttgacgatatatctaccaacatcatcttcacttcacagttcaaattatatatatatatatatatatatatatatatatatatattttacatctatcaataatctagggattctaaatttttttaatatttgattagacaagtgttgggacattatctattttgcagatcaatccatgttttcaggatagataatggttagctataggaagggtaattacagaaaatgtaaaaaaataaagacaatgcggatgaaaacagataaacaaaagttgatgacgtatagatgcaacggatagaccagatgaagccaacggtaaaatttgcctttagcctcaaaggcagttaggcagacgatgcagacccaccccgacctcccaagcgcacgcctccgatcctctcgccttagacctagccgccgccgccgccgccgcctccgccggaaagtgagccctccccccgtcgcgcacacacaccccctcccgattccggtgggcgcgcgcgggggagacaaccaaggtatacttgggctggcctcctccccccctcccgatcgctcccttcgggaaggtttggggtgggggaggccgacgccgtcatccgttccgggcgttggttgccgctggcgattcgccggcgggcggcgttgatcgggccccgggcgggggctccgggcgccttcgctgtgggggttttaggatcggaataccgtggaattgtcgtggattggttgctcgtggatggtgtgtgtgtgtgtgtgtggggtgggggggggggggttagggggatcttgcggtggcgctctgctcgtcggatctctcgacggtgttgggtttggtttgtggggcgctttggtggtgggtagacggtagcttggtttggttcgcgggttgttgttggatcttgtgcttgctgcctgatgtgcgtttgcgtgcctacatccttggaggggtggttgcgatagggcgatttcgctgtacggatgcttttgctgcgcaatcggattggtgattaggggtttggaactccgtgtgatgcttctgctgatgtgcatgcatgcggatagcatgtttatgttgtttttgcggtaggattgcgtgacaaatgtggcatgtattttcttcttacatgattgtcctttttcatcttgtcttcgcgtgctacacttccggcccagatgtaatataggtgcatgtttgcgcgcgctttagtatgaaacagcttaccaaatgtagcacgaagctttttgttactctcgaatgcttccgttacctgtgctgtaactgttgcatatgtttgtgttagtgctcatttaagcgtgttatgaactagaaatgcttagtcaattccaacaaaaagttcttcttagatgattattctgccattgtgctgctttagctgtcactgagtttggcatttccactcttgcagataactctacccaggctgagttgtggctggtattggcgatataagcttgttagctgttttctcttgtgtctttggtcttcatctttgattacgcgtcattgaaaagactgtacatgagaaaactcttttgttgaaacatttctcttgtaatatgaatgtattgagtttgtgactatccttctcctgtgctagaatcatatatttcagcttcaaagctcttgtggtacttttcaagtttcctgttgaaccgaatacctagtgcattaactctaagcttgtgacaaacattcatgcaaattcgtggatattaacattggatacttggtctactggaaaattggagctccttattcatgtcatcaatggagagcctagcacagttagagctgttatgtgaaaagctttacaattctagagactccgctgagcgagcacatgcagaaagcaccctcaagtgcttctcggagaacagtgactacatttcacagtgccaatatatattggacaatgcctcaacaccatatgccctgatgctggccagttcaagcttgttgaaccaagtcaacgaccgcagtctttcattgcaattgcgtcttgatatctgtaatgttccttaccaaaaatttatcatgaaatcagttgttcacctgtttttgcttttctattgcatctgcatggcatgttttcatttacgtctctaccaatttattcagttatgattatttctgcattgcaagttaccacagaaagcagtaagcactcgtttgtactgctatttagtataagtggccatatttaaatctttgttgttccttccttgactcaacttatttctgttgcctttgatgtcttatgcttatttaatatggctcgagttgaacaaacaaatatttattctttgcattctatccttgaattcatttatgcctctgcagcatgttagaatggccaaatatttatttccatttacccactgttgttttatgcatcggtaatgtagataaattgcaaaaatacatgtctataaacaatgcttaaatctattttgtgtacttttgtgcccttgtctactgctaattttaaaccaatatattgtgatctgtttgaagtgaattatgtcataaactatcttgctatgaggggacctaaactgcagacgtttgtgattaaatccctaattcagcttgtctgtcgaattacaaaatttggatggttcgatgatgataaattcagagatattgtcaaggaggcagctgatttcttatctcttgtaagtttgttgtctgttttgttggcatttagttgagagctttttaaccgttgataacatatttaaggactatgtaccttcgatttgagtggagctatacaccttggtacataaatccttggcaatttctatgaccaatgcccgttctttagaactaagtaatatgaaaaaggataaccggcctaccagataaatctacataagaacctgatttctattaaagaatccatatgaggaacagttataggttttattccatgctctattgcgagttaattgatgcatactaaagttgctgcttatgcttttcatttcaggcatcccaggatcattatttcataggattgaagatactatatcatcttgtaggagaaatgaaccaggtgccacctagaaacttctctattattataattgttcaataactattgattctaatcaataagataagggtacccataagataatgcaatttggcaatacgtagattaatttaaaagttgaaaaaaaaatatttcaacagtattttttttgtgtttagaactgcacaacgtgcatggtgttgttggcacttataaaacatcggatgaaacacagaaggtcaaacgtacatgaaacactacatatgcactaacttgtgcatgaatcaattaatatcataagtaaaagttgttctttattttcctttgcgacacttaacaaagagttataaacatgcagatagacatatataggcatagtattattgaaaaaatattaatggttaatccaaccaatgttaacaagacaaagttaaacattgacactgatggttactgtattaatttccatttattttaaagagtattggcggcaatatgatactccttccttccctaaatgtttgacgccgttgactttt

SEQ ID NO: 5601 - DNA, 53718 bp, Oryza sativa
gaagggcttcgcggcggacaaggcggagggcgcgcggcgcgcgctcgcgggatccgcggcggcgaggaagggcgagacggacgagtccgcgtggcagcacggggaggacgtgcggcggcgcgccgcggagaaggccgaggaggcgcggcggcggagcgagcctcagccgtcgtcggaggagaagtagccgtcgcctcggctcgccgccatttctctctgttcttgaaagcttcttcctactcggctcacctgaccggagtccgggacgtgtcgtgctcgtgcgcagggggaggtcggcgacggagaacatctacgggtcggcggcgagcgcggcggaggcgttcaggcagaagatgacgatgccggaggacgtggtggagcagaagcgcgccgaggctgccgccggcgggaacaagggaacagccgccgcgacggcgacggcgacgaacaccggcggggaggcggcggcggaggaggtgatgatgcgggtgaaggcggcggaccagatgacggggcaggcgttcaacgacgtgggcaagatgggggaggagggcaccggcatggcggccggagatggtgggcgccgccgctgagatcgccggagccgaccgcgcggcgccacgccacggtgtttttgctcgtcgcgttttgtactaatctcagtataatctgtaatgtaaatatgtaatgcggcagttaaaagtaataaaatatcccctaatcacttgtccaaagcagagaacagtttgctatcccctcactctccctccttacggacggtctagtatcttaattaatctctcgtctaattcacaatgcacgaaactatttaaaacccaaaacatgaatctatttaaaactcaaaaacatatgacgaatctatttaaagcctaaaacccaaaacatatgaataacagatgaaaaataacatatgaagtacgaaaatacttgtcttttgtttttaatttttatcattcgtcttatttaaaaaattataaaaaatattatagaattattatttattttgtttgtgacttactatattattaaatttctaattttttaaataagacgaatggtaaaacgtttacaagaaaaatcgaaatcgaccactatttttttttggacggaagtagtaacaattatcggaaaaccactcacattcatttcttcgttatgcatgctaggaagtccaccatagttcatgatagccatgtaaatgttatacagcacacaagatgtcagaatcaatcagccaatcgagtttgaaaagagggactgtgcaaatgcaacactgcaaagaattggagaggtgcatcaagattcaaggcacatctgcacacagcctacacaaggcctcaattcagctacacaaaaacatcctgaaatttgatcgatgttacttacacctgatcggcggccaagcaatttatttacccattcatcggtgacaggacctgcgttaattttgtcaacagtgaaagaaacatcatctccacgattatgtaccacaatgtcacgtatcaacatatccgttgaagaaaaaaagactaaccaaaagcacgaagcagttttgctacgatgtaggagtactattattatcctcttgcgaacaaacacaaacctcccagcagcagaggtgtaattcagttttgacaaaacggtgtgcaggcaaacacatactacaatgcaaggaaaggaaccgtatgcaacactaaaactgctatcaagaaacaatcggcagatctcatttctgaacttctctttagcttcactatttcctcatgagctccaaaagtttctagtttgtgaagatataagctccaagatgtaaaaatgccactgccataccttcccctgaaagtatcaaaatatgctcatacaactcaggattttcattaatgaatgatgaatcttctcagccgttctgtacatgtactgattaattctgttagagattagagaagcttaaaaaatgcattttccacaagtcaaacttgccaaaggctaagcactgaagtatgaagttgtcaaaatgcttaggctcacctgcacagaaatatgttgggttctgaaatcaaatacacatgaaacatcaggtttctgattatttttgcttcaaaaatcacaaattgggtgtactaaaagaacaactaaagaatggcgaagtggcaaatcctagagcaacatctactaaaggatggcaaattcaattagtcctgaacagtgccaaatccaatagtttccatttagtgtatctgcaatactgaagagtactaagaataatagaaagttctgatcttaagtttagctccaattcactaaattaagcttatgggaggaataagaatattaatttgacttcaggttggtaaaaagtatgatgaataagtgattacttgacctctgatcttagtgagagcaacccaaaatatcagtcaaagagtaatcaagagaacatgaaacgaaaatctttcttctcaaatgtcatgtcatgttgatagaaccatacaacaaggcatgtaactagtcgatccctgagactaccttaagagcctaaggtcttgaacttgtaacaacatttcctaatgataaatacatatgactgctctacgaagtgaccaacaaaaataccagtcactgaaaaaaaatgccaatcatttcctctttcttgtttcacatatgtaaaatggcaatagcagattaatcagaacatcaccaagttggttgaagagccaacgacgaacggctccatcagcaaccgagtcaagaagtagaatgtgacacccagcaagatggagatcgggagtgcaggcaatgcatgcttgcatattgacagcaagataagggtgcagccaagcccagcaatgatggcaaggtagcacgcatacaccgtcatcagatcatacatcgcagccctccccacaagcacgctgtagaagataaaatcaccaagtcccagcttgatgcccctggtggactcgaacatctcgaactccataccagagtctgaagaagagttttctctgtgctcctcattaggggctgcattgttggcagatgccgctgataccaatggcactgtctctccttcctcgtgctgctcaatctgaatcacagcatgctgtgaactcccaccctgattcgatgaatgccctgataccgataccgccatcggcgcctccctttcgaggttcctctcacgaatgcttgatcggctaccaccaacatccctcatttccaccacggcgcggctcgaatcatcctcctgctctactctgtcatactgatttccacccgatcgaccgggatcggccaccggctgcatctcaactgatcccatggctgaagcgtaggaggaagaaccggaggccggcccaaccgtcggtctcgactcgtagacgagcgcagggagctcatcgtccctggatgaggcgagctccacaagcatcctgagaggaccccgcggcgcgagcacggcgacgaggtcatacagggcgagcgcgatgagcatgacccaggtggtccactcgggcagcctggagagccaggcggcgacgatgacggcgagggcgaccatgtagccctggcgcacgacgatggggaccgcggaggcgaagacggagaggacgccgacggcggaggcgttgaagaggagcacgagcgcggtggcggcgtcgagcggggcgccgaggcggcggaggacggcggcggcgatggcgccgcccatggagaagaggacgaagaaggcggagaagcgcatgtagttcttgaggaagcccgtgcagcggtagtagtagagcgcgacgaggacgaaggtgacgacggcgacgagggcgacgaagacggcggcgtcgaggagcgcgccgacgagcttctgccccggggtgtcggtggggctctcgaggtagacgagcgtcgcggcggtgaccggcggcggcggctgcgcggcggccgcggcggaccccggagcggagggcggcgcgaggagggagatgaggagcacgaccagcgccatgcagatggagaccggcgacatcaccgcgagcacctccgcgccgaggccgtcgaggacggtcgccgccgtggaggtggtcgcccccggcgccggcgccggatccggcgagccggcggcgggatccatgcggcggcggcggcggaggaggaggagacgtggggatttggggatttctctgtctcgtctcggagtcgggagtccgaccggggtcagagttctcggggtattttcgggcggctcacgcgtttgtgtaaattcgcgcgaaatttctcaaatttacgggcattttctttcttatggaactgactgctcgattttttttttaatctattgcagggaatttgtttgcacgctgttttttatttttgtccttttcctttaatttgctactacttggctgtgaacatctcagaggcgatgtaacaaattcgttgaatttcaaatgaaattcagcgcaaaccgatctgcttaggagagcttcagatttcggatgacaaaattcgaacaaatttgtgaaccctgcttaactaatacagttaataaaagtgtagtatactaacgacttgtatgtgtagcattttccccagattcctgttgagattgaactttgcacggcgttgaaataagagcagcggtttcacaacatagctaaaaaaagatcatcaaatcaggaagatgctttacttatgagctgattttattattttattggcgacagcaagaacagcactgcaaattccagacatgtatttgctcagtgtcttattggagaacaattaaagcataatcacaattcacaaccttcggtctaattaagaagaccaaactactcaatggtacacacttggcaccaatgccgatacgacataagcaaactggtaaacccatccactctgtgagtaatatcctaagatttgttgcgactggccttctcctcaataccagactgcgagaatcgcttcctgaggacctccaagacctgttccatcctcacgcccttgaccctaagcagcaccatcgcgtggtatagcaaatcacccatctcactgattgtgcggctctcgtcctcgttctcaagcagtgtttggtttagctctccagcttcttcgctggaaaatatgaaaaaccaaatcagtatgtatgtcaaatatatgggcattcacattgagagagggatagggaaaaggcgaaagaacgacggcaatataatacaaggaacacaatatgtatgtcaattgctttcacaacgcacatcgatcatcatattgtacatgctaacagataaactctgaaagagaggccaaatgattaacaacatatggtgcatgagacgcattaatggctataagagtatgttcttttgctatatgatgattaagaggattcctttaccttgatcaaatgctgaatacttcaaacaggttgacgatgatgaattttattatctagtcgagcccggaaccgtatcctctgacattacacactaatgtcacggtgtgacattcttgaatccagaccatccaaactaaatcaatggctatagattaattggcatacaagtaatcaaattaattagcagattatgtagttaaacattaccatacttaatgagtaggaaatttttttagcactaaagtagtcccttcatgttcagtaacatgagcccaccaacttgtagattatgagaattgtctttttctgatggaagatgtggcaacacaaagaaaattgatgcacgagatttattccttaacaggttcatatgctaatcattgcgtctaacaggtaagagcaagtttaatagtatagccaactactagctccaattcatctatagccaatctaataactcatttatacaatagttacatactacactattaatatttggtcccgcctgtcatacacacactgcatcttggaatccgtgatatagctggctacaaatctgtagcccactacccttctctctcctcatttatcttcttgaaatatgtttgcagctggcttatagcctgctattgtacctgctctaagttaaacctaattatcgacatgtgcttgttacttgcctgaatttgcctgaatttgtttaactacataatctactaattagtttgattaattgcatgccaaaaaatctatgacctttgatttagaatggatggtgtggatcaaaggaatgtcacacggtgacattagtgtgtaatgttagaggatacggttccgtcgagcccacccccaagatgccttttaaacctttgttgatccatattaacgaaatcttaaaatggtatcccctgaatggtgttcaagcctaaggctatatcaaaagttcaaaactgaggtattaggatctaattttatatccaacagtcataccctaagaacaagttaagtgtattaggctcccatttgaccatttccaaatgctgatgaaaaagtccgagaaaaaatgttgcaaccagtaataattttatcaacttcagttgtttgcaagattatgtttttttttttcttgacaggtgaatagggagaatatacaagggaccagaagaatatgcaagacctcaccaagggcagaaaaggaagaaatctaacccagcaagttgtgtcctaaaattatttcccgttcgatatgatgtagaatgacaccttccctaaacaggatttcattgcaataacattttgaatggttctattttcatgttgtgctattgtaaaaaggtagattcttctagtagaccaccataaaaatgcttgtcaatttgtcactgtagcgcatggtatcaaaacttttgctccagaactaacagtgtcttcttcaacatctgtgaccaagtaaagatcacatgtgtactatgttcaccatagaaactacttccagtatgttttatgttgataacttgaaagtatatcacagaaactgacatggttttatctcaaaagacaagaagctaaaaacgaggttaagaccagagggagtacacaatattaatagtatcacataatgtcctgcaagctcataatgtttaacaaaaaccatggataaagaataactgtgaactgtcttggatattgaacaagcatacataacagcacatcaattaactaaccaatcggcatacccaatagtgatgactgaactagaatatgagaattaatgacagggaataatgcaatgttttgtcctgagccatgcataatatgcttatttatttaatgtttggaccattagttttatagacgaattttgaaatataacatcacataccttatttttgagcaaagcagccggttatcaagtattagtttttttgtccatgatggcttgccacttccttcagtaactatctcttccttccgtctactaattgtatcttcaagtgagtacagagttgagacaacctgcctatcttgattgggctgtgaaggagtctcatagttaaattatatgtaaaggttcatttacagaaagggcaacccaagaacagataccttcgaaccttgtagagcatcatagactgaagtatagtaacaagtctctgcccctgtatggcaagtaggcccatctggcttcccaaggtatattatctatgtttcaggaaaaaaaaacaaacaacccaattagcagttagtatccactgaagcaaaagtaagcatcgtgacaagcaaggcttacagaatcacggtcacagtccaagaaaatgtcatgcacattgatgaaattcattgatgtctccccttttgtccacaatgaagaccgtgaacggctatagaatgtagctttcctggttgatatagttgttgcaagggcttctttgttggcaaaaccctgcatgagaatggctccagtatccacattttgggcaatagcaacagccaagcctttactgtcccacttcacactgtctagtattgcttcgacctaaaattcgtccagaatgaaaataaaatttaggtaagatatgatataactaagcaaaccagtcacatacagtacatgatgattaaaattgtattgcatcttaagaaagtttatttgtgaaaaatgtttcttcagatccatgcaaaaactggcagtctcatattctgtcttagttcctctagaacctagaacaaactagctccatagcactgtgaaagttatagttcagcgaaagtctatggaaggcaaatctgctaaaatacccaatagtcatcaaacagtcacggaatggaaaacactgcatctatgtcaattcatttagaagctagtttaaattcatgagaccatggcaaatatttgctttactaaagtaaatgcctcccatcaagagcaaccaagatatgtataagaacatagttaagaaactagggtgtattaatattaaaatacagaacaaacatgcactgcaaactaagaaacacgtcatcatattcccccaaaatacaaaagtatatttaacacatagaaggtactgaagtagtcatctgataattgtgcattttagaataatccctgctaaaaaacagttaattgagattctgatagaatgggtaggacagtaggtgacatgacagggccattcgatgtttcatatctacaagttgataaacgggcccaggatgatgaattgcatgcccttcagtggctgaatacttgttagtgcataaatcaacgtagctacgcatcactccaaaaatgaactgccattgtgcctctaatcagcttgcccacgggtcttatactaacagcatcgttctatcaataactagcgtgatgtactaccatctgcaaagatttgcagcaacaaaataagcttagctcaaagcaagaaatccccaactctgcggcacaagaaatccagcatactcttctatctctacatgaacaacaataaaagcctcacgctacacagcactacagaggtgaaccctcatctaggaattccgacgaacatgtggcggttgtcattctcgtctgtctttagagcaccaaaggagaggcacatccaccctgaaacgcttccggcaacctctcgccgagaaccgatagggatagtggtgcagagaccaaccttaggatcgacggcgacctctcccggcgtggtaccagccgagcgcgccgcgacggaggcagccgggaacggccgccgccaacccggtgccgccgccgccgccacgccagcgcatcttccggaacctcctccgccgacgcggaggaggaggagagcgcggccccccggcgacgcggcggcggcggaggaggagacgggggcgcggggaagcggaggcgccgccatcggaagcagcagcagcagcgcagagagggtgacgggggcgatgtcgtgcgcgatggacgcgtcagcgtcacctcgcgatattccggcccactatatctggaccaactcaggcccagcctaaaccggcccgtaatacggcccacgttagcctgctttaggcccgttattaaggttgggtacgtagatggaactattagcgtatgattaattaagttttaattaaaataaaccgaaaatagatttatttatattttaaagtaagttatatatgcctttttttaaccaaaagtcgagataaaatatgtgtcttatttatagtacattaatgcaacaactagtggtagtatgcttttgacgaaaaccgatcgaaaacagtgaaaaaattttaggttcaaagcgggacgaaagcaaattggaagtgaaaattttaatggtttttaagaattcataatacgtttgatcgaaatttggtaaatatcgctgtacttcaattaaaaaggtgaaccggctcggagcgcgcgcattgctttttttaaggaatcataataatgtcatcagcacatgattaaatctattagagaataaatgggaaataatcttttagaaaaaaaagcatatttcttttcgtcgcttttatgttccttttcatgatctatttctgggttggatgaaagcgaaatggcaccaccactgaaacttttttcacgggagaaaagagcatagagaaaaatcaacaagaaattgttggggagtttaaaattaggatgacagagcatcctaggcaataattaagcaggcaaaagccctctttaataactgcctaaaaaatgtgttggattaggaggtcatcactgtaataataaagaggaggctggtggagagcccctccctctctggccctgatctcctccccctctcacttgccctgcccaaggtgaccatctctttttttttttgattgattgactgatttggttgatgatttcctctgattttgtgttctttctccttcgatcggttctgtcaagagcgtgttcagaggaatttagggttgcagttgttctgtttggtgcaaagatttgtggttgctcggttggtttcttgatcgtatcctaatttcgtttgcggccttgttgaacatgttgttagaatcttctgttcttggtgttaatttgtggttgccgttcttgttttttttttgttcctggttggatctgagtggttcttgtttcttgttgatggaactttgttcttgatttggggatctgagtgcctttcgatgatggaaaggaaaaggaaaaagaaatcgtgcattgggttttgatctctcggtttgttgaatccttcgtcgcagcccaagagaggaatccaagctgctgcattgacggcggcggcggcggcggcggcgaggagatcgggagcaatggcggaggaggcggcggcaggcgggctgtactactgccacatgtgcgcttcgacggtgagcgccgtggcggcggcggagggggaggtggagatcaagtgcccgtactgccacagcggcttcgtcgaggagatcgagtccgcgcgcggcgtcgccaccggcggcggcggcgcgatctcctccgtctgggcccccatcatcgacggcatggttggcggcggcggcggcgactccgtccgccgccaccgccgcagccgtcgcctcgcggacgccgccggcgcggacgacggctactaccgcgacctggccctcctcgacttctccgagagccggcggcgcaccgccgcgctgctgctgctcatgcaggagtttcgggagcgccagctccagcgcctcgagtccgccaccgccacgatctccgccgccgcggccgaggccggcgccgtcgtcgggacctcgagagacgcggagggcgtggcgctggccgactacttcctcggccccggcctggacgccctgatgcagcgggtgggcgacggcgacgcggggcggcagggcacgctcccggccaagaaggaggccgtggagtccatgccgacggtggaggtggccgccgggggcgactgcgactccgcctgcgccgtctgcctcgaggactacgccgccggcgagcgcgccacggaaatgccgtgccggcacaggttccacgccaagtgcatcgtgccgtggctcaagatgcacagctcctgccccgtctgccgcttccagctccccaccgacgacgacgacgactcctccaagtccgcacgcggcggcgccgcccactccggcggcggccggcggttgtcccagccggcgccgcgggtcgacgggggaggcctgggcaggttgccggccgtgatgcaggagctcaggagcatcctctcccagccgtcgccggcgtcgacttccggcagcagctcgcacgcgcagcagcacagcgacgagtgatgacgactcaggatggtcgccggtcaccggcggtgctgctgctccggcgaccggcggaggagctcatggttttgcaactttgacaatgtacataatccggggttcgtcgtcgctgtggtgactggctttggtgccaatggaacttcatttttcctcgtctcccctttctttagcaatcatcttgtgatatatcccatgattttaatatacaatttgcgttcggcggaaaatggagtatattagtggcgtgtatatgaactctgcatgatgctaatcaagttcaaggttgcaccggtgtcctgaacacaaatactagtaccgttcaaaaaaaaaaaaacaaaccaacctcgtgttaaagatgtgatgcatcatatatccatatgtcacatcgtattatgagatttgccttttttatttggagtactccctccattctattttaagggtgtttacaacgcaccgaggtggtgttcagcctcgcacccaagaaccgaatattcggtgccacatcggcaattcgcgtggaatcctcgagaacgcggagcacagccggcgggacccacacgtgccaaaggagagagggagagaggagcgaggaggggagggcggggccgaccgggagaaaggagcggcggctccggccgcaccgcccccccgatctgtgccggccagggctcgccagccgcgctgcccctcgatctgtgccggctggggctcgtcgacgcggcgccgctccagcgcttcgctcggctccgcgcgaggacgagctcgctgcttgggccgcccagccgtcgctccggtcgccgccttgctgattccgtcggtggggaggagttcatggttcagtgactttctttggtgggaacgaagactagaggatagagagagggtagatgaaaagtaaaagggaataaagattggtggccccacttaaaaaaatctgcactgtggagtattgttcttgggcgttctcctgcacaggtggcatgcgaggctcctcaaattttgacgacgcactgctactgccctaagtgcaactataaatttccacgctaaattttgatcgtccgtcttatttgaaatttttttataattaatatttttgttgttatgagatgataaaacatgaatagtattttatgttttcaattttttttaaaatttttttaaataagatggacggttaaggtcagacgcggaaaaccatagctacacttaaaataggacggatggctacacttaaaataagacggagggagtacaagtttcagcttacgagtaagaatgttgtttgaaatgctcatttgatgctgtgcaatgctatactgtagtaattcagttagaaatatgaaaatgttactaacttcaacaaactcattctgttccgataaaaattcaattctaaagatatccaaattcatcctcggaattggattttttttttcaggactacatccatatacagaggatggcagacaaaaaaaaagacaaatcagtggtagcagctaaagtaatctaaaagcaacttgctagcataaggctacgtttctttcagattgagattattataatccagataattaggagtaagctgaaagaaatagacaacttattgaagtagacttattgaagtagcttattataatctagagcacagcttattataatccgataagctcatttaggtgagctttttttagattattgggtgaaaaaatacccaccatgccacctcactccctctttagacttgcaaacccaataatctaggctctaataatctagaaaaaaacaactaaccgcttattctactacagattataacaatatagcttatagtaatctaactcaataatctaaattataataatcctaaactgaaagaaagagggcctaagtattcaactccatatactggttcagtttgtcaagaacgcaattcatcctatgaggcatgcattcaacttcccagttgcctcacttttctttggagatctttaactccccagttcattctgattgcagtagcttcccagtttttttttttggcggggagcagtagcttcccagttgccccacttttctttggagatttttaactccccaattcattctgattgcagtagctagggataaaaatggagctgaggataaaaacaggatgaatacagatggataatgtttataccatattcgtttttatcgtacacaaatatcaaaacaaaaatttctcaaaacatgaaaaccacctaaacttctaatagaaacaaataccatcacataaacacaaaataagcttgttttatataaaaaagtttgatcataaattataaacaatgcctaattaagtccaacatgtaaaaaatgagatgtttcacgccttcaacagatatccaaataacattgttcaatccatttggagcagtttctactccgaacggatgaaactatccactccattttatatccctacaagtagtggacggaaactatcaactccatttcatatccctagcagtaaccagttacgcagaaccccgaaccatattcatcataacgaaacgaattcaagaaatgcatttcagccaagaaaacagaacagaatagaactaacaaattacgtaacggctgtcaagtttaatactagtagcagcagaggcagcgaaataagctgcggtagcaataacgaatttaactgtttcaatggttaacccatgaacagcaaacaccgaaggtgcacctgaatgcaaatgccactatcatggcaacaaaagctatagatatgcgtggtaagtaagaatcccccagcaaaaattttcctccgagcaaaatggtgtggattaactgccgtctgccactagttcgctgtcaggagcttgatgacagatgcagttccgatccggtggagggcgacgacggactcaccggagttgcagagccccatcgccttggcgttgctgatggcgaacccgagagcttcttcagtggcttcgttgtcgaaggccttggcagtggctgcactcagcatcgggatcactcccctgacgatgaggctgtgccgcgcaggagcttcgtcgctgcaggtccagtcgaaggagtcggtctgtttcagctcaggaaccacgacggacagaatcggcatggatggcctgtacttggccaccagcctagcagttgttcctcccctagtcaggaccaagatgagcgccgccttggcagagttcgctgtacgcacagctgatgatgcaaggctctccaatgggctcatgggaattggagctgatgcggtaatggacttgaaaacagcggcatggtcgacgcatgactccgcttgcaggcagatcttggccatggtccgtacagccagttccgggtaagccccagcagctgtctcaccactgagcatgacacagtcagtgccatcaagaactgcattggcaacatcagtcgcttctgctctagtagggcggggagacttgatcatagattccaacatctgggttgcagtcacaactggcttgccctgaatattgcacttgaaaatcatcaccttctgtgcataaaagatcttctctatcggaatttccattcccaaatcaccccttgcaaccataaaagcatcagattgtgccaggatatcatcaaagttagccactccctcttgattctcaacctgaaaattcaatagattaaaatctttgcaaagtgcagcttagaagtgcaatactcaaaagagaatgttatacctttgacatcagcattattgactttgcatgcttcccaagcaccttcctgacctctacaaggtctgagcctttacgaacaaaagacagagcaatcatgtcaatcttgtttgggacaccccatttaagaatatcctccttgtccttctcagtaagtgtcgggagatcaacaataactcctggaaggttaacattcttcctctcaccaagcatagcagtgttctcacaacggcagcgaaccaagccttgctctttatcacagtgaaggacagtaagagtgatggtgccatcagcacataatattacactgcctggcttcagatccaccgctagcttcttgtagctcattgatatcatgttgtcatcaccctttatgctataatcagttgaaactgtgatttcttgacccttcttcaactgtacgggttttccatctttcagaaatccagttcggatctctggcccctgtattttaagcaaatccaatatctgataagtacacatttttatacaacaatagttatacattaaacaagcaatttcaacaatacttctctagaaaaggaattcaggagattgaatgttgtttcataatttcattagtcacaggactcatggagaaataaataattgctgttaccctcgtgaaattatatatattaaaggcaggggatgctacgattcatgcagatagaaacaaaaacattttgcgtgtacttgtagtatctgcacaaagcacagcgtgttcaaggtatttatttgtaaacaccaactaacgttgttacaacatcttaacccctcaagtacaagtccacataaccaaatgtacgtattcatagaagaacactacatcttaaagaaaaaaaaaccaaagcaaaggcagataatggcaaaacaaccaaaatattgaaatatgccctaataatgcatcccataaattcagactcatgttttaacttcaactaatagttcatactcttcagagtcgatcaactgaagattataccattagcattgtatttttactttacattctttttagactaatacccatataacaggaagacaggaaaccgctgctgcaaaaagaatgggagcacaaatcaagccagtagtcatagtcaaaataaatggaattcctgagggtagttacaggaaggaataagaatttcttaagggctatactatgcagcataattgacagtatactgacagaagagaagatgctcaaatgaaataacccaatatccacaaaataaatgctgttcactaaacgcaattaacacggcttttcttttttcattgtgagagcgactgtctcaaatgcaacatgcatttccatcgcaaatattaacgctgcgtagaaaccaggatgaaaagaaaattttccctacaagtatctatgaagaaaaaatgtaagatgatttgacaattgacatcctgtctattttacaagcactagtctccaccctattgttcactagggtggacagaatctcttattattggtatatatacagataaaactgaaaggaaacttgtcccatctcaaactctggacagaaataagaactacaaattcaactagacaagaacaagggaaaaatatgttatcatgcagatctggagttctggacagctacaacctacaagagttcctcgaatccaagaacaaatacgattatcgttgtcagtgcaggtccatgggacaagcttgtttggtggtggatggaagacagcatatgaggttgttcttcagttggtcacccaaggtaatgcagaatcagttctgatgcttctaatttaaacaataagctacttctaccaatctcaaatgccaagctcatgatcatctatatcagtgaaaaatggtgtgggtcggatgggtgaggagctggaggtgcgtggatcacatcacgtgctatgtgatatagatagtgtacaatatcacatctctattcctaagcacaagacacttgctaggtttggcactccctgagttaataaaaggaggccatcatttcgaatttccaaacatacgtacaatacataaaatcagaaactctccatggagtagggttaaccttttaagcttctagattctaagagacctcaagcctctgatagtctgatactacaaagatgctgaagtcatttttcatcagctactgagagaagaccaacttttccaaatatggccttgaagataaacctaacttgatatagcataataacagaaatatttatacataataacgacagcaagcccataagaagcagttcctttcccagcagattagcagggatcaaatcacttaatttgcatctcctaaataaactgaaccaactctggaaaagttgggaagcgtgtactggcccgcaactgcgtgttcgggaatatatgaataatatggaaaataacgtacaggtttaatgccattgagaaatcctgaacaaagtctttcagaaaattggtcatgtaccacacaaatcttatcatcgtctaagctaaagattggaagtcctcaaaacaacataactaattctccctttacgaccattttccagagttataacatacagtccaaattaatccagagcgctaaactccgctaattgaaaaactggccacttagagcaagtttaatagtatagccaactactggctctaaaccatctataaccaatttaatagccaattcatataatagttacctataaacatatactacaatattaatacatggtcccacctatcatacacacattgtgtcttggagctggctacatatctgtagcccggtgctcctctctctcctattttatcttctcaatatgtgtttatagctagcttatagcctactattttacctgctcttagcaccaggtgaaaatacagatcaaaacaaaaataaacttcactaacaatggaccagccaaatgaagaaagacgagaagaacagaggaccacagccaacagtgggaggaaatggacaaacaacacgctaagcgagcaccaattcgtaccagttcaggagctaattcaacgttaatgttccatccaatccacagaatccgcacgcggaatgacgcaatccaactaactatccaatctactacaagccaaaaacgcggacaaatcgaatacccagatcttcagaaactcgtatgcatcgctcatccatcgtcagcgtttcttgccgcttctaacgcgtcggtggcgggcaaatcaatccatccacagtacgaaaagtactactaccaacatccacaaacagccaaacgtacctgattttgagccaacaaaacatgactgatattgtcttttgaccagcagaatagtcagggggtgagaacccaagaatcagggacgagcaacggcctactgtgaaaacgaccgcacaaaagtcttgaagaaaataaaaggtggccaaaattaacaccccaagaacgaaatcacgcgcctgaaaagttggcaagaacagatagatagatagatcgatcgatcgttcgtctaaaatgcaccggaatcatcggatcgaacatggaccaaatctctttctaccctaatctccctctacatatttcaaaggatgttcccaagcgcatagatgaaacttctctctcttttttgaaaaccttaaattgcggatcaagaacaatagatcaagaagaggaaaaattaaaccgagagatcgaggagggaggcagggaggggattggagacacgaatgggaccttggtgtcgagcatgacggcgcagaggatgccggtgctctccatggcggcgcggaggttgtcgagcgtctcctggtggtactcgtgggatccgtgggagaagttgaagcgcgcgacgcacatcccggcgcggagcagccgcccgatcatctccaccgacctcgacgccggccccagcgtgcacacgatcttcgtcttgggcctccgccgcatcacccccgcggctccctcctgctgctcctccatcaccgccatcctcctcctcctcctcgctctcgctggatctccccctcgacttggtcggcggcggcggcggcggaggcggagatggaggtgggtgtggtttcctctttcttcttcttggtctccaagaatggaggcgagatgggggaagggttaaataaataaataaatagggttgggcgaggtgaaattggaaagggaaccaatgggtggggagatgcggatgcagcggtgcggtgggttgggttgggtccaacgggaaaggcctccacaatgtcggtcaaaactgtggggaggtgtgggccgggggactgacaggtggggcccaccccgggtgtgggtgggggctggtaaaaagatctccaggaataggatgtttcttgactggagggcatatttgcccagttgtccatccatgctgatgctggggggcggtggatacaaccaaggttgtctctcaggatcgagataggaagtatcattttgctcaaagtaatatcgtatcgtagtatcgggatactatgagattttctttttttaagtttaattaacatttatattaattatatatatagccattctatataaaaaaagtagtaatgatatatgtcatgcaaatagagagacatttatcaagagaaaccatgttggttttgatatatttaactgattttcatataaatttgagcatatttagttacattattttcaaaccatgttattttaaataatattttgtagtatcctagggattgtacgtttcggcttggtaggatcgtagtatcgtaagatactgggatacgaatcgggatactgacaaccttggatacaacttgctgccgttcgatctcctcttttggagatattttcagcgcatgtaaaacgagaaaaataattaatatataattaattaattattaataattataaatttaaaaagtatttatttaaattttttaaagcaatatatatatatatatatatatatatatatatatatatatatatatatatatatatatatatatatatatatatatatatataatttttttaaaaaatatcatttaacagtttgaaaagcgtgcaaaccaaaaacaagaaaattaaagtttgaagttgaagaaaacttggctttgtgttattttgtttgatagaatgtttaaatatattttgcattaatttcaaaatattaaaatgaaccaggatatgatgtttctaatcacgtaggttagtagtatattttaaaacagagggagtaataccttttatgtccgttcgagcacgtaaaatgagaaagccatttgtgtataattagttaaactttaatcattttaaacttatgagactatatttatatgatattttacaataacttatatataaaaagttttcacgtaaattatactgtttaacagtttaaaaagcacactaccgagtgccaaaataaaatatatatctttattaggggcatttaacatatcccatccacagaaatggtgttctcaaggaaaggaaagaaaatccactgaaatggtagtacatctatcatatctggtggtttgccctgctggtttccgttggctgtctcctgcaaaccgtgcacgcgcgccttgggagcgaagccgagtcgcacgcagaaattgaccgggcgcgtcgtacgacacacacgcagaaattaaatgcgtctcgttctagaagagttggagtcacgggggaatttctcgtcctctttttttgttggaaactttgaacgtctttgaacccaaaaaaaaaaaaaaggtcggtgggagaacaaaatcgcaaatggcttatgcatttcggatatgattaaaagaactcttttgatttcaatctccatcgtacaaatatcaagtttggcaccatgatgttacaaccgtttttgtatttttgcaaatgtatagtgcttcagttgtcagttcgataaaaatagcccttttttaaaaaaaaaaatcggtggagcatttcgttttctctcgtgtttaatagtggtatagacgtatagctgtttaaagttaatataataaataatatgtccccacagccagcaatagcgccccacctgctggtcgagatcaattagtacttattctattaaactaaaccatatgttcagattctcttctcgagcattctctctttaatctatgctctttccaccgaatcaacttaagtcctgtttggttacatgggctaatgtttaaccctcatcttttagtctcaaattagtcctcaaggatttaaacaggtgggctaattttgagctaatgtaaattagcccctcctcgaaacattagcccctccaaggggtgctaatggggctaattttgtgtggggaacatcaaaaagcagctctctctctccttctctctcctctctttctactctctccaccttttagccttaaattataccatggatccaaacataccaccctaggctaatgtttagcctaccaattcataactaaacattagctctcaaaattagccctgagctaatcttccaaacagggctctatacatatgccacgcgtatcgtgcatccgttctggcgaacattcccaacaactatatataaaaaaagaaaagacaaaatatttaaccatcagcgttcactaatttaacacctaacctacatatggcttacacatatggtaaatatctaaaatgataaatagttaaaatgccataaaaatgaactagtactagtacacttggtccaaattggtatccgtctctttacgaaacaatgagcttcaacttcttttagaatatccagctatcaaaagctcgtcagacaatttagatttttcacctaaaatctaactaaaagccagagattaggtttcctagcttgtccagattcttaccagctgtttttaagaattttaagttccacaaataaacccttatattcatccctaattggagtaatccaaagcgattttatcaaatttcacagtttcacttttcaaagatttttccatttgtcctattagcaaccatgaaaacgaccaaaaagcacctaaaaatctaaatttaaattcggcgttgaattttataattcaacaacgagccaagcatacaacagcgcagtgcaataaccacaaactaactagctccacctactagacattctggagcagtgtaaaaaaaaaaaaacaggcttgaatttgatcagaaacagcagccggcagatgctacatccagagtgatgaatatccaggatgtagttcataaatatactattcataactcagaaacactcagattgttacaaacaacagtctagcatctttggggtggcatagaaaaattgagcaaatacgtttacagggaagagtggtaaaagaaaatctaccgacaaatcagggtgaggaatttcgcgatatcctacagcttttgttcaaaaatttttcttgccaaactaatgctgcttcggtggcaatccgagtgctgaactccaagaattccagtttcatatgctattctattcatataataaacctgttaaacctctcttgtgagtatggctgtatggtgagagttgttttccttgtagcaagttcattattgtctcaccccataatttagagttcatcatggtcacgctggttcgaagatgccttgagcttctgttccaattcctgttacattagcacaattccgtaagcttcaacctatattgggaaaaagaaagaacagaacaaattagccagagggtgagaaagaaccttcagtttttgttcatcgcaaagcgctggagtcgataatacagccacatacctgtcacatgaagtaggcatgtaagttaaagagtaatgtgcattttcaggaaaaggtggaaggtgtatgtagagaaatcaacatactcgcatctactaggctcatcgacaccattaagttcattgttcagcccgcatcgaagcctaacctgtatcataaggcaagccatattttattaagtttcaagacctgcaaacagaaacagacaatccatcttaagataacgggcacgaaggcatgaaaaggagaagcacctttagacttcggtcagggccattccagcatctgtctccatttgaaaattgcattactctgtaggattcttcaaatttgtcccagcgcctgacagcagaaaaaaattatgttatcgcacaaaacaactgcaaaatcactattctgagagtaataaagtattgcttaacataatggttctgtacttgtatgatgcatgcacagagttggaattttggagccataaagcaaacaagaaaacaaaacattgcattcaatcagctcatatacaaccttttgcagtatgtaaagctaggtggcctgctagctaaaactgagcaggagagttattctgaactctacgactctttgcaaagtggtataacccattattaggaaaaactgaactagacatctgcagagcaataataatgaaaacttagtacacctgaaaggaggctaacaaacataccccaggctggtggtactatgtccttcaacctgcgaagctttcttgaatggacataccttgtaaacatacctatcaataagaataacaataaacgaggaattaacaaaatatagaatggtaataaagtaaaccatggaaatatttacgagagagagagagagagagcgcatgtgaggttggatgactaatatacgtacttgccctccttgctctcaaagcactgatcataaaagtaatagaactccttctccttacctaataagaatgtattccttcaattaatttcaatattataggcctatcaaataatatatgaactagacataactctgatgaagtcaacatctagaatacctatcaactcatataattcttaaaaatgcatttttccacagtaatgaagctcaatggtaaaaatataatcaagcttttctttacagctattaatgaaacacactgctgtctagtgtccaccacaaaggcgttactgctgaaattggatatggtaacgatagaaaaataggagaaaggaagaacaccctcaacatgccttgcctgcatgagaggtgacttgaaagtgcacattcctgcaaatgctcctacgacttgagtatttattttccagtttgaagacaggtttttcaatgcacaagttaccattctgggacaagtcaaatcatgctaactgggtgatttttgctaagaaccatcaatattaaaagtaaaaaaaactggatggcttaggcagtaattcaatggtggcaagcgctgccatatataaacttgcaaggccattatatagctaacaagaatatacgagtgacttgtgcattcaatcaccaagtaaacaaactttcaactgacttaccaaagtcgtgttttagcttatctgtcagagtggatatcctagactgaatcttggacagctttgagcttgcatcatcatactccttccgaacacgagaagcctctaaaaaggagatcaataagtgacacagcatctcacatgatttttgaaggatcatagcaggtagaatacacaacctaccagataaatccacaggggtcttgaaaaagttgaatgttcgtaaaacattctgtacagtttgctgaattttatccagccatgatgcttgcccagaggcagtgaaatctgacagaacaaaagaaaaaagaaaaatcgataaccaaatacagaaaggagtcaaagaagagagatagtgggcaggttacatgaaccatatacctgaatggtcatcacctttctgatcatcatcagacttgtatgacgcaacatgctcatcatgatcatcgacatattcatcatctgattcatgtgagaagtcttcatcatcatatttatgtctgtcatcctcaacttctgaatggtaaccagcatagctgtcttcagcagattctggtacatctgattcatcttcatgtgtttcttctgaatgttctggcatatcatgctcagcttcatgctcatttttatcatctttactgacctcatcaaccttttctccagtccatctggaagctaccagacgacctaactcctctcttgataaaccttctgagtcagcaggagtggattcctacaaaatttatcaatacaagttcacattgcttcaacccttgcagtgcattaggaaaaccatgaaaattactgcttgtactgatatttgtaatgtaacaacccctggaaaaagttttaactgtattcaaccaagtacaattgaacataagggcaggaaagatgtgcaagtgttgtacaagtagcaagtgctggtgttggcatggcttatggggcattagacatctagctacgaatgttggtttattacacactgcagagatcatcagttggactaatccaaagagagagtcataaatgggttgttatgacataatcagacttgaaaacatttaaagggatttgaatccataaattcataaggcttattcagtttggaggaatttgaatccataggaataggaaaggtgaaggaataggaatgtttgcacacatcaatccatatgaatttttccaagaggtttgagtggatggaaaaattcctatatgtttcctctatacaacttgtacgaaagggaattttcctttggttttcctacttcaatcctataaactgaatgacactcataggaattaatccttaggaatccaaatcctttgttttttcctccaaaacgaactattagaagggaaatggcttggtgcacagggaaacaggggaacctgcatatccctgttagtgaaaatacgatggatccagcacattttgatgtttcaaaagttccaaaaacaaacatgaatgcagtgcacataaaattatctaaacctgcaaaatttcaatttcaaaatccattgtattaagatccaaatttcattcttgtttaccgatgccattgaggacgagtatgaaactgatatttttgtatatttacttaattttcagagcgcaacatactacacacatggtttgcttgaatgtttcaaacacaataacatggcaaatttgcaacggaagtaccggttcttgggacaccaaaacagtcacataccaaagattaggtaaacaacattacaaatttagatttcagtaactatcattaatatgcatatgagtggctcatattccatcatgtagctcaactcacaacagcaaattagatttgagggctgttagattggcctattggagggatgtttacaaggagggcactaaacggtatagagttatatatatttaaagagggtatgcaggatatcagtttttgagttataatagagagaaatgcacaatacttttttgaaacaggttcaatccctggaaggaatatgctattattaatataatcaaatttatctctactattgcctccaaagaacagggaaaaacatatatcaaaagggcccaaagaatgactcagatgcaaagcagttattaagtcacctgctctttagtaggtgctgcagatgtctcctctggtggtgattcatcagcaggtgcggcttttatgctaatgtcatcttggctttcaggatcatgctgacatacaaacccaatatatatatggaaaaatccctcaatgtgatactccctccttccaaaagtctaagacctatttcattctttggtttttccaaaagtctaactcctatttgtagtcattatgtgctaaattaaattgttgaggaacccaagaagccattttaatgcttattggttgcatgttcattggttttgtcatatggtgaatgaattaattgcttcttggtcttggtgcaaaaagaaataggactcagatttttggaaggagggagtatgtagcagtagaattgttagtattttataataacgaagttaaattatacctgctcaacagatgactcgctttctggtgtgtgattgtcatggctcgtggcatgtccatcatgatgttcagctacctgtattcatcatcaaaaacaaaataatataaatatctctttatggcattgagctacctagttgtgcagtaagttcctacaattcataagtgaggaactgaggattagtacagcatagtatcatatgttaccacagtgatgatcatttttatgttctttatgactaaccattactggtaaattgtggggaaaaaggttataaatagcattgatggaacatccagttgctaggatacatggggactatccgttcttgatgtatgtatgtatgcatatggtatctctgttaagaaggcagtttaatggttcagatcatctagcccaaaacctaaaatgaagccaacaatttgaggctttaagtgccaccaagaaacttaaggttctgcacaattatgacataaatcctgtacttttcgataaaccattgttacaaaactctgtagaacattgatttatcttcttatgtgaatcattttgcgataaaaatgcactgaaaccattggaaggatggtagttctctcccaaagcatagtaatttcatgagtatacaacacatagctgcaccctattagacgtgtcaacatgctaacaccagcttaactcgattcaagatattaatggtgaggatgaagagttcatcagacaaaggtatatatggcaatctaacagatatatagaaagaatgctaaccttgctctcatcttcttgcacagtttcatgattttcctgagaatctacctcctgagaggcatctgacgctttcttttcatcagcagcttgcttttcggcttcttccttcatcctcttttcttccttttcttttcttaagcgttcctcttcctctgccttctctatcaatttcttttgttctgcacaacatgagaagtcatagtttaacacaaaataaactatccattgaaaattagcagcgccaacagcatttcccaacataacattctttggtaaatgactcaagacaaaccgccacgaagagcacacctgtgagcttgtcaacaaggccttgtagtattttctcttcacccttcagtttcgctagctctgcctcgtctttagcaaatgccacttttgccttttgaatttcctgatttcgaataacaactccgcttttatatgtagctacttttttcttcaatttatcccttgccgctttaccagcctcccagcacgtattcttgcaagtgacattgctatcatactcatcactcccgtcgcagcaatctaagaggcagcgacaaacacatatgggtaattagaaaaaaatatagcgggaattccctcaagcactatgtttacggaacaaaagcaccctaatctctagccttacaattgattttgtgtacatttactgtgtttacatttgaatgatacagagaatggccaccgattataatcctcttaccacagataccatcattcactcgcgacgagaagatcgtgatgggagaatgcccagcattctggcagtagaacttcccctccgggcacgccgatgtccctgcgccaaggcaaaaagtaaacacaattcgattaaacagctctcttagattgcctacagtaagtagattcgagctactagcacaaacacgagaacctaaaaccagaacacctccgcaaaaagctaaggcaaaaaaaaagggataatctttttcaggcgagagcaaggaagcaacctggctcgtcggtgccgtcggggcagtcgcagaagtcgtcgttgagcttgtccctggcgaacctccccgatccgtccctgcacctgatcacgccgcccctgaagtacgcctcgtctgcagtgcagtgcagccagccacccccgcccccacaggcaccaaatcaagaaccgcatcaagcaccaagaaagagagatacaggcagatccggggggggagaaaaagaacaagatggaaccttgcggcgggatgccgagggtgtcgagcggcggcctggaggcggctgcggaggcggagatccggaggaggaggaggaggaggatcgcgtggagccccatggccgcgcggcgcggcggcagggggtggtgggcgacggcgtcggcgtgcgtgtgtctctcccctcctcctccgcctcccagggaaacgggaagtgtagcaggggagggcgagaggagcagtggtgccccgtcttcaattcaacacggggttgctgaaatttcttgatatgcagtttacagagcatgagattttaatggctgattgattgcagtttacagagcatgagattgtactgtaatccttccgtcccgaaatataagcattggattatacgattatagcttattcgattgttttatggttggtatggcgcgagattatccctcttatacatgcaggatatctaggttttctcgatcatcacattttattactgaaattgagatttatttgtttctgtaaagtaggcgattggctatttggaacttatttagattcactcaaattatacttatgtgctggattcactttatagttttcaaaaaaaaaagtcttaagttgatctatctaagggacagagcaggagcgccacgagtagtgtccaaggcggatgcacgagggggggggggacaagcgagctccatagttggcaatctttcctgctgccatgacaaaaagatatagacggcatatggactaaaaggatgagggagagaggatagagaggaatgaaaaaaatgattatatttactgtaactgacatgcaggtcctacttttttttcctacttattatgtcaagtaggcgtcacgtagacgtcatgtcaaatgaaaaccaaatcaaacatcacgtggatgtcacgtcagctaaaaatcaccgtctaaagcatcttggaactatatttgtactggttttgaaagataaaagatactcctatattggctttgttcggacggcttagctacagcagcattgtggctacgctgcagccaaccagccagtagctacaggagttataactatccagcagcaagcaacaacttcctgtaactatgtgtttgtgtagccgaacggctacgttgtacaacacaacttaaaacgctacagcaaagtcttaccgaacatgctaattgtatccagttttgcggttgagagatatgatttaaactcaacctataatgaggaaccaaatttgaactttctccacccgtaaacccacgtagggcatatgccatttaggtgggccttccccaaatccatgatgagcccagtagttggctgggccttcaatatgcatcatcagcccatcggtgcagttaggaacaaggtcactgtgtaaaaggatgtttggtttgctcccaaagtttaccaaagattgccaacttgccacacctcatgttagtcaagtttgaccaagttagtctattgtttagttcatagccacacttgtggcaagattccttctcatctgtttgggtcccacatgtcatcaactcaccaaagcgtggcacaatccaattttgctagctaagttgtggctcactttttgtaagccacaatttaggcaagtgtggcataaaaaatatggtgaatggtggcaaacttagtatagcatccaaacaacccctaagtacccctggttttgactggcctatcttttcgcttattcttatcagccaaaatttaaaattttaaacttaaattcaaagttgattttaagattttgttttcatttgcaaatatgttgtttcgcttatgcttaaaaacaaccaaccaatggatccggacatctttgtgtttgaggaaaagggaaaagagaagaatggagaggtatacaaaataaggtgagtcattagtgcatgattaaattagtattaacaattttaaattttaaaaaaatatttatatgattttttaaagcaattttcctatatttttttaagaaaaacaccgtttaatagttcgggaagcgtgcgcatgaaaaacgagataaatcttcaatctttcacctgctgaggaacgcagtcatattgagattcatatataaaagtagacttactttgagatgaaatggagggtgtatttttttgttgaaaaaaaagttaaatagcatccctttgcatgcccttgacaatttttgagcaggatcacattaagataatgtttaatttgatatgtatacgagtgttacatgtaatactactagttatacatgcggtactactaatactgtgtgcaaaattaattaattgtgtgataaactcaacacacgcgtttgctgcatgtgtagtattgtacaagtaggcgtatgcatctccaccccatgaatcaacggtagatagatagcttccctgcacgaatctcaatgcgggttcctcggatcgtggcggctgttggcgccggagctcgggtagtcctgcgtcgtctgcatgtccatccgcctcgccgccgccgccgccgcctcgtcggcgacgaccggcagctctccctctactccggccatccccaccaccgccgcgtcctccgccgtcgacgtcgtcggcatcaccaccgccgccgcctccctgggaagcagcgccctccggtagccgacgacgctggtggtggttgtggtcaccgccgccgccgccgccgccgccgccgctgcaaggaggagaaaacacagggcaaagatgaggagcatggcctccggcgagagttccggcgagccgaagagctcgatcaagccgtacaaaccgtggacgaggaagacgcaggagagggcggccagcgccgccaggatgaaaggcaccgagcaccgcgccttcgccgccgccgtcctcatcgccggccagccaccaatccaatccaatccaagctagaggaagaagaagaagctagctagctaagccagagtactatgggcagtgacgacgagctacacagattaattcagattggttgctcgcccctttatatagcggaagaagtacaaggaatgtgtgggttgctgtggccaggaagcagccatgggtgaggtagatatatatgtatgcaaagatcgatagatgagaggtcgcgaggtagaagaagggtcacatcaaatggaggtcaaacgagcacacaatcactagatcccactgacactaccaatgtgtacttagagtaattgtttagggtttattaccagcaagcaatatgtagggatgcggattttcaatctctacgtagggatgtggattttcattccttgagagagaggatatctccatgttctatgtatgccgcgttatccagaattttttctaaaaaaagaagatagaataaatcaatatgtaatatatttattgtacaaacatgttatcagggctatggataccacatacctaatagtagttggctaaatctcgacaggactcaccacataccatgttttatacggaaacaaccttcgggtatagaaggagttccggataaggaaagataaatagagttctacatagaaacgacaaggattactcggattgtatccatattggtttccctagttctacttggaaaagggaacacgtatgggtataaatacaagaccccctaggaggagaggggggacgaaacaatagatcaagacacaagatcaacatataagctaacatgcaccaagacaagacgccggatatcgacttcagagataagcatggctagtcccctacgatgtctacggatactgtcaggagagacatagcgctgtctttgatctcgctggatgcggattcgaggaggaaggctaccctggcgtcgactacgagtcagcacttcataccgccaagtcgacaacagttagataggctaccccaaatattgtactggtgtgattatggtgaataaaagcaacgaccggcttcggccaacaggagtagggttattacctgacaattcaggggcccgaacctgtataaaaatcctcgttcccatctcatttacctcaatcttgcatatatcctaataccaacgatccccatactatgcaaataccgtagtcgtgacatcaaacgtcgacacatgtaaattcaacttggacaaaaaaaagttgatatttctcatttatattgatctaccatgttatgtttaaaataaaaaattatttatgacaattggatttaccttaaaaatgagagcgaaatctccttaatgaataaagagttttccgctattgtctatctagtacgaatatgggacatatcgagaatcatagttctatcatatacttcatccattctaaaaaaaaccaattccgtatttagggatataggatgtgacaacgaatctgaatattcgttatactatatatgttatatcatagtatgaggttggttttttatttttggcggagggagtattagctaggatatttttagttagagagagtactatagctggtagtagactactagctaggttaggcttaggtgtagaatcattggtctttttggcgcgaaaaggtggggtcgtgggcgtgcactccactaacacacacaagggtcgatcacgcgcactagaaatgggcgggattacggccacgtatatacgaccatgcacatacatgcgtcgttgcgtttcactggcatccactacgatccaactgtttaattgcgccgtgattatctatcaatctatctaatcttggctggaatttcatcgatcgaaaagccaacgagctttaattagtttggccatggagatcgatcagaaataatggaattagtcagaaaataattaatggttaattatccagtggatgatcacacgttttcaacgtcgaaccatctcgatcgatctgacatgcatgtatgatgtattggtggcagtggatctgtatgtttgtgtgtgatacattaggcatgttgagatctccatgagagataaagcatggtgatctgatgacacagacataagcattgacctgcacatgatcacccttagctttatgctggattgattgacgggcaagtacagaaaaagggaaaaccttataagtaatttacgaccaagatctagctgtttggcaatttggcatacattttctttaagaaacacgaacgcctcgtcgcccaaagatacatcgtttatatcattaaaaaaataattagacataaatacgatcactcgtgtcaagtctaaaacttgaatccatgtgggctgagatttcaccaaacctaatcagttgagctatactcacctcgcaacaatttggcatacataattttagttctcttcatcgtaaaccgtaagtatttttagagctgaacgcatgagtattaataagaaactacataaaaatgatcgtaggaaatcacgattagttgagaagataaattagctaaagaaattaaataaagaataattataattgattgagatgagacgataactagagaaatagcttcatttcaaaacaaagtttaagtggtagaaatagcaacttctgactatatatgtatctagacattcccttacaaatacaaaacagaagaatattatattttggtacggactgtacaacttcagagtgagttttttttttcttttgaagaaatctctgaaagatatcgtctcttcgatcttgtctgaaagatatcgtctcgcagctgcaaagaaagttttctgacggctgtttcgtcgatatatccgggctagctccatgaaaattcaaggagacgcacccctgccgtgtgtgaagtgtcggtcggtatatcacatcatatatatcagtcttcaaaagaaaaaaaaactccctttaccccctaagggattttgacattttactggtattgtttgaccatttgccttattaaaaaatagaattattatttattttatttgtgacttattatccaaagtactttaagtacaactttttattttttatatttgtacaaattttttgaataagacaagtgattaaacgtcacaagaaatagtgaatatcccttatattacgatacggaggtggtatatcacatcattaattggacatgacctaatttctttcggccacggaatttatccaagccgttcatactgctaaacacgtgtggcaattagctgtatagctagctggagtagtactagctagaaccgttactaccaaacacagatctacctttaatacagatcaggcatgatcgagatcgagatggttaaattaatctctcacttgagagtcaaaccacttgcaaaaagtcagcatggaaagaaaagacgataaagctagatcgacacagtacatatatcatgttcagattgagatgatcgatcgaagagacggcgacgatatatatgtatccaatctagaattaattagtactcccttccgcttcagattataaaacattttaactttagtaaaagttaaactattataaatttaactaattttataaaagaaagtagtgctgctattgtaaatattactatttttttctataaaattagttaaacttagagtagtttgactttaacaaaatttaaaacatcttataacctgaaacggaggaagtggtaagttgcaaccggattaattattctgcaacacacttttaaagatacgatttttatttaaaaagaactttcttctgttatatacatgcatcatgcatcacttaaacgacagattatatttaattagattgctagattgattactgatcgaataagatgcatctcttttcttttattttagtgtgtgttccaaacttaacttttcgttagtgcccaagacccttacttgtaatacgagacactatatatagcttctgttaaagatcagatatcttatttcattacagaaagaaaaatattttctatataattaagtagatatatatgatagaacttttcataaaaagcgctagcttagacatgcagataaaattaaacatacatagtccatgcttagtccacacagtgagaatccgtgatacaagtacagagcatccgtagaaatgggcaacttgcaagtcgtgtcgtcaattcgaacagatttatgcgaggattcgggtatttggcaagagagagagagagagaggcgccacctttgatttttgctgctgctaattgtcacacacacacatacacatatatatatcgacatagtgtgggcccggatcctctgcaataatacagtgaacaatgtgagaagcaagataaatcaatgcagtgaacaatgtcgatctattgtagcaacagtaacagttgagtaccacaacagatttactgtagcacactatctgattcttggtttttgatcgaacggtctccatttcctctaataccaggtacttcctctgtattgtattttaatgtatgacgctgttgactttttaactaacgttcgaccattcgtcttatttaaattttttatgcaaatataaaaatacttatgtcatgcttaaagaatatttgatgataaattaagtcacaataaaataaattataagaataagatgaaaggtcaaacgtttgtcaaaaaaatcaacggtgtcatacaggatgcagtactatagattctctacattacaacttgcaattcagataatcccgattcacacagtatacgtacgtacgtacatatcgatcgcggtggcagtgatgaagctatagtgactgtagtggtggtggtgcatgcgtgagctaatcactcgcactgttagccacacgcatatgcccaacccccacacacaaattaaagtgcctctcgatcgatcgatcagtctctcaccacatcatgcatctcttggaaagttaattagttttgatacacgcaatagtccactactcccactgcttgtacatcccagcgctgcagctaataggttgcctaaaataaatcaactgttacgttctaaaataaatcacttttcaatgttgtctgccgattccctcgtcttaaaataaataaaattttatatattaatttaaacattgttaatcttctgtctcaaataaatcatttttttacatgaatctacatagaacgaaagaagtactccctactaattaattatcccattccttactaggttatcgtattttgggacggaagagtagcttgtattgcagattctaatatgaactagtataatctagttactacgagtatactctttctgttttaaaataaacgacctaaaatatgattggaaattacatattataacgaatagtattagataaagtatgttgtcacatcttattcgaagttgatttattttgagactaaaaaaagtatggtgtgtgatctttcgtggaatcatcccataaaatttaaggaatgatgattctgtcattcatctaacaagttagcatgtgcttttgaagaataagacagtgatggatcgacaaactcattctaatcctcaaatcaaccaacttgtcgatttaaagtggtgaatttatcatcccactactcgaatcaaataggccatatagaaagacgacatgcacgatataactgagctagctagcttgaaccaggacggaaatgctatatgtatattagtatatacagtataattaatgcgacctacctaggaggataacgaacttggatgacgtgtacatatgttgcatgctgagatacgtacgctacaagatcgctatatatattactatggctgtgtgtttagttactttcaaacttttgacttttctatcacatcaaatgttttggacacatctatagagtattaaatgtggacaaaaaaaataattgcgcaatttacatgtaaattgcgagacgaatcttttgagcctaactacgccatgatttgacaatatggtgttctagtgaacatttactaatgacggattaattaggcttaatagatttatctcgcagtttaatttacaggcggaatatgtaatttgttttgttattagtctacgtttaatattttaaatatgtgtctatatacattaattttttttaccaaaatagctaaacacggcctatatggaatggatggacacagaaaaaaggtttcttacgtctccttcacttttcttacctcgatcttgggaacttattactccgcacctataaaaaaattactgtgttcggttgtactacttgggaacttatttctccgcacctataaaaaaaataagtagctcattagcatataattattaataattagcttagatgatatagaaataaattaatatgacttttaaagcaacttttatatagttttttttaaaaaaaagggtatcgtttaatagtttgggaagcatgcctatacttttattcttctatttgtgtcaaaagttttagttttttaagcaagcagcatattattgtctctcttgtgctttaacaaatccgattaaatctgaatagtgcaagccgcataatatgtatatggagcatgcatgagatgaaatgaaggcccacctgccaccataaaaaaccatagaaaaggacaatgccttgagccgggtgctcgatgaatgatctaaaaatcgggcgtccacctcgcctcccccatacactactatccatgcacacgcatgttatatcatggctataaatgcatgtccacgcaagtttttatatctcatttgcacatttttgtgtcttcttcaaatgtattttcttctaaaataattgttcattctacaattcgattacatctttatattccttataattaaacctttataacaagatatcacacgattatattttgataaaaaattgaacgttgtttcaccccttgaaaaaaattgttttagtttaccgcataaagtgtttcagagaaatggtattaaaaaataccaactacaacaccagtaaccacctagtatatgaaaacactaagtcccaacaagcaaaacaagaaaagtcatatgaaagatacaatatatttgaaaaaacatgatattgttaaaatatttttatatcacatatgaatattaagttgtaactatcgaaacactacaaaatacttggtgaaacattccaagaatatcatgtgtaacatttgcaaataaactagtaaaacatcatacaatactagttgagactgtcacatctataaaacatgtgcaacatttaaaaaatccatgaaaaaaatctaaatattctttttatcgaaatataaccatgtagtcgtgtcctaaagatttaattgcaacgaatttagcgatgcaatcggatagattggagaagtaatttaagtggaaaaatagtttaaaaattgctaaagaaaaacttatagcaacccaaatactaaaacttatactgacttgtttctagtaggctctgtaggatgcatctatgccaagtctctgacggagtgatggagactcaggcgggcgtccgattcttagctacaaattggacgctcaatccggagtcacgtcccataaaaaaggctggtgtggttgatgtagcacgcaaattcggatcaaatggttttgattggcaaatcgggggttggtttaattacctacaactttttttttaaaacacagtacagcacactcatctttatgaacgcacacacgcataccctacccctatgaacacctctagaagacgggatgagcatatgttgagattcatgaagtcacctcagacgcctcgttatcaacaggtacatcgcttagcactgtaaaaataattagctataaatatgaacacccgagtaggctggttctaccacttggaaccaaaccagttgagttacgcacaccttgcaatgacctgcaaattttgatctattaggccctcaataatccctcaataatgccaaaatattagtatgaagcatatgggtatgcaactctgtatatattcaaacaacaatttagaattcctagagctccatgtaagatttgttggaaagctcgggccgtcgcgattcagtcatctttctaatttcaaaattatgttaccgtgagataaacatgtagattggggtcaaatataatctcatagactagtatttcaacattaagtgactgtatagcttctgttaaatgcaaagactagattttatcagttttcttaaaaatatatactgcgatagttaataaattacgtttaatttagcacttattttttatattactaaatattttagtatggtagcgaaacaaacaaactagccccacatgacctaatcgaacaaaccatgcataccagccaagggaaaatgcaaataaatgggggcttatgtgagatcaacctcaaaaccccggtagtggtttcttttgtaccatgatgtcatcatcagtattcatgtatattcctccctacatgcactctattgtatgtgttgggcacaatgaaatgtggctacaacctagctgatgtgcatctcacaggtgtcgccacaaaattaaatgctgtggcttcaatctgtttatgctcttaccaaacaattagagcaagtttaatagtatagtcaatttaataaccaatttatacaatagttaccaatttaataaccaatagagtactacacaattaatatctggtcccacctatcatacacacatgtattttagagtccatgctatagctggttacaaatctgtagcccgctgttcttttctcttattttttatctctttgaaatatctttatagctggtttatagtccactgttgtagctgctcttaacagtgcctattttttcggtcacacagggaaaatgctctcttaattatgagtgtgtactactactctaccagtacacatgcatgtttgttagtgaccgaaatattccatgtactagctagctagtgggttttggtgatgcacagagccagaggtgcatggggtcatatatgtgtgagattgtgaagtgaggatgagaggaagcttccaggtttgttggaccatatcaatgatggatcacacatactccctctgttgctcagaaactctaacactaacttctcgaggttgagatatataaggagaaagataaatgatcaaaatactcctattgaatggaacatttactagtacctgttcagatttagagtactaggaaatatcttatccaatactatgttcttatattttggacgaaggtagcaataaagttataatcaatgatgtgtacgtgagggttatataagagatagaatttttttttaatttacagaccaatagcagataataatatagaagttggtttattttaggacaaagttcaatctttagaaattacttcatccgtttcacaatgtaagtcaatctagcattttccacattcatattgctaatatgaatgtggaaaatactagaatgacttacattgtgaaacggatggagtagtttatttaggacggagagagtatttcattatttacaacaatgttaatagacgtcagattaaggtattgttgcaattgattatagtacagttggttagttttttaggctggaaccaatctatcttggtcaagggtagattcagtgtgggtgcggcagaaagagagaatgatgaggaagaagacgtaaggtggtgttggagtaagaagcaaccccacaactgatttcagcttaagcttttaattcagatgcttaaatttatagctaactatttacttttaaacgctggatgatatattaaaaatgaacagcaaactaataaatattatttggatgataaattaacaacaaactaaatactgttgcctgaaccgtaaaatcacttcctccacatatcctccctctttcccttacgcattgggctatgttgggcccaaatgcttgcagagctttttaattccgaagagactttcaggttggaaataacttatgcagcattttggttggaaataaatccaggccaatttatattgctaattaaattatgtggcaccattaaggcctcatttggtccagaccaaatttctggaccaaagttattatacaatgaataatcggtgcgtacgctgcatccacatcatacaatgacagatcaaattgatggaatcaaattgatggccacaaatccatttttttagataatggaatgaaatagcatcccggcttttaatcaaaagagctacagccaattattacaaactagcactctgtaagagtgaagtccaaatagaagcaaacacaccaaccaaactagacaaaataacattattccagtctattggtaaatctccatccatgattggcaaacagttgcataaccgtcacttcaagcttacgacatgcaacaattaagaaatctgcatctttatcacacttttgtaactgtgcccacagacgaagccaatatgttgccttgaaaatgacctgcatataagtaacagtaggtgatttgtcaaaaaccctatcattcctactcagccacagagcccaacacaaggcagaagctccaacaagtattagtttgctctttttgtttacaactccctgaagccaatcataaaaaatatgagatatgctagtaggaatatataaaacaaaagaaaactgaactgctctccaaataaacttggccacaaatccatagatcaatcgcattattggcttattgcaccttatacaagtacagaaaactataggcaccgaattcatcatcatctctcgatggactaactcatttagtatttgagcaaattgtcgcataaaaaatatcttgaataatgggcagtgcaaatcagcaaataagaagcaaagatcaccgttgaggcatgcactagagacactccatttgttcagcttgttgcatttgttacatcaagcttataccaaaagaaaaattcgtacatatttattcacttcttattaatttcaggctttcagcaaagatttatgttgtccagagaaaattctgctcatatgcagttctatgcaacttatcatgtcagtcattttctctttctgttttttttttgttctttttgaagtatcattatgtatttatgttagtttgggttacaaagaattctgaattcctgaatctgacgacaacttcagaactgacaagtgtacactgttgtttcttttttctagtggaagttggagtaattatgagttctgtccatcatcttctcctctatccggatgatgcatcaattaagtcaactgctacaagactcgttcttcgtgaaaacactggaagataatagagaaatctcgtcttgttggcattaaaggaaaagccaaaaatgtgggttgccgaggctcgttcaggtttcagaacttgcttcgtcagagtaggataaaatggctgctcctctccattttcataatagaaaatcactagtacattgataaagtattcatcatgtcaattgtccaaagaaaatctgctaatatgtacttagttcctgaaagctcatcctacttgttttgtcagtcaagggtctgaatgcctgaatctgatggacaagttcagaactacaccctgcaggtgttcattgatgggattcattgcttaaactgtttatgccttcagatatttcagaagttttactagcatctagttggagctaaatcttggcttctcttgccctgtttccggacgatgcatctatcaattgccaggatgaattgtgggttatgaaaacatgctgtctctacgcgttcttttggttctcagagacagtctgtctcctgattttgcattatttaggattattgtctggtttgctaacatgttaaaaacaaaagcaatgcagcctctgaatatctagctgagtggtcacatgctgaaaattcttttcttctgtgaactgtgatggttctgacaaaatttctttatgatctagctgagaaggaagttaacatggcggcctaacatgttcaacaggtgattgagaagttctgcccttgcatcaagattctctctgcacaagtaaatgcttcacatggcaacataacatttttcagacggtgctttcaatcctcatcttcccagtcattcaaattcccatggcctactgaatgcttccattaggataagaactggactagcttagccactgaacccatggttaattatgaatgctttggtaactactatggtctagtagggcatgtggacagcaggtgaagggctcaaagattcagcctcttgaatgggcattgcaaaccagatgcaaatcaaacataaattcagagtcgccgccaaggcacagagcaactagattactcacctgaaaaatctgaaatcttggtctactccaccacagtttcagacacttgacagacaggttacacttaaaaactcaaatccatataaacaccacaaatctttatcatacgtcagtaccagaacctcagagatggaaatttatcaaatcatctaatggtagccatcctgaaattgtacttattttttcactgtgccaagttgagtaaaggcttgcacaacctttaatttcccctgcatcaactttacttagctgagctgcaaagcttcttgagaaaaggccacatcttgcaaaatctcaaggccaaagtacagagcttaaatgcagatccatgcatgcaccaatgacctatgtaaagtaaaggacccggcttagcaaagagaaaaaggccagggttgggtagggccacacatcacatgatcattctgtactaattactcagaccatttcctgtacaaattactcagagcatctgctgtgtaattctgtacaacactatatagatcaatagatgcacttgagagaacttctaatccagtgtgtttattaattctgccgatctactccccccatttaaaattatgtcattctagatttatatgtatcatcaatttatagaaattcatataatttaacgtcataagatttatatttttatattcaccatgaaaagtaatttcgtaatatatactacatacatcccaaaatataacaactttcaagtacaaatctagataaaagtatgtctagattatcaccaaaagttagtatattctaggatggagggattaattaatatgttgttaaacataaaaacatcctgttaaaccacacaaatttaaaaaaatggttgttaaacttaggataaaactaaaacaataagtaattcgaaacggacggagtaattaaaatgaaggagcatcataggataggcatgctcgttattcagccgtgacttctgagaggttcttcaattcgctctaatttcattcatgcatgaccgaatggctattttctttttaaactaagtttcagatcatggaaaatagaattgtttttcttgtggatgaaaggtgcaaccagctttgtgtctttttctggatctaggtggcccatttgttggaggatcatttcgatcggctttggcttgtggtggtgaagagctgtagatcgatgcggatgtgtactggttactgatgtgaagttctcctattaatgacgtgacatttaagagataaacttatcgctttggcttatttatgctgagcattgaacacttctcgttaataaatttcctggggcattttctatttttcttgatctgtaatactccacccattttaaaatgtagctatttctaaaatttaaacatgtctaaaaaaatatagctattcctaggtcaatgctattatgtcaattataatcctatgaatccaaaaagccttattcgcgaacgtgcacacaattgctagcgaacacttcctgcctgtataacaacaataggttagggttaaggggtggaggggggctaagggggctgggctgtcggaacgtgcctacggcttgcgaacacgctcgcccattagacccaccctatgaaccacctcgcacccactaacctacatattccttcatgtcttttgtgttttaaagaaggcattgtggtatttttacctttattccttactccctcgaaaaacctagaaatagacattttgggatagaaggattatgcactacaccctccatcttttaattgtagttttagtcttagaattcgtccttaaaaatgtgtggttttagagtggtccactatacctctttaatgctactactaatagtaatctttttttctcatttgtagttattgaatcactacaaatcatttatttcggttttagagtagttgtttggaagaaagggatttgctctgtgcatttgattggagaagtacagaatcaccacttgttttctctcttgtccatacgggaaaatttccatgaagttttgatgtagcttcgttttcgatgaaatggtaggaaaagaagagaaaataaatataaaccttaggaatactattcacgaattcctttgttccaaacggcgcaacagtaaactcctccaagaggttgccctttctccatctcctccatcttcccatatgagcttttacttgttgaataaattaagagcttacataagctgattgtcaaataattaaaacaaatcatgagtatattaagaattgatgcactagaccttggattaaaaccacatgactcttgacagttgccttagcactgtcaagtactccatccgtattagaataaatttattttttggcacatcacatttattctaaaataagttaatttttaagtaaccattataccggagcttataaaaatacaagataaatacataagggtatcctaatatatttttgtattgatatatatatatatatatatatatatatatatatatatatatatgtgtgtgtgtgtgtgtgtgtgtgtgtgtgtgtgtgtgtgtgtgtgtgtgtgtgtgtgtgtgtgtgtgtgtgtgtgtgtgtgtgtgtgtgtgtgtgtgatggattaaaaaataaatttattttagtacggaaatcgtactttactagcatccataacatcatcttgtctcaccattaaaagaaaacagcattatgctgtccccgggcctcgcataattgcgttgctcctcccctcctccctcgaaaaccaaaaaaaaaaaataccaccacgaaattatttctccttttcgttttcggaaaaagtacgaattaccccctgaaccacaaaaccgaacattttacaccttcaactatttttaccgagcaaataaccccctgaatcaatccggagtagttttacgcctacgtgtcagtcagtctagtcagtaattatttattaaaaaagtcggtggggaccacctgccagattctctctcctctctatctctttcccctctctctatctcgccgcgttgtgccgaagaactcctacatgcgctcgcccgtcggccatcggtggagctcaggggatgctgctgaagcacgcggcggcggccagcccgtcgagctcgccagccgggcctccacctccttgtcggcataacatcgcagcaagtcgctacgcggtagcggaagtactcccgcacggcggagctcgggcggcggcggcaagcccgtcaagctcgccggccgggcgtcctcctcctcgtcggcacagcagcacgttgtcggccgaagcactcctgcatgcgctcgcctggcggccaacggtggaactcgggcgaaagaggatgcaacgacggcggagccggagctcgcgcgcaggcagtgacgagcccgctgccgctgtcgtgctttctcacactttgtcagccacgcccggaaaatcctaacaacctacttctagctgccaacaaacactcagaagattggatcaaatcagtacacggaggaagacgagattttggtgccgcgtactgctgctgctacttttctggtttgttatcaacataaataggaaaactacatgcagactcgccatcttcttgtgggtgtcgttccaagacgatgagtccggccgccgcgctcgccattttctcgcgcaagtccggcgccggctgccgctcatcgaccatcgccatcttcttgcacaagtccggcgctgaggcccagctcgtgagcttgactggccagcgtccaccggcgcgcgcctcatactcggcctctgccgccaggaggctcgcagccgccggcgcgccgctcgtcctcggcctccgtcggcgcgtgggattcctcgtcggccttcggcgtgagagagatagagagcggtgggagaggaaagagatagagaggagatagaatctggcaggtgggccccactgacttttttaataaaaagtattgctgactagactgccacgtaggcgtaaaatcacttcggattaatttagaaggttatttgtccggtaaaactagttgagagtgtaaaatgtccgattttgtgatttaggggttaattcgatcgcacgatagttcaagtgggtaattcttattttttcctttcgttctcccccgcgatcgagcgacggcgaatccaatccaggacaaaggcacacccacgtgcggatgcctcgccatgccatgccggcgtggggcccactccgccagcgactgcgggtgggcccggataaaggtggggcccacgggtgggggcccgggggtggcacgtgggcgtgctggtgtggtggtggtggtggggccgaaaagctgacggcggcgaggcgactttcccgggctctccgttggccgtcgctgtcgctttatcctcgcttttgggtgtgggccccactcgctgaacgtgaaatggacgcgcagatcagatgtgggcaacgccaaaatatgccacggccacacgtaacccttacacaaatctcctgctctttttttaaaattttttttgaaaggttggttttttcaaaaacttattacgaaactagattgtaagaaaagcttcattaaatactatttttcggttgaagttttttttttgcacaatctagtttcacagtaagttttttttaaaaataaccaatttgtcaaaaagagggggggacacaactctaagcatagtagtggcggagctaaaacgaaatataggtattactatgcttgaagtgcacatatggtgaaaataaataaataaataaaattagcttgggttgttcgacatcccctagatacatatagctccgctcccgatattaggctcttgctccaaatattaggtgtagcataaaaagaaaaagaatactccaaatataggtgaggagtatatgcagaaattggaagacacgggcaaggttcacagtaccaacgaaaaccgatcgaattccgcaaaattttgacgtttcgacacggctcggaatcaagtttcgatttcgaaggttaaacagtagatttagtcaaaattcatcaaaaaccgtgataccgatggagctcaaaatttagtggtcaaccggtaatgtaaaccatggacacgggaaaatatgtcgcagtcgcatacggcaattttccgtattggtgtatttttatgtttgtcgctactactactatattatccatttgcactgcatttcaaagttgggcatcgctttaccacaagcgctcagattgtatacatactaatatatgctactcttagaaaattaagggcttatttagttggtgaaatgaaaatttttgggtgtcacgtcggatgtttgaccagatgtcgaaaggggtcttcggacacgaatgaaaaaactaatttcataacttgtctggaaaccacgagacgaatcttttgagcctaattaaaccatcattagcacatgtaggttactgtagcacttatggctaatcatggactaattaggctcataatattcgtctcgcgatttacatgtaaactgtgcaattagttttttctttttatctatatttaatgctccatacatgtgtctaaagattcgatgtgatgtttttacgaaaagtttttggagaactaaacagggcttaagtaaaactagtcatgtagtctctccttttgcaggacttttgatctagtttaagaacttttgtatatgatttgttagttagcttagcttttaagaaggttttgatatgagttaatgtatttacaaaatattgattggtctaatcaactatagatttagctaaattatgctatatttcttttaaaaaaaggattcactagaagcctcctgtgttttttccctcatagtctttgcccgtatcatgtaattcccatatgtttagccttaccgtttaatccaatgaacattgtttattaaaattctttatccaacagttttcgatgacatgaagtatttaggggctgttcagattgatgtcattttcaaccgtaccatttattgtaaaattatcaaaaaattaactacatttagtttattgtcaggctttgagaaatatataagaaattctgccaaaattttgataatattatcaacttgtcaaaattttaacattgccaaaatttggtaagatttattttagctataatctgaacaaccttagagtatcataatttaaagtgcaatatgaattgaaaaatggaaccccattgaattttgaaagtagcacaattttttttaattgctagagaggctggaagggcaagtcgaggagcaacgcaaacgcaagtgttctcaaaaaattaaaaacgcaaacgcaattagttcgagtagggcccacctacctgccaaaaagttcatgctctgaaattgcctcgtcaaaagcatccccgtgacgtggatccgccagcggctcacgtgaccggctgcagcaggtcgctgcccgttgtcaattcgggcctggttttcgaaaggacaacacaaaattcgggaaaattcgagttcataaatttataatatgattttataatttataacaaattggtattgtaaaattgtaagttcacgacacctataattacgtgtcagatcccttatgatttcatatacttagagcaagtttaacagtttagccaacttctagctctaaatcatttataaccaatgcaatagctaattcatacaatactccctctggttctatattaattgacgttttggacaagattgaggttaaacttttataactttgaccatcaataactttaaaaatatttagtttaaagaaactagaaaaacatatatagatttgtctttcaaaacactataataaaaataaacatgcatttatttattgtatatattataatagaaaaataaggtcaaagttatatcttatagaacgtgtcattgtccaaagcgtcaattaaaataaaactggagggagtagatgcttactacactattaataactggtcacacctatcatacatgtattacgtcttggagtccgtgctacagctgattataaatctgtaacccactgctcttctctctattcatttatctctttaaaatatgtttatagctagcttataatctgctactatacctgctctaatataacacctaatggttaagatttattgtctccatttaaaaatataaacgcttttagctgtgcagtgagtactgagggagtaacatttccctattacctggaaaagaccctcatgcatacacataatcacgcgcctacatcacacacacattaaaccttatgatttgaatgcaaggcatcctataattctatccactagtagtattcaaacttctaaattagactaaagcgaaatctgttttactattcatctgtcagaaaatgtattttataggttgtttagtatatattaaggttaagggaaaatatttctttactcgtctcagtggttaaaatttaggtaaattttgtaacaagatattgtggctgcgcggttttagatccgcgcaaagtgatttttaaagaaaggtaatctttaaagttagatatttgctggtgaacaccgtatccattaaaacaataattttcaggtgaggaagagagagtaatcacgtgaaacgtcaaaaattctcatgggcccacatgtcagctctcctatcactcttcctaaagaacttaacggaaagccgctaacgaaatctgttaggtgatggcatttctatgacaaattaccttgtacgataatattttataaaattcacgcttatcgatgatattttgtgaaatcgggtgtttgtcaatgacattatttgtattttctcaaaagagaaaaaaaatctttttagagttgaccggtgcagccggtctccctcccataccctgcaggctgcagcagcaatcaatcagaaagcgcgactcagctagtactacttagagcaaggataatggtgagctataaactagctaaatgcttatgtggaagagagagataaataaaagtggagagtgttgactcttacgcaagagttagctacacacaagctccaagaaatatacattaaatttatagagagataaagagagaggatgaaaaaaataaagctaaccttacagctaacattatatatgttagctttaacattaacttataataagtagtgggctgtactactaaacttgctcttagggtggatagtgagccagctcggctcggtaaagctcgttaggataacgagttggctcggctcgttaggaccggctcgttatcctaacgagctaaaaacccggctcggctcgtttaaaagctctagctagctcgttaagctcgcgagccaaaccatacaaaaactgcctctagccctcagcaacagccaacagcaagcatgcataatgatagtacgataaattgttacatgaaaatatcaaaggaggaggccgagcacgaggagcagcttcgacgccgacgagagggagccgaaggtcgacgtcgtggcgacgccgtgggagcggcatggggagaggaaggcgctgcagaggcctgggttaccggcgaatgacgtggcgttgaagtaggcgaactggccggtcgctgggacctcgccggagagattgttgtcggagaaatcgacggccgttaggctctgcattccggcgcgttgtgggacagattgagatagttgaggattcgtagcccggcggcaccgatggccatggggttggcggcgttgagttccttcggtggacggtggctgaggagtggccggatgcggcggcggcgccgctccttcggtggcgtggcggcggcgcttggcggtggtggctggctggcggcggcggcgcttggcggtggcgggcagcgagctggcggctggcgggtggtggtggtggctggcggcggggaggatgagaacgagagaaggggatggatcgggaatcggccacgccagatcgggatcgaggtgtcattagggttttcttggctgccgagttgggctcttgggcctccattctctaccaaaatccaattccaaaggcccatagctcatatgccctggctcgtgagcggctcgcgagtcagctcgattcgttaggaaaatcaaacgagccgaaccgagccgagcttggtcacgagcagagctagctaacgagccacgagcttcctccatccccgagcttcct

SEQ ID NO: 5602 - DNA, 34375 bp, Oryza sativa
  unsure (1)..(34375): unsure at all n locations
ctatccaacccggccccgccccgccctgttgccatccctaatcaaaactcttatgaatgcaaactcttatgaccagtttgcagttgaccgctactacgtacctcctgcagccgctgtgaaccgcgtcgaagccacggaggtcatgccaacgagcacatccgttagttgaagtttactaccgtagatgttggtatattattttaatataaactcgaccaaaatgtgagaagtttatatacagaagatttttcccggcgaggacccatgtagattgcagacggaccgtaaaggcaggcctcttaacatgttcgcttgtgaaaataagactattttcacatgcgggcctcttaaataatccgcatacgaaaatattcatctgttcccactctttttttatttctcacctcctttctcccttcactaaggcccgttcgatccctaccaatgttgtcaggacacccgaaaatcatattgtccagtgtttattgtgatcaccacataatttcgggagagtgggatccatacatgtataatagccactcaagcctcaatgtgcccgatgatcacaattaaacaccattcaatataatctgcagagtgtcgaatattgaacaaaagagagactgctgggacttagcgtgccagtcaacttcagcatgagatatgtccgtcaaaccacacgaaggcggtgaccggatgtttacacatcccagaagacttgacaaattgctaagctctacagcatctcgtttgttcaacactcatactcatgtctagctagtcctcaacaaaagactaactaaacactttcattaaagcattggcatagagtaataaggcactcaaaagattaactttagattacaactaaaattggatatacgtaggccaaccggctaaataaatagtggtttgcacggaagcttatctacccaaaacccttaagcaatccgactaagggtagactcttattgaaccatcctgagaagaacaacggaactcgtggcacacaactaatcctgcaaaacaacacgcgaaacaagaaaaatcattagtacatgattaattaaggattaactagtataaaattgaaaaatagaattatttgattctttaaacaacttttacataaaaactttttaccaaaaatatatcatttagcagtttgaaaagcgtgctaacgaaaaacgaggaagttgaagtttgaagttgagaaaaggaactaggcctaagtcctcatctcccctctcctccctcgctctcccggtccccactgctctcccatctcctctactcctctgccctctcctccgacggcgggttttggcgacgggggtagcggcgaagggtggaagcgttaggcgagggctcgggcgacggtggtggagcatgagggcagcgggcgtggactctggcagtggcggacgagtgggacggcgacgacgggtgagggccacggcggggcgagcgtgggcgacagcagtgacgatggccctcccccgcacgggatctgtcagtcgccgccctccttcatcctcatccggcggaagccgcccttcccacccctatccggtggcggcagcacctcccgcgtggacccgtcggcggtggcaatggcgatggtaggacgacactgacggcgacggcggcggcggttggagaacgaggaggatggcagcggtgactggaggacgaggatgacagtggcggcggcgacaagatgattctagggatagggtttcagttattcaatttttgaaatttttatttttttcgtgttattttcttcacatgcggttgcgctagctaaatataaaaatctgattttcgtatacctttggatgcatgtgagccacctgtccgtatgtaaaattcgcttttaaccatatggaaaaattgaatctgtatatatatgtgctaggtagtactctctacattccaaattaatctacatatattttttttatgttatttctaattgatttacatatctgtgttcatcattaagtctattcgttatttgtgcattggagtaaatggatattgatgcatgcatccatgcacacaagtatttatacccatatgcaatatcttgatttgctattggctactccctccggttttattttaattgacgctttggacaatgacacgctttactagatatacctttgaccttatttctctattataatatatacaataaataaataaatgtatgtttacttttattatagtgttttgaaagacaaatctataaatttttttatagtttctttaaactaaatacttttaaagttatcgatggtcaaggttataaaagtttaacgtcaaccttgtccaaaacgtcaattaatatagacccagagggagtaggaaatagtagggatgatgcatgcatcgagtttattgctagagtaaatatagtatgagagagttattagttttttttagtcttggtgtacatatgaaatatgtaaattaatttggaatggagggagtagtactgtacccgttcgtctcatagaaattcaatcctaaccatgaaacttcacaatacatctacgggatcatcggaaggcagccatgggcatagtgacacgtggagcacatccagtggcatatatggcacatccagtacgtacttcgcgtcagcaaactaagagaataatagtataactcacttcctactattagcttattttaaagccaacatatataatagattagttatatggttggctataattttcatcttctctctgtatctctcacttatacatttaatgtatttgtcttagattttgtgataagctagctcttacatgagaaccaacacccttgatttttcactacctctctcctccacctaagtttatagtaggcttatagctcactattagagcaaggataatagtagagctcacttcttactattagcccatcttaaagccaacatatataatggattagctataaggttggctataattttctcctcctctctctatctctcacctatataattaatgtatttacctaggagcttgtgttaagctagctcttgcgtgagaactaatatccttgattttttttgttatctctctcctccatataagcttatagtaagcttatagctcactattatagttgctcttatacttgctctaatcgaacgtggggcccaccaccatgccacacacctaacatgcggcctagtaggcccatactcccagcacgtgtaaccggccaatctcctcacggacctcaccgttgcactttctccggacaaaaaaaaacctaataagagatgatatctccaaatacaacaaatctaaataattctttattttttacgacctttctaagttaagttttttttaacggaatgagtatgtttgtgttggacgatgtctagggctgtaaagaaaaatataaataattaagctcgagacttgcaatctgcttgagctcaactcgtcataggcttaattcgaacttagctcgagcctatatcaaaactcgcgagtttttattaaggtgagctcctatcaaacctaatagtatatattttttattacttattttataaattagtagatcaaatatactatttatatgtatcatgcacaaaatagctcgcattagggtcatataatcttactagaaaaaatacccgtgcgttgcaacaggtaaaggctattttagtcttattattgttatacgtacggtttagctagggtgaaatttactctggaaattcgctttaatttttttttagaaaaccatgggctgcaattaggagtccgattttcgtctcaagttagcatgagagttttttaaaagatatttcttatatgactccttttctatttccaaaaacaaacaaacataaaaactgactcaaacacgaatctatatttccaaaagtgaacgaaattaaaaactgacaaacagggatgacgtaccaaaataccggcaaaaacatcttcgatttttataatagtagagatatagaaaaaatgcctatgcgttgcaacggatgaatattattttaatattattattattattgttattattattaggtttagttaaggtggaattcattgtaggaattcgcttggatttttttttcataaaatcatgagttgtatttaggagtccgatcatttcaagttagcatgcaagtttttttaaagagattttttatatgatttcttctatatttttaaaaacgaacgaacttaaaacccgactcaaatacatatacatatttccaaaagcgaacgaaaattaaaaaccgactcatatacgaatgacgtaccaaaataccagaaaattaaaacaccttcaatttttatagtagttgatatttcattttctcatttattaatatgattaaatagaaattagttactctctttgtcccaaaatatatgaatctaggacaggatggaatattttttttacgaatctggatagttagctcgtccagattcgtggtagtagaaaatgttccatctgattataaattattatattttgggacggatagagtattttaattgggagattatattcttaaaatgttagtatactatttatgagtcagctcgagcatgtgtcaacctcgtcggcacaccctaacaaacgtccctggtgcatgcgcgccatcgctctatataagccaagctcctgtactagttcatcagtgtagttcagtcagttccacacctctccttcctttaatttctctctgctcgccggagacagactagcttagctagtaggagagggaggaactaatggccgccggagacaaggccggcggcgacgacgctgcggcggcggcggcggcgccattgctggtgtcggcggcggggaggcggcggcggtgccccgggtgcctgacggaggagaggtgcaaggccgacgccggcatcccctacctcaacttcttctacatctgggtcgtctgcctctgctcctgtaagaacccaagcttgagctagctactatacctcttctttctttttttattttttttgtcatggtttcatccattttgccatgcatacgatcagacacaactcttaattactccttaatccgctcttattatcttttgaaaaaaacattttgattaatttacttgcgttttgttttagatctattagttgttggagagtacgtacgttcaaagtggcaccttctaggcgcacgctcacttggccttcgatagggttcaatttttacccacatctcatatgtaatcaatacaaaatcaaaatctaaaatacttagactttatcaaatcctaaatttccttttttttacattttcaatatatttatcttatatttttataaacttcaatgtaatggttgtttaaagtaaatttactttaaggtaaataggatgagtcaaagttaaacttacttggagactccacgtgctatcttcacttggactaaaatatcaagtatactagtactttccactagtataactacctgatcttattcccttcactttgcctggctaaagcatctgtttattagtctcttgttcttcttctttcatgctgatgcaccatgcatccagaacgagcagttgaaaagtcatttaactggaggactaatttcttaagttaatcgcccaatttactgtgcagtaaaaacgtgccattgctttaaccatgggggttcaaagaagttaaagcagacgtaactacccagacgctcagtgaataaattaagtaattaaccgtggttaatcaggtcacaagaaaacgtactactagtagtagtgccactggccggaaaggaatcattttcacttgtcacggttccagacaacggggctcattttttcgcttatgttcctacttattagccaaaatttaaaattttaaccttaaatttagaattgattttagggttttttttaatcgaagtttatttttcaacctttatttttatttttagatcgctaagaacacgtatataaagttttattcacaaattattttttatttgcaaatataccgaaatgatgggtctatctaatggggccccatggtcagtacagtatacagtactccctctgtaagaaaaacccaatctaaagttgtgatctaaatctagataaatgctagcttatctagatttattattctaaaatatatctttaattttttttctggacgaagagaatagtcctaaaggacatgagaagagtatttattgcacggagatgtttcagcagatgtagaatgtcagcatgtgagggcagcaggtgcggtgttgagagtccattcaaacttaagccaccaaagcgtatgcatccaattcccgctccaaattaaggcaaagttctttccagacgataagagagagaatatcggcttttgtgaaaatatttgaagagtacagacgaatgataaattagttattctaaatttaaaaggtaatttaaactattaaaaacgttaattgaatatatatgaaaaaaatatagaaaattgcatggtttagaatcttgtgagatgcatatatacgtgataatctataatctgtaagagaaaaaatacagagatttggcttgtttgtttcataggaaatatggaagaaaaaccattcctacaggaaaaatcactgtttatccattcgttttgtaggattatagcaaaggaaaagcataggaagaattcctttgtatgtgattcctatggaattttgtaggaaaattaacatccacttggacctcttttttctattcctacgcataggatcaaggcaaatcactcgtttcattatgtatttgaatctaagttacacaaattagagtattcaaatcttggttgtggtaacttaatacaaagattcctgtatttttctatctaagagttattcctatgattttcctatcctaagttttgcacatacattcctatgttattcctacgtttttccttttcctgtgatttgaaaatatgaaccgaataggcccttaataagtccaccatgggaatggaacagttccacttggtcgctcattctcccacccttttccttggaccatggttgcgatgctagcataaaggttgaaagaaacacatctatatcaatatcagattgacgtgacattttgatatgatcagtttgctctactactctgtcgaaactctcttatgaccgtaaatccagtgttaaatttttagtgatattgcatctacttattttgcatcggtcatataataaacactacggagtatatgctagatacaaacacatcttttccatttgtaaaaatggaaaaaaaattgagtgccaaaactcaggcattgtacggaaatttgctagagcaatagagcatcactaaaaaaaaacagaaatatgctgctcttgggaagggggaaataacagaattttacacagtgctgtatatgtgctgcacaacacaaatacacaaattctatgcaagttgagataaggtgattccagtcgagggaaatgcaaagcattgcacctcatccacacgtgaatacgtacgttttctgggagctatatctggcacacagcagggctaagctttccctaccgtgcgaagcttcctggaagtttacctgcctgtggccctggcagtccctcgtcgctaccgccctgcaaaaaagatctgcgatttttcagtgaaagcgatggctcatggccatcgacggtagtactatttcgttgcatactcaacacccccccccctctctctctctctctcttaaaaaaaccaacctataacctaaaaccaagtatgacacattctattactacgaatctagacatacctctgtccagattcatcgtactagaatatgtcatattcggttctaaatttgttttttcgggatggagggagtttgcatgaaattctcgtaccagataacttgactacttgaggtctattccctcccttaaaaaaaacatattctgatatttctaacaatacatctgaaagcatagtacaccatgtcacatcgaacgtttgaataattacatgaagtattaaatatagtttaaaaaaataactatttgcacatattacgactaagttacgagacgaatcttttcaacctaattgctccataatttgaaaatgtggtgctacaataaacatgtgctaatgacgaattaattaggcttcgtcacgcggtttactgacggattctgtaattagttttttattagtgcccgaacactctatgcgacaccttatataatatccgatgtgatacgccaaaactttacacccctgaatctaaacaccccctaatttagaatggaatatgatgttttctaatataataaattgttagaaaacgtcacgtctcattttatgggatggatgcagtgtgttcagattaatcggcaggattgtattttttaatgacataatgtgtaatgtgtagatatctactttcaaaacacggtattttcattttatttgcatggggaattaattaaaccattggataccgtttgtaaaagccttgtgaaatttccctgttttttaactaagttttctgtgatgaaccatataatttctcacattttaggataaattttaaatacaatatataggttgttccatcctccagattgataacacttgtttttttagaaggatacgatctctaaaaataattttgatcactatttttttttattataatacatatacaaatatcaataaatatatgattttattgaagtacttttagactaatctatatatacacatggcctccatatttctaagacaaatattttaaacattattcataatcatatatttcaaaacttaacattagcgttgcacaaaaccacaagtaatattaaactggatgaagtatatttagtacggagcgtgcctcggatttaacatagacccacgtagttgctaactccgtcggtaaaggtccattactagtctattaggcaagagaaggcaagggaattgagagtttggacaagggaattggtggaagaattggtcacccaagttttttttttactctgtctcttgtttgatagtaaagatgatagttatgtgagtacggatgggaattgaattttaactaataatgtacaccttagatttatctgtcgtgcctagaagaaaattccccttccgattatcacttatccttattcagatactagtaatcgtgcacgtgcaatgcatgtttccaacatataaaaacactcaaaatttattgcattttcctgcaatatatgtcacccaaaacacacaaacatactaaaagtttaagaactatttctactataatgtaatttgacatactacgttaaacatccatttaaacacaaaaaatgcaaagcagctaacaatacaaaatatataatttgtcataccttaataaacacttgaaaaatatcaaagcaagatatttatctttatggcattgaaatgaactccaccatctacaatatggctatatgggatattgtttgaccatttttttttactccttgcctcttgtttggtagtaaagatgacagttatgtgagtattgatgggaattgaattttaagcaataatgtacatcttagatttatctgtcatacctagaagaaaattgccctttccgattatcacttatccttatttagatattgaaaatgtaaaagtttgctcctaaactcctctttccgaattccgatcctttttaaaactttcacgtctaccaactaaacaatatattttaacagccctatctctctttaacaatttccccaattaaacgtgcctttgattcaaaatacgttttacataaacggacacgtattcagcaagtacggtttttaattagcgagatcacgggaccaggtgcttgcagaaagtcccacaagtagacgtggctgtcagtgtgtcacccatgcggaggtccatggggtccctactccccaaggatggctcactgggctttaattaagagtgctcctagtcctatagcacattcgacacattatatggaaaaagaaattcactctaactacaatgcttgtaatgtaaatacaattacagtataagtatggtgtaaatttgttttgatatcaaaacttgtgctacctcagtggtccaaaaattgttttttttcttccaaaggctatattgtaagttttctagcaattccattaattaatagtagaatgaaataatatagctattagaaaatgtattatgtcccaaaaaccattataagttttctagcaattccattaatcaatggtactatatactatataattagaaaatatattgtggatgatatatggtatgttgaggggtgcgtctcacaatatgatggagacttgacctcagagtttacaatacgtaccgttctgttgttgtggtaaccacctgaggtaatcttcttagttttttaaaacatcagtttttaaactgttgtaaccataatattagggcccatttgatttggatgaaaaatatagaaattttagaggattttaatcctacaggaaaaattcctatgaatgcctttaaatcaaaggattgaatcctatccaatcctttaaaacttctatcgaatggacaatcctatagagattttagaggaaacttagcaaaagctcaaagctcttggaaaatttcctttgagtctatctctctcatcttattcctatgtttttcctacggtccaatcaaatggtcattcctgtgtttttgcagtcctctattttacacttccatcccttattagaatctggtgtttttcatatttctttattttctttttcattcatgcgattcaaaagagacttattggacaacgataacctcaccgaaacggtaagaaaaaccacgcatactatgagcggaggaagtaattgtctacagacatctatggctctaggcccacatgcacattactgtctgtgcagtacagctgcaggtgacagtcccgtccatcaacaggtcccgaacttctaaggccatgtacaacgcgtgaccttggcatgtggtttcaaacctccacgtcggacgcccgcacccatggcagtggggaccgtggctctgcaggccgaatccgcgcttgcagaggaaccactcgaagcgccgcgcctgggctcgggagccgcgaagccacaacccgaggccacgcgttggcggagccagagccccatgcgtcgcctcgtctggtcggtcaccgtggtagtcgtcgccgctcaccgtcgccaccgtcgccaccgccgctccccgtcaccgccagatgcgaagaggagcaccgccgacgccaccgttgctcctcgcttcctccccgccgccagatgcgaagaggagcaccgccaccggatccggcgagcccgtgcccggatctggcgaccttgggcgtggggcggcggtggaagaagtgggatgcggcggaggagggtgtgggcgtggcggaggaggaggagaggatggcgcggggaagagcgcggcagttgagaggaggaggaggcggcgttgtcgtggcgcacaagaggaggagcggcgcacgagaggaggagcggcgctgcggcggctttgagaggaggagcggaggcgacgagagaggaggcgttagagaggaagaggataaggcagagccggttggtagaagagaaaataaaggggagaggattggagagactgacggtgggtccatatatagattaggggtatctatacatttctttttgttgttagaaggactaaaatagttaattttataataacaaatattatagggactaacacatgaatagataggggctgaaacacaaaatatactctacagtggtctccattgtagacattgtggtttttgtgtggccttatcctatgtggcaacctgagaccacagttgcttgtggctaccattgtacatgccctaaggtgtctgcatccagcatcctatgtgatcttatttctttctcattatgctctcatgaaatgacattcattacgaagcgtgatatttgaccttagtgcccctttaaatcacaagactaagaaaacatagaaatagaaaaaaaaaatgtaaaattttgatataaatgtaagtgtaaaacagaggattgcaaaacacaggaaaaacacaggaaaaactgtttgattagaccgcaggaaaaatacaggcattaaaggagagataaagactcagcagaaagtttccatgaggtagatcatcatggtttacctccaaaccttgcatggcattagacatttcatagtaattgagacgttttctaatactactaatttggacatgctgcctgtctagattcgtagtactgggaaacgtctcatccagttctagattcttatatattgagatggagggagtaataaattaggccgaaaaaaataccgcaatgaccggctattttctttcttttttttagtccaaagtcgaaaacaaatcagagtcgaattggcagtcgtttaaatagcctaacggttcgtacataatttcacaaactacaaatatattgatcaaactaccttaaaactacatatttaaggtgatgtatcacaaaactacaaatttaacactaaatttttatagtgttcctcagccaattgttggtgttttttatttttaatatcattattaccatgtatgccacaagctagaataatcaagaataatatttttctctctttacgttcttaatataactataattgtgtgtgtgagagagagagagagaggagcaatatgcacacttgtacttggcagagaagccgtttcaaaggagagatttaagccgaccctctaatgccactgcctaaacttagccggacaaaattaattaagacaaaacacccaaaaaaagtgatctcaacgctttagcagatcaatgcttgcaattaaacccccattgcttacttcttggcgaaagagaggagaatgcccggacattctcacaaaccaagcatcatcttgatgtggattcagacaactaaacctgcaaggagaagaggagcaaacgtccttgcccgccattgcggcgatgaccggaggcggcgatgccgatcgcaatgcgccgttgctcgccggcggcaggaaggtgtaccatgaacgctgccccgggtgcaggcagcagaggaaggtgcaggccaatgacaggcttccctacctgggtttcctctacacttggatcgcttgcttgtgtgccggtatggtatgcaccatctttgagaggatagatgtttggttaggatgcaggtgttgatctgattttcatcttgtggatcagctatttggttgtcacttgtcacaagttgtggaatgtagaaatggcctttgcaattgttaagattgtgatagtggtgttttgatgatttatataatatttaggagtagacgatgaatcgatgatcttcatgatattgcgtgtttcgacaaactggtagatcttatcagattcagtagtctcattcttttgtcaaaaatagacatacttttatttgtttcggttcagttgtatcaaatattattttatctctattcctgaaaaaagaaatcccattttagctatagttgactaataccatggtcttttgcctttccagcgttgccaattcagtcgttgtttccgtatctgtacttcatggtaagaagatatgctttgaagttgaactattatcatgataaacatatagagagatcaaatatgtgaatttccatgtagtacatggtgattgacatgtattcaattttgttatgatgccacagatcagggacttgaaagtcgcaaaggaagagcaagatattgggttctatgccggttttgtcggtgagcactgtctcctctcatggttttgacaacaccactgagaacattatatgggcaagagttgaaccagatgtcttgtgttgattaatctaccattatcatagaatacttaatagttttggtgttcatttttagtccactatgattattgtggattacttgttaccgactaaacggtaatttctctgtttaaggggctacttatttccttggaagaactatcagtgcagtgccatggggcatttttgctgacaaatatgggaggaagccctgcattgtgatcagtatcctctcagtgtatgaaacactcagttagactatttaaatcatacttgatcccattcgactggactgaagtaaatcttgttttaccatttccaggattgtgtttaacacactctttggcctcagcacgacttactggatggcaattgttaccaggggattacttggattactctgtggtatactaggaccaatcaaggtaaatttacagtttgatggctgatgctaagaacatgacactggattgttgcgtactcatgttcagcatcatgtattgtccaggcctatgcttcagaggtctgcaggaaggagcaccaagctcttggaatttcccttgtaagaagagttatactcttgttttgcatttcaagcttcttgtttatctctataggatgaggatttaaaatttttactgattatattttagtactggctacttattggtcgtattatatgttataggtcacatcctcgcgagcaatagctctggttgttggaccagctattggaggatttctttcgcaggtgagcttaagtacactttgatgatgaaaccaagttaaactttgtatagttactaaaatgccgttcgccatgccttacttcatcagagctgacttcttgtgcgagtggaagagaaaaagaaacataaatctgacaatttttttcctaaaaactatttagtttcatccttttaatgaaaacagtgctaatggaatcaagtttaactaaattcgcaacctatgaagattgctctgaatctgttggctaatattgtgcattttctatcttgtatcagcctgcaaagaaatacccaaatcttttctctgaagaatcggtatttgggaggtaaattattaatcatcattcattctgttcctcagaaataaatctttgtttatatacttgaagaacagaagataagcctatccaatgtacttctaatttcaggtttccctactttctcccttgcttcgtcatatcggtactagcagcaggagcatgtgttgcgtgtatttggcttccggtacgccactctctccccctaccattctttctttgaaatgctgaaatgcatgtaaaaaaatatactacctcctttctcaaaaggtcgacatcctagaaagtgtgcaataaaatctcaaactcttaaatcactaatatattaaaaaaatattaagatttgatccgtgaaaatggcattaagatttggcattaaaaatatggttatatttttttaataatttttataagtttataattagaaaaaacaataatgaggcatgtgtattggagattatgttgatgaccaaaacgacaagtaaaaacaatagaggtagtattaataaagtatctactgtaatatgtggagaaaagttacttaacattagccccttgttcttaggaaaccctgcacatgcaccatgatgacaaagaagtcattgatgcactagaggcacaagatgcgacttcagacttaggagaaacaactaaagaatcaggatcagggagaatgggccatacaaagagtttgctgaagaactggcagctgatgtcagcaattaccctctactgtgtcttctctctccatgatacagcttatcttgaggtaatccctatattctgaattatagattatcgcagtaataagaagggcgaaggtaggaagtaaaatgagtggaggtcagggtgctaggcaaggccccaactcaataatactctagattcacccctgggttaatacattgagaaacagtctagtttgttaagatgttgatatgccattgtattcctcctatagagaagttacattagcacaaacagcgaacttaggatgttaatgtactatgtaacttatattttcagatattttcactctgggctgtgagcagcagaaaataccggggcctgagttttacatcccaggatgttggtatcgtgctagctatttccggtatgtgatgttttttcaagtttttatgcatgatcaatacatacaagaaaccatatctcaaaaacattttttttaaagtaatcttcaaaataaattaaatcagcagcatacttagtatacctgtttaccactaatgtgtagctatcattgccttcaaaattcctttagctaatgacaatttcgtctgaatttgcaggttttggtgttttggtgtaccaacttgcgatttatccgcttcttgctaaatatgttgggccaatcaagccattccgttatgcagcggtagggagatgcatgttttgtcttaagatgattcttctgaaaattgaatctttttttttagtaccaatgcatgtttgatttgcaggtcttgtctatacttctcctttcaacatatccattcatggctaacctgtatggtctggagctcaaagtactcatcaacattgcttcgcttttgaaaaatatgttcgctgtaagcaattcctctttgcgatatatatcctgccctataatagggaaaattgcatttttatttgtaccaacataaaaatccatgtttttgattcaagcttcccaaattcagtgatgttgggcttgtttagtttgcaaccataccaaaatattggtaacgccaaatcatgggcgagtttttgctaatgccaacattttaacattgccaaaattactattcaaaatgtcaatattttggtatggcaagttttggcttcaaaccaaaccagcatgttgttccttttttttttttgcctcctacagagaaaaggattacaaattaaaaagttaattgtattcttagataaaacgagcttaatcgttttacaggaatttatcgtttaaagatttgtaatgcttgttttgaatggtacaggctacaattactattgcatgcaacatcctgcaaaacactgcagtggtatgtatcagaatcaataggacatttcttttttacttcaatgcatttcctcgttgtcataatcatgttgttatgctcttttttcttaactgttggaacatgcaaagacgcaagaacaaagaggggttgcaaatggaatctctgtcactctgatgtcaatcttcaaagccgtagctccagcagcagctggaattttgtaagttccttttgtggttagaagttcatgtttcttctctctttttttttccctcttccaagaataaaaaggagatgaccaatcaatcaatctctttgcttgatgcaggttttcatgggcgcaaaagcacattactgggttgttcttaccaggtaaaacaacaaggctcttccaagccatgataatttgcattactgttgatatagtgtcatcatatcactctctctgtcctagaaaaaaccaacttctagatatgaatctgaacatagatagaaaaatcaactttttactagacgttggttttttctgggatggagtacatattatcaggtgtgattagttacctgactcataatggtcatgatacatccaggtgagcagatcctgttcctgatgctgaacatggtgtcagtgattgggttcatcctgacattcaagccatttttcgccttgccggatatgcgatgatgtgtagttaggtaacaaaaaggccagaatttatcagacttcagcctggattctaacctgcaagaggaattcatgtactgtaccgcgtgtaatgttcagttgtgtaatcagtttggtggtatctttgatttctgtctgaactccgaaccattggatggtcgaggcatatgataaacagctaacgggatcttgtttcatctaattacctagctagcagaatcgttgttacattaatcgactgaagcaatatgactgccaaattaaacatgctcaaattccttccaagacttacggaatcaagaacattgtatttcatatatagtgacagtaaaatatgtaagaacatatttaaagatcatgaccaaaactcggggatactgatgagctcacagtaagacgagagaatcaagtgttcatcacattgtcaatatgagaatatgatcgtatatcacccaaattaatattggtagaatgaatatagcacaagcatggatggttttgattaacaacagaatggctacacccttgaaaagttgaaacaaacatagagtaattgaataaacaaaatcacaaagatcagagccatttttcacaaacagaaaaatcacaaacaaacagaaagcattgtctacagcataggatgtctctgaatatcaagaatttcggtttggaacatatctatccccacaaaattacatctgaacataaaattaataaagataattttagcctctgacagtatggctactggaactccccctgtgttgatccaaatgatgcttcaacttacttggccatcatgactttaacgaattcatcgtagttgatctgcccatcaccatcaacatcggcctcacggatcatctcttcaacctcctcatctgtcagcttctcaccaaggttagtcatgacgtgacgcaattcagcagcagagataaaaccattttggtccttgtcgaacacacggaacgcctccttgagctcttcctcagaatcagtatctttcatcttgcgggccatcaggttgagaaattcagggaaatcgattgttccattgccgtcagcatccacctcattgatcatgtcttgtagttctgcctcagttgggttctgccccagcgaacgcatgacagttcccaactccttagtagtaatacaacctggaagaaaataactttatctatgtcactcaaagtctaaaaatcgttcaactcgaggtgtcagtgtatcactacatagtattcacagtactgctttagatcatcaaggcttgtcgctgtttacaaactgataaaagaaagagaaacaagaccaaaagctgagcactacttgaaatgaacagaatcgaagtgttatctaaaattgcttaattattactccctgatcatatatgtaaagattatcgaaaacagtagtagctcatgttagtgctaattgtaaacttcttatcctctaccaccacagatcttctgtagaaaatccaagaaaaacaccaggacagtgtcgtcgtattatcatacgagatgactaacccaaattactacactattgcaatgggaatgaaaacgaggactcgtgagaattatcccatctaaacctaatcaagcacgaatcattacgaacaggcactagccagtgccccaaatctcaaaaaggccagaaaattacgctggatcacgcgattgaccgaccagcatctactcccaaaccgacgagcaacgcctatattatcaaaagatccggagatttcagagcagctaaacgcatcccaaccggatccctacagcaaaccaagaatcgggacacggagacgacggatcagggcgttcgatttaattaacccccaagaaaaagatcgccgatctcgcttcggacagcctatcgatctggttcccgcaacaaaattacgagagggagggagggaggtgaggcaggggttaccgtcgccgtccttgtcgaagaggctgaaggcctccttgaactcggcgatctggtcgtcggtgagctggtccgccattggcgacgcaggcgcgcgcgagcgagagagagaggaaggagaggggagtcgtgggggaggagagcttgcccgagttggagacttgcagtgtgggtaggcttacctccttttttattgcagagataactcacgatttctactgttttttctaagactagtgctaggttaggcttccaacttggcacgttcttccaatggtttaggttgagggaattgcctgtaggaggaacggttcggtactaccttctattctatagttatcgatccaagttatatagaaaaaataatgcttaaaaaaattactgtaatacctatatttaaggggtaggatagagaaaattttgaattgatgtgataaaaggtacttctaaactcctttttttttgaaaactttttaatccaaaagcggcctctattttggaatgggaatggacagagtacatgcactagctaggtctcaaatactatgtattatgtgtatgtggtctcaagtaggatcctaaacaatcatagtaaatccaaaacgaaaatgatctggtgtcccaaacataatagtatatcacaataaaactatctagtacttgacatatcaagcaatttatatttaatagtgatttgtagggtttgttattgtagagctaaatgttgccttagcaaaagtttggtagtacatgtttatcaagcttcaagcattcatcctccaaactctaccatttgtttatcaattgctttcaaatgaattgtcaaattagaaaccctatgttttgggggaaaactgattaaatgaaatccctaattaagaaactgagataaagatagctattataaataaattgaaactacattcaatttgaatgcttgaaacttgtttctctgcataagaaatagctagatgttgtcgtcgacataaaatatagtgtaaactgggtggccaaggtgggaggagggtgctaggggtctataggatccttcgctgagattgatcacgttgtcacttaaagtggtgtgttctctttgcaaattgagagcttgctggtcagtggtgtaggaaagaaaaggagactccttgccttcatcttcttgcctagacgaagaagaagagaactcgatcgagcaggcatcttttgttctttagtgcgtgtctggccattctaggctacttgatgggctttttcattctgcagtctgatagcacacgatttgctctaactattgggctagggggtgacgtcatttctcctatatgggctttagtaattaaaaacaaaaattagcatgtgtcatgtgcatcagacgaggtcaacaagtccatgtacacattgtctagagcaacttagggcaagaacaatgcaagatatgctttagctagacctcaacaagatgtagggccaatacactgatcgaacagacatatactccataatgtatgtggtctcaagtagggtccatgcacaagctacatagcaacttaaaacgagcagtgcaaagacatgctctagccaaacctcaagtgtcatgcaggagcaagacattaaatagacacatactccacagtccacactacatgtggtcttagatagggtccatacataggattcaaagcgaatcccacctaatgatctgccccgggtgagccatgaaacgtgtaggctccatagagatacacgactcctcactgagtgcgaacataggggtggaagtccaccctagcaccgcggggatgttaggaaaaaagcccactgtgtatagccttaagaagaaattctacttttgattctaaacattgtcatcggcaaacatagattttataggacagatatcatggcccgagaagggaagatattgtttagatctaaaatcatgattttttttcttagacaaagttttgaagtttgaccaagtttgtagaaaaatatactaatatttttaatacaaaataaatatactatcaaaatatatttaatgttaaatttgatgaaactaatttggtgttcaaaatgttactaattttctctataaacttgatcacacctaaaaaattgactaagaaaaaaaatcaaacaacttaaatatgaaatgaagggagtaattcagaagctttcccccgattcatctgaaaattcatgtgtccgattaatcggacaacgagggagcagcatagacaagcagcagtagtttagtttgatttgaaagtgattggttggcaacactatcagaactcggcaacggcacaatattagcagtatgtcttgtacctggtgcatattttacacggaaccaaacattctctctaccataccaaaatttgctagtgcggcaatgccaacaaaaccaaaagtttcgagccattgacgctagtatagtttcagaggggttggaatttgcagatagattcagttcaggacaaaatcccagcatcttcacatggcgcgcaaaagagtaccatgtttaatacacgagactgtttttttctttacctatccaagagcctatctcaaatgtaatgcacgcaccaaacactcgctgcatttacccaccacaacaaaacgtgcaagcaggtgccaagcgcagtgcagcccaggcatcctgctatctctctcacccaactctgttggacaccgtttggtagatgttcttcagctgagtattccacttgtctatggcttggtatttcctcattcccttcgacctgcgaaatgcgaatcggatcaccttcagaaaagcaatcgcatagatagaacaatgtgatggaaaaagcagggggaatacgcacctgtcaccacgttctagtaacttgttcacctgatctatgtggccctggattcggttatccagaatgagtgagaccaagagctgctcgacatccttttctgggaaatttagctcctacatgcaaaacattgacagaacaatcgatgacaaggcatcttgtacactgtacgaaagcaaatttcacaaaaaactagacctccgtgaggaacagcatagggtctgcacgattaagcgcacatgatttcaattgaactggaatcacctagtttgggcacacgacagaaaaagatcaagcttcaaactatatttcttgcaacttcctaaaatagcacgagtatataccaaagttccatgttactaataattttcatgcaccatttgttatcacaagatattgtcatattcttctggtattgagcaaatgcacattatctggtgttggacaaagaacagattatctagacaaaatactaatctttagctcacatcaatttctgtcagcaaagattatcatgaacatttaagagagcgagtattcacctgtgaaatgaatggaatcctgattctagtatatggcttaataagcttgagcagaacttgagttctgatgttcttcaataggtcctcaatataattacggatgaaaggatcgtccattattgttcttctgttgctctgaattttgtttgtaacaatcacatcagaaatccagaatcaattaacagaataactagcttagaattgctgcagaaaatagcaagatggataatgttcaataacactgacctttagaatcttttcaaattccatgatgtcattcttctgatatgctgcaatcaagtttgtcatggcgaggatctcaggatcatttttgtacctgaaagcatcaaggagttacagggtggcatgaaattaagatacaagatttatgagggaatcatcaaatgtcttacggcttagcctcttgcccatcaaagggattcacttcagattccatcaacatatttgcaagaacaagatatctaatatgcagtacaataaaaaaggatgaggaagttctaaatttatcaatatacgaaattaaaatggaaaagaaatgcagatgatttgattacttcaggcattgaattctccgcggattgccagcttcatcatagtttttgaatgcttcaaagaaatcagttgcagcatctgcccattgcctctcagccatgtgcatctttccaccacattcacgaattatacccatgattcttggatgaggtatcgctgatttgatggaaagagcttttgtatatagttcctgcagcagaggttcacttcagaaagtgcatttcatgctaactgcctaaggcaggagaaaggtttgaacccaatatgggtcaacatagtactataaatgaaataggctaaatatagtcaatgctcttataaacatattgtccaaaataggtacaaaagacaggcatcagctttgtaggttttattttataaagctgtagaaaatcaataatttagcaaggaagttgtgtgctcactataccacctgatttcaggcaagcatattatgcaaatgtataattgtatactcagtggcaaatatcctggtatcagtaacatatcaacctatacaaattattgtcaaaggaataaaccggcaaaacagcagaaggatgaaaagttatctttatatctgcgttctggctgcagtcaactgtgttttttaacaaatatacagctagagtactgcaatattgaacaagaaactgacacaaaatcttgaacagtagtaacctgtaatccaaaataatcacgtgtaaaaagactgacaatatgtcttaccttcaattttttgttgttctttgtttcagtgtacatttggatctcaatagcatagacttccaaaagttgtgtgcctttcttctgatcatcagaaccatcttctctttgacaagatttatgcagctccttcagtatctacaggaagaagttacgagcaaaataattagagtaatgactgcagaatatgtaaagaaaaccaattgactagagaaacttgtataagcaccttgctcatccggccatactcccccatgtcaaaccaaattttgcaaagcttcaggtttgtcttaaaccataatctctgcgcagcaaagaatagcaaggtataaagaacaatcttttggtacataaaattctaatttggataaggcaagaaactgaacctcattctttgcctcttcaagtgctttcagtgttgtctggtagaactcttgcagaagagagaagttttgactagctgatccggagacaaaatccataatgttgtttatacatttctcactgtagttacgtgtcacagcagatttgatgtatgtcaacatctccctataggcatccatcatttctttgtacttcccaagcttataatacagcttcactgtttgtttcagagctttgaaacccctataaagaaaagagttacagaactgacgtcagatctctaaaatatgagtggctgttggatacagatacacttgatttcactgacaacttataacacattaccattgaaaaaaaaggatgtccatcaaaatatgcagccctccaaaaaggccactaatacttcagttagaattctatttgtggctcaagcatatcctatattgggaatctggggggattcctggtcaacataatatgacctgaggttttaagatcttaggtctgaactttgagaaggctcgagctgatggtttgtgataaacaattttcatacatctttactgcacaaagagtaggtgctagtgatgtcatgttatatcttaaattgttaatcttctgtggatggatctacgtaaacaagaatttgttgtttgtaattttttttctaatactgcaccatgcacacattcattcaaatatataaaagaccggttcatgaaaccttatttatttttaaatttttagggcaattatcttggcatttgtaggatcagaatacagactatatctaattgaaagtcttaacagcatacaggcactgtgctaccataaaaaacatacaagtacatgaaggtatggagtccctgaagcttaacgataacaagtagctcatatgggcatgttgacagtcgaatgccaatagaatttagagttcatatgtccaggaactttatattgtagatggacctatacagcaactaaaatcgacatcattatagatacaattgatccccagtaaatgtagttcttactaaatctatcttacatggtgaaagccatatcacccctcttattctctacctttgaatgagtactcagtggcacagatggataggtaggcgaaccacttaagctttgccttagactgacggaacaaagctaagaagtaggcagaatggaaaaaggaaagggacaagggcggtcgtcgcttggcgcgaaggctgctggtttggtacggtactaaaggtcctcgggtgtttgattcattctgctgagcccaacactttaggcaagcccacaagacaataaaatccaacatcttttgtgaaccgcacagaaggcaaggttttaatgtctaaccaataggatgcatacagacgttcaagaatgaaatattaaatgtgaaagttaaaaatacggcatcaccagaagaatgttttcaattatatattttatttcattttgcaaccatagaatttgttcaaaatgacaccttccttaccacatgcgtaataagatatttcagcagggtatcaactagtaaaatgttatataaggcttaccattcagccttttcaggctccatacgtactacttgatcgaagccagcaagtgcaccctcagggtctgtctcaaccatacctgtaataagatatttgagcaatgtcatatcataaagcagcatatacatgaagtagcatttgtaattgtgtggtaacaaaagacaaacacaatttatgcaagaatccccatgctcccacctcacagaccatatgaactagctttccatttcagaaacaagaaataggagtagccataattcatctacctctgttggctttttagggcatattttattttgaaaaaaaaaaacttcaagattaaactttgactattcatttcacataataaaatataatcataatagccataaaactaactttttaaaaatattttgactaattgttgaccaaaatctacgaaattttacttctcgaaagcgggcatatgcctaataaaaatcaatagagggagtttttttttttctgccagataacactatttgtgatcaatttgattccaaggtcgtcatgggacaaaccgacagccacagcacttgaggatgcaacggcgtccaagcggccaccttggcatccccaatgcaaggtaaggtgagctttagtagaggagaatacatgagcaaagctgagcagaaagaagaaaatcaagcttagcaggttagcagagcaaatgagaagcagcaatggataattggagacagtgacagcattgctgcgccaacaacaccagtacaccacaccttcccttcttcggttattccttctcttaaccttcttttctctatacctactccaccataggccatgcacactcgttaacgccccctccctcacacagtcacgtgacactgccagctgaccccacccagatgctcgccatggacagctagcatatcctggatgaccacatatatggccaaggcaaggtaagcctctgccagcatcctcctcaggcctcctactctcctagatgccactgctatgacttttgataagtgagacccgtctttctaaaaaagaaggggcactcatggagtaaggtaagtgaatcatcggttttgggcataggcagccctctattatagatcccaattgccatctcagatacactactttacaagaatgaatcatcactattgcacttaatacatatccatggaaaagaaggatatcatagaaatttttgttttccttttttggatccccatgcattccattattcacgtaactatggattaattgtccctgcctatccaaatggtagttgtctaagagcgcaattactagagaaactctattttccgtattggtaaattggaacatagtgtgactcttcaatgttgcgagaactagtccttgggcctcctcttcagtttttcccttccctgatccaaaagatgggtgcaccacctaactggcactgtataggcatcggtaagatgtgcaggccagactctggacctaggttcttaactaccggagtgaagaaaaggccagatcaagaaaagggcattgtctaggcgatgccacaacaaccatgattgggtttgtacaaacatatcggcttttttccttcttttttttttttgaggaaagacactgcataattagtagtccgcctgttaagattatgtgcacaaatttgtaaagcccttatgtttataacaactggtggcattaatttaacctcctttataaggctagaaaattctacgttgatctttagaagcaaatgatgaattccaagaaattatcgatcctcaaattaatttagtcatgtaaaattatagcagtgaagattatctttcataaaagtagaaagtgaatcattaaaaaaaaatctttccaaatgttccatacacagaaaggtaaaggcagttcaatcagatgtattcaaagaaaacaatgcacatgcccaactaagtctttgtattttaatagtggcatgatttataagctcatgaagcaacaactatcaggtattcagttttcatacaaactaaatgtccctttttagttgggaagtgtttttttttcgcagaaccaaaatgttagttcttaattacaagggacacaataggactaaccacacagtcggtggaaataagcaagtagtactttcactttattaagattctgatggtgtaggatattcatggtcaggtttaaaaaaaaacgtcctaagaaattcaagaaaaatatacatacatgcccatcaacaaagtcacagttaaaccggcaattacacgcaaaagcaaagcaacatacatacatgcatcatagaagggaaccctaagagaacagctaaaaatcagggatttggctggcacacaatcatggtggcctctcctcgaatactacactaccacactacatacacagggtccgagaaaacgcaccgccgaggaaacacaagaatgaaagagattggaagcgaacctttggagttgtagtactggttctcgatgtcaacatcctgctcctccggctcgtcgtcggagtactcgaacccgtaatcctccatgtccgcatctggaaaaggaaccgatcacggggatgagagaagggggtgcggaaacgacaatcgagcgagggcgcgaatcgggatatcggggattaccggagcccatgtcagcggcggcggtggcggcggagaggaggaggcgacccgcgcggcgacgggcggagagggaggggagggggcgagagctagggtttccgagaccgcagcggtttgcagttgcggaggcggatgcggagagagaagagaggagaggacgaagggagggggcgacttttgcgtataagcccctgggaagttagggattttaagacggagacggaatacacctgaataataggatgctctctctctcccttttttttcacgaaaaaacaggcaaatgtttggatttctcaggggatttttcatgttgtgtttttttaggttgattgatttttcatgttgggttaataaagcagaaattgatgattttgatttaaaagcgagtaacgattgtagtagagaagagtggttgcgttggggttatgttaaaaatagggcatgcacactctcccggtatttatcactctaatttattgctttcaccatatgcatgtccatgcctcttcaccgatgcaggcgatgattaaggttattatttgttctaattgcgtagtatactccagcatttcattcctttcacagctcccaagtggctaactgttaacaataaaattcggtacagttctttagtgggcgcgtttgctttgtggacactctttctcgtctctccgttttccacctcgcacaccaccgtcgtcatcgttgacgcgttgcttgccatcactggccaccatgttagctcggtcaccgaccacctccggcgtgcccacgtgtccctaccgcctagcatcaaggcactccaagcaccttcccccaaccctccgcccgccgtgtggatcttcgtggacagcgtcatttccttggctcatctccgccaccatagaccttcattgtatcctccgccagctacaccgtcaagcctagttccaatggccccaccatcggccaatattctattcaagttgatgcaagcattgcatcgttgcttagagtcgtgtcggcttagttaggactttctcggttagatttgatattctaactaagtggtatatttctaatcataatgttgttttagattgatcgatatatccattacgtttgtgtagatctatcggctaaataggtttttcttattgtcttcaatcttatattgtctcgttaggtccgatctattagattgttgctataataagttaaattctagtaagctgatatgtttcatgcaaaatttcattggagttctaaccaatgagttattattattatgagctccaatgaaacattgcatgaaaacatacctgacgatgtatgctttaaccatcggacctgcatcttccacactatatcagtatcggttaattggttcatttctttctatcatccttgttagttgcaggatcaaaactaactaacacgctctgagccctaaatttaggacctgcactggagtaaaacacatttcccaggccttcatgcgtcacgacgtattttgcatcaacactaaaatacgctgtggtgatgccgttcttgctacaaactcttcaacatccgcaaagatttgtttgaattgctcagagtatcttttcaacttgttgaggcttcatagcaaaaactcatgaaagctactaatattacatcgaaactccctgcaattgcttgaaaaaatagtttgtctatcacttgaacgtgctatcacgtcaggaatgttcccggcaccatatcgcactgtaacggcattcttctccggtcgtgatagtaaagattaatactcttttcctttccgacaaaaatagagattgcggctcacgaactatggcaacaataggtgggtgcgtgtcatgttagatccaacatttacaacatcttccaacacttgcattgtccaggttttcagtagttggcgtcactattcaccttcaccaagaccaaacattatgccataatgcagagcacagctaagagatacttaggatgctaaggaacttaagtatgaagtatcaacaaccccaaaacatcatataattacccttctgttggaaaactgtaacccccactgtgatgcagttcactgccacttaaatggagatcataacaaaacctttgccaaatggtacattgttgaagtctcaatactttacaaaggaacacacgaggtgcagattctgctaaccacccatcatctcaccgttcgaagcccctcaggcagaaaatatcagcattcctttttgaaggaaaaaaaagctggagatggtcttcctacagaatcagtagacaagctggggctcgaattcagcgaaatcaacagagccagactcgattgggggcatgaggtacgcagcaatgatctcagacaccagagcggcaacgtgaggaatcctcttcaggttcttcaccagggggatatcgtcagactcgcctatggcaatgatctttttgttgatctccaccatcctgtctaacttcctcttgaattcagggttctcgacgtcaagaacagcggggaaaatccttgctgttgtgcggttggtctgccaaaaaaatgcacagattgtatcatcagtgtggtcatttcagtatacaaaaattaaaaacattctcctaagcatataagtaaagcataaaatggtctgcacccattgcataatgaaattgttttaatattcagcaattcttctgaaacagtctggactacagtaaagtagggcacataattaattttgtaaacaagaaaaggaagttgattttcttacctcaattatcacatgcatgtcgaattctttggtgtccagaccaatcccttcatagaatgtagtacgttggcaatcatttaggtacatggtcacatacacctgcaaaggatcacacacaaaaactgttagaagaggagcacagtaacaatcttcagtgtgaactgttggtccatgcaaacaacggaatagctcggagattaccgagaggcagaagaaccgtgaccagagcttggccttccagtcgttgaggaactgcggctgcgccttgagcagcgcggagaagaaatcaccgtgacggttctcatcctggcaccagttctcaaagtacttgaagatggggtacacctggtactccgggttcgccttgaggtgcctgaagatggtgatgtacctccagtacccaatcttctccgacaggtaggtcgcgtagaagatgaacttgggcttgaagaaggtgtacttcctagccttggtcaagaacccgaggtccagtgccaagttgaaatcagacagccccttgttcaagaacctgaacagcataaatcatgcagacaattcagttgaattgcttactcaattgagttgaaatggacgccctaaaactgaagcttaaatattttctctagtcatggtacagttcaatttgagttgtaatggctgcttgcaatcacattgtgtcattgtgcaaggaaataatttagagtgtgttactactacttacccagcgtgccgggcctcatccctggacatgagcgagaagatctcagccaccactgggtttgttttctgcaaaaaaaaaaaaaaagaaaaaaaaaggagcattagcaagcgcccaccaggtgctcggtgaaatgcaaagcaagaagctagactgcaactacgaaccttgagcctgcggccgagctccttgtagaggaggaacccggagaactccgcggtgcaggagcgctcgaggaactcgacgaagatctgcctgagaggcccctccatcttgtcggcggcggccttgaactccgggttgcggacgaagtgggtctggttatagtccgtcttgaactcctgcagcagcgcgtcgaactcctcctggttgagctgcttgttgatctcggcgttgaacagccgctccatctcgtcgaagtccgtggtgtagaaccgcggcgtcagcagcgtctcctggatctccgtcttcccgcgcttcttgggcgtcccgggcttcgccgcgggcggcgccgcggctgacgacgccacgcggaaccgcacgatgcgcctggaagacacgacgcggggcttggcggcggagaggccgcgcattgccgccgggttgaggagggagagctccatggcggaggaggccatttcgtcaaacacctggccggggcgggagggggaagaagagttttgggggaggggaggtggtgggcgggtatatacatggtgggacggatggatgagataaggtggcgagagatgaggtgtaatctacggctatctaatgggggctcgccatgtgtaacagagtgcaatctaaccgctagctcatctccttcccttttcattattattattgcctccatttaaaatattatttcttttggtttcttttacaagttggaatagtgtttattgtttttctgggcaaaacaagttgttgtgtttgctggtttttttgagaatgctctttttgccccttttttttctttgtttaggagaaaatcttactgttttctttttgagcatatagcaattggatagcaattcttcaaagctcatctatggagagactatgggcccgatcgagagtgagggtgggggaataacccctctggcacggaaaacggagcaggccattagcacgtgattaattaagtattatctaattttttaagcaacttttatatataaacttttaacaaaaaaacacaccgtttaacagcttgggaagcgtgcgcgtgaaaaacgaggtggtgggggcgtttgtccgtgggaacgagcgcaccctatatcaaaatcttgagaagttggcaagttgcgcaaacagcatatactaggactgttcgctgcgctgcatccatgtaacttgttcaagtgtgggtgtcttcaaggaatttggctaactgtggcacacttgtagttnnnnnnnnnnnnnnnnnnnnnnnnnntgaacaaccttattaccttattacagtaggtatacaatagcaagctataagtcagctataaatatattttaaggagataagagcaagtacaatagtgctattaggaaggctctaaaacttatcaatcatcctaaaacgagattaaggaaagaaaatcacatattgagaaagaagccggtgcttgcacagcgcctcacgctgtatcggctaggagatacaataaaaaaaattcgtttgtgggtcctaccgcttgttaattcgtttgaaccaatgtagcttataactaacttgtagttagtttattatataaattgctctttaagttagctctacctgagacatgacaaaattttagagcctactgctagctacactattgaccttgctctaagagcaagttaatagtatagccaactactagctccatatcacatacaatcaatttaatagccaattcatacaatagttacatactacactattaatatctggttccacctgtcatacacacactgcgtcttggagtccgtgctacagctggct

SEQ ID NO: 5603 - DNA, 73616 bp, Oryza sativa
ttaaaaaagtcagcggcgtcaaatattttgagatggagggagtatgtggcaccttactaaattgtgttggggtagtgttggtagcattcctttttacctgcttggagctgtgatgcacatttcagcctttttactgtcccacctttctgttagcctgtcacttctttttatgccttccttctttgtcttaactttttctggtatagtttcttgaatatgattgtgtgtcactgtatttcttgtaatgttgagtttcattttatttaacatgaaataacacagattgcttgcttagtacaagaaagggttctagttctacaaatatcttctatgaactgtttctctttttttccggtaacaattctttcaatgaatagttgatttggaccattaagctttctcagtatgtacttggcttcatactttttgcatgctgtcttctgcttatgaattatatagtgttcgttaatatcttcaattctgattgggttatgtacttatgttgttgcttatatcttttcaatatagtttatactgctgtgcccatttttatccactcttgttcaatttcctttgtcaggtggactgtaatgtgtttagctgactttttgtgtctgtgtatgcatgcaggcaaacgctatgcctttgacacttcacagaaaaattgcttgttcgttcaaggaccagtttcttctacagatcttccaaatttctttaacctcattacaccaactgaagagtgaaggtaaagttcaaggaccacattttgtaaaaagtagagtgtatcggaatgcccacactttctcacttccatcttctgatacaatctgtaattaaactgcagtacctgatgactttaggcgtgatcccctctcgcttgcattaaggtgcttgtcatttgactttgttggttgtcctgtggatgaaagctctgaggaatttggtacagtgcaggtatgttagtttgcacaattgttatcttctctgtaaaaccattgacctatcccagttggtctatttcttataatttgtgtaatttttattgatgcagcttcctgcatcttggaggcctctccttcaagatccttctactgttcagatcttcttcgattactataaagtcaacgatacatgtgtttcaaaagaggtatacattgattgggtgatttgaataatatagatgatataatctctgattatttttaccgagtgctttgtccattactccataaacacaaaagaggtatattttgcttcatagttcctcatgtttagaatgtacactttgatcgcatgatttttcattaatacattttacaaacttattgctagttagctatcactacagttctgcaatattttgattgacttccattcagcagcaatatttttccaatgttgtcttttaaaagcatgacttcctcacctctgtgaagcagcaatattctcctaatgtatggatctctaagaggcatgctttattcctttcaagaatctctaagaagaaatattttccttgtgaatttatcttacaaacagctgtttcgtttttctttctatatgagtaatgtgccatgttcagtggatttgctctttccttgactcttccccgcctccctctcctatgcacttctttatgtcatttctgcaggctttggaatgtcttgtgagacttgcttctgtcaggcgcagtatttttgttgaggacccttcaaggacccagtttctttctcatctgatgtcaggcacaaaggagatactccaaactggccaaggtataacgctttgtcctttttttgccaagttctgttctattgtagtactcctgttacaaatttcagttacttggaccagcggtttcaattgcaatcctcttacatggagtgaaaagcctcttttatgtaaagtgaagaagcatttaaaacatgagttgattgactcatgcctagtcacgctatgtggtgcactgtagaaaccagacttgctttttataagtaaaagcacacattggttcattataaatgcaatagtaatctttaaacttaggtacttgtctgtcaaattagctccatgcaggaacaaaaataaatgctccatatctttacgtaatttattctgatgtgtgatctgctcatctgcaggtcttgctgatcatggaaattaccacgagttctgccgtcttcttggacggttcaaagtgaatttccaggttggaatcctgttacttaaaatgaaggatgaagctaacttttcttgtttgttttgtgtcaaggatttgctcttcgttctctctctttgcattcttttacagaattattgacttgctagtttttggtacgtaacaactgatgaattagttggcaacagtagtgatgcattaattctggttggtatcctgactgaaatgaattgcgatggtggggattttgtgggattccaaacacgccttactgatgttattttaccctgatttgtacttttgtactattgctttgaaggaacagtaataagtaaatccaatggtttgtagcttctagtcttttggctttactagcagcactaactagtcatactgatatgcagttcaaggttttaaatagtggattgcatttttatagtgcattggttttgatgtagagcatatcgtaatgatgcagtgcatgttgtagtgaacagttgatggaatagttaatttgtatcataattataattctacgaagtgaactattgtgtttatgatgtttttatgtatttttggtaatgtttgcaacttgcaagtgctatttttgttggcatcttcttttaattttttgccttacagacatttggtaccaatttattagctttcaaagtttcaataaacaacggagcatttaatacctgtgtaatagtgttgtcaactgaagatggccattgttccaaactttcttttaccatttttctatatgcattccttgtcccaattgcctattactaacttactgtttgttaagttctaaataaaaagcatggttcaatattttcttaccacattcaaaatttgccataatgaccattccttcttatttagaactttgataataacgtagttatgtaaattagtctatgttgatcatgaaaataaaattgaactgtattatgtttgttttctgttggcatatcttcattgtgacattcggaatactcccggcattttgactaccaaatgatttggttggttgattgttacctgtgtattagatagtgttggctgcactcatttatgatcctttatcaagttctctgttattatcatagtaatattcaagctatgaatggacctctttgtgatcaagtgtggattcttgcattgttgtactttgcagttgtcagagcttctgagtattgagttttatggtgaatggattggtttagtagcagaattcacaactaaatccttgttgtcatggcaggtctgtttcccttttttttttttgactaattctcttagcactggattattcaataattaatttccaatagttctaactattgaatatttgtagtgggccagcaatagtgtctactatcttttgagcctttggtcaaggctggtgacatctgttccttacttgaaaagtgacacaccaagtatgcttgatgagactgttcccaaaatcacggagggttttatcacctctagaattaattctgttcaggtactgatttctaatgagatgatggaactgctttctatctcagattctcagttgaagagtaacgtttgttatattctgttgtttctatccatctcaggccagctttgcaaacgactcatccgatgatactttggataatgtggatgttcttcaggagcagttggagtctcttccttacctttgtagattccaggtcgccatttcctgtcaagttctggtttccaatttaagagacaattttctgttaaacttttgattggatccatctttgtaatcatgtccacctgtagataagataccttgcttaatcaattgaatgttttcttttatggagattaaccctgttccagcttttcacataacaggattcatagttttatgtaattgatttttttattgaacatatacattggttttacttttatctacttgcagtttactgcatgcacttagtaatttcttgtatatggcactagaatttctttctttaagttatggagaactaatagaatgatacaacaacagtagatgcatcaaatttaagttgcattatgctattcattttttatcgtatttaattatacgattctaaaacaagaataaccagagtaattttttggccaacttaagtgctttgttgagttgttcaacttcatattctggacgggtgcagaaaatatagtaaataagataaaaaatttgacaaatttagaaatgctattggatggatcaaaaggaaagataccagtttctctctgcatttttcttttttgggcggttgggggggggggggtcaatggctgtgatcagatgctcatgttccagtataacagtagctatttgttttgttatggcaaactggctgattgaaattttctaagcacttcatgtggtcgtcagcccttcccgattgacatggtcaagaataaaggcaactgtggatagacatgcaacttagcagttttgagccttcgcaagtgttgtgtacacatcctatgtttattatgtatgttagcttgccaacatgtgagtttagctatctacattgtgcctctcaaacagatgaagatctcttattaccatttctgctgttttcagctaatttattacgccacttcattatatatatctgttatttttgtccggatggaatttttatataattattttgagtcactactaacctccttgccagttaccaatagtacgaagaagctagatgaaatgcccttattgttcttaggcctttttttttttgatagggagttgcattatatgacatggccataacatgattttcttttgctgatttgcagtaccaaaacagtagcatttacatcataaatattatggagcctcttctacaagcttatacggtatgttagtgttatttcacagtcctcttttttgggcagaaagaatgccttttcaaagccaaatactttttacaggaaaggtcaagattaccagctcctggagatgcgaatgagctctctgtcattgaaggacagctcacatggctagtccacataattgaagccattctcaagattaggcagaccattggttgtaggtgagaaattaacattccttgcttccttatattctgtttgatttcctttttttttcacctacaatgctcattttttcatgcagccaagaatcacaggagttaattgatgcagaacttgcagcccgtgtgttacagttgataaacgttactgacacgggggtgcacgcacaggttagatgaaaatgatttggtcatctaacatcaatgctgagtgctgagctagtgtacttgtagcaacaacaattttcctttctagtattgtctgcaaattatagaatataattgcatatgtaggtaggactgattttgttttttgacaaacatagatattttctagtactgtaatgcaaataacttacaactttatttttatcgccaatactgtaacatatataaccaattactcgtttctctatttgtcgtgaagcttggagtcacagcaacgcatgtggttgttgatggtgttttggtgtttcttacagttatcatgagaatgctaccaatagaagctgtgaatttgcacttaaaaataggctgaaattgaatttatttaacgaaaatatctaaacaatgtccccctatgaacttaacctttggtaaccagcccactttaagagagttatatttcatattgtattatgtgcagcatgtaaaccacatactgtccccataaaccaaatctgtttctgtattgcgacactacgtatcacaggatgctctccaatttgttctttactttcattaacctgttttagctgctcttataaccattcacagcttcacaaatttgtgaatgatgacttgggtgcattctttgcagagatatcgagtattaagtaagcaaagacttggtcgtgctattcttatctttgtgcaaaatttcagaaggtcatatgtaggagatcaagccatgcattcttcaaaggttagaagaaaccgaataataggacataactattataatttttctttttatcttgatgtacctttttatgtaaatccccatcaagttttacttctttgctgcagcagttgtatgcaagattatctgagcttcttggattgaatgaccatttagttttactcaatgccattgttgggaaaatagctactaatctaaagtgctatgctgaggtacctattgtttagacatttactgattttaggcatactttgatctatatgctgtggctgatcctttgtgtggttacagtgcgaggatgttattgatcatactctgtccctcttccttgaacttgcatctgggtaaagttgtagctatatgtattcactttacatgtctcatgcttattatggtaacaattcttcatatgtattttcgtagcagctatatgactggaaaactgcttctcaagctggagagtacaaaatttataattgcaaatcattctgtacagtcttctcactagcttctgtttcatgttatccctgtgccattcctggtcttagaagtgattctattttcattattaatcttttcagagggattcttttccatttcttgaagaatacagatgtgcccgcagtagaacaacattctactacatccttggctgcttggttttcatggaagacaccccagtaaaattcaggagtttcatggagcctctcctacaagtgcattgctacttatattcataatctctccgccccagaatgtagctatatctggacctgtacagatcgtaggtagaaatagctacattttggggtgtaggaagtactagttaagttttttctccattcttatatggttttcttcttcgtattctccataggttgcagttaatttggaggcaaccgctgatgctgctttctggactgatgttgtgaagtacgcatttattggtttgatgagagacttacgaggcattgctatggccacaaacaggtgcacaatttgattatatgtggtatatatgtgcatcaactcactaactactttgttgatctgatccagccgcaggacctatggcctcctatttgactggctatatccatctcgcatgccacttttactgaaagccatctcactctgtgctgatgagccggaggtaactaccaaatcgcaatgctttccttgcgtagctgttctttttgaaaaagtttgaactgtttttagaaaatatctagagccttatgcttctaaatcttttgctcagctactgcaaaatcaccactttgtgttcatgcaggtcaccacacccctactcaagtttatgtgcgagtttgttttgaacaaagctcagagattgacatttgattcatcatcaccaaatgggatccttttattccaggaggttagcaagctgattgtggcttatggatcacgtattctgttgcttccaaacggcactgatatttatggaagtaaatacaaaggcatatggatatcacttgctgttctttcaagaggtgagttcagaaaatatgttttgaaaacacctgtatgctctgcaattttattacagtttcagtaaagtctacctgctgttattcactgttttctaatgcttgatttttttagtggatttcatcctttccaattttatgtgcgactctcattgcacaatttttttgtttgaaaaagtgtgctttaggttacacttttgctgtgaaatgttatttgaattccaacatgtctctacgaaatttcaagaccaaaaccttgtttttgcaccccattgagatcattgttttccaacagacaatattaacttatccccatgggccatattacctggactgtgaaagcttgttcatttctgttaatcatttaactccttactgatttgtgatatttgagttgaattgtagcctcataggccctggcagatgataaatatttcaattgcataagatttgcagtagttgagaatgggtttatgatgattttggctaaactgaaatttaactgcaactatggttaaattctgttgcaaatatggcagactttctataccttttcagtttcatgtgtggtatgatctatggatctccttattcaagaggatactgatttacttgaatttggtatgagatgttacttggagttttcggttagggtgacagctgagttccaccatctctgattcaaactttttgttgtgcttttaatgttataagaataaaattggctgagttccactcaactccgagcccaattatttgttcttaaactgtatcttctgggaaccttatctcccattgcagactaaagatttgtattttttttcttttgctgttattctgactggaaccattgcagctttatgtggaaactatgtcaattttggtgtatttgagctgtatggtgacagagcacttgctgatgcccttgatatatctttaaagatgagcctctcagttccattgtctgacatattggcattcaaaaaggtattccttgcaactttagtgatttactattgttttgctgtgtagtgctattgcttttattaatatggttattaagatctcaaatatattcattctaagttttatagcattgaagatgtaaagttctcattatatcgcaatgaaagtgaattgaatgttatgtatatcaattaagcagaggtaattacttgtgcctcaggaactggactgagtgattttagtgccaatcttctaatctaactgagaaccctgcatttacgcacttggtccagttagacaacgctgttatgacagaatatacaaattgatcagatcctagtatcttagcctgtctagaaagatttgtatattctgtcataacagcgctgtcatttttttatttgaaaatatacacagtaaaattaccaggagaaaacatgaaatgagtaccgccaacagtgggctccagagttctatcaggaaactttttctttggaacatgggatgctgctgttattttttatttttatgccagacattttcaaacatttttttaagagcattctccaacccctagaactgtactccagttgtgtttgaactttgcatattttttttcaacattttgtttgtagtctccttggcattttaccagcaggtaccctgcatgcgagcttagtttatttatttaggtgatctcctggcaatttttgcccactggtaacatgcgtacaggtttagtgctatgttttccaacaattgtgcttttactggcttgatcatagacaaataaacagcctagacaccattccaggtcttgcattgtcccacattgatttatggttaaccagatgattgagatattcttgtttcatccgtggaagcattcatactaggctctttctttatttcagctgtcaaaagcattctatggatatattgaagttctgttcagcagccatatcacttttgttctcaatttggatacaaacaccttcgtgcatattgtcagcactcttgaatctggcttaaaaggtctagatacagggatatcaacacaggtatacgacatgatgctttttactgcttgtaaaatgttccccgcttcttgttacaacagcatcggtgaatcactgcttaaactgtgtcctatcggggaagacatacttccaatctgtggttgctggtagataataattgatgccatcataatactctattctcttttatgtggtttcccttttagtttcttctcttggatctggatgtcatgtgcaacctggttagggcccacatagaagcagcagtcaacctctctaggcctgcagtactgtgcacatgaatagtaatgggaacaacatctgcctatggttactgtttaatcatttccatgttcttcgatacggggtatatcgtaaaggtttgggttgtagaggtttattaaggaagcaatacacacaagcttttagtctcttttttatctccttcccttatgcagctacctcagcactgcttggttcattaagcctaagggcccttaactatgttcatcacattggaatccatcattgttctttagtgctttctgtttggactaatctgtaaattgttgcttccttttggcagtgtgcctctgccattgatagcttggcggccttttatttcaacaatatcacagctgctgatggccctccttcaccagctgcactaaatcttgctcggcatattggagagttccccactttatttcctcaggtttgtgttaataatcttctctaccatatgcagaaaggtctggatgtaattacattttgttttttttctgtgacagatactgaagacgctttttgagatcatcatctttgaggatgcgggtaatcaatggagtcttagtaggccaatactgagtctgataatgatcagtgaacaggtgcttgtctttttaaaacttttaaatcatgttccttagcatttcttttgcactcttttttccagtttgtattgtctttgttttttttctttttttttttgcgagggtctttagatcttttctaatcagttgtttttctttgtgcagatgtttagtaatttgagagcacagatattagcatcacaggtcagtgaactctctggtctgatattccactatgcagtcctgtctttctagttttatttttgggttaattggatccatgccactgcaaatatgccaatttgaaaaaatgtcactactattcagcattcggctatgtgccactgaaaattggagaaactggaaccgttcacattttccgtcaaaaatccctgttagcccccaactgcacgtgggccccatctccctcccctctcttctctttccccttctctctccaccaccgtagatgcggtaggtgttgtcgccatcgtctcggagccggaagatttgcgattcaccctcaccgatctcgcgacgatgggtgatgtggccgcaccagctgcggcggcgcgggcggcgaggccgacgagcccgttgcgcccgcccaaggcgatccgcagcaccaagccaaggggctcgacgaggagaccgtcatggcaccattcgtcaagcaccttgtctcggagccggcctgctgggatgcgcctgcgtcgtcgtcgtcgttgtcgagcgcctcgtctcggagccggcgagccagactgcgcctgcatcgtcgtcgtctgctcccccggcaaggtccccggccaccgcccccgtgccggtcgtcaccccgcccaccgccgcatcgctgtggccaaccctcgctgccaccgccaccgacctcctcccggagcgctcgctttcatctccttcccccgtgccgctcgtccctccgcacttcaccatcggctccccggctgccgattcccctcagccgtcgccctcctgggctcgccggcgtccatggcggagaagctccccggctgctaattccctcgacgacggcggtgagggtgctgcgtccgccggcaaggacgacgaggaacggacgggtcgcggcggctgctggtggagcagcgagagatggagggggggggggatcactggctagctgcagtggcaaggaccagcgagttcgaggtggagtgctcgccggtgtccatggtggagaagtgaagaaaggaagagggagagagatgacggaggttgacagaaaactggatggaagtggcatggttccaatttccccaaattctagtggcacgtagccgatatgctcaatagtagtggcattttttcgaattggcatatttgcagtggcatggatccaattaacccttttttttcctctgcttgaagctttctagtgtcaagttatcaacaatgtttccagtcatcagcgtgcaggtgttaggagacaagtttcttttcagtaaaaatattaaattctactagtacatcttttgattagaactgtatgtccagcttgtgatgtacctaagttttgttaacatatgtctgccaataacagcattagtaatcattattgaagaactaatgtacgtcttgtttgcagcctgtagaccagcaacaacgcctttcgcaatgcttcgagaagctgatgtctgatgttgctaggaacttggaaccaaagaacagagataaattcactaaaaatcttacaacattcaggcatgatttccgtgtgaagaacattcaggcatgacagctgttcaggaccagctaccagctttaaggtggtgcactcatgtgctgtaaatactttagcttagcttcgttttaggaaccaccattcccgtggggggaaagttatggtttaactcagtttggtttggattggctgaaagatgaagggttctcctgctgcacgtggtggcaaaatgcagttgttgatctcttaccttgtcgtgtactagactggcgagtgcaggagattcttcttcttcttcttcttcttcttcttcttcttcttcttcttcttcttcttcttcttcttcttcttcttcttcttcttcttcttcttcttctctttttataccttagtgttaattccatctctttttgcttgtacagcaatattcatgtgaaagcctgtgatcgctgtttccctaagttgttagggcgaaagcagccatcgctcaaaatataattcatttgttaacaggttagaagaatagaaaaaaagttgtaaatggttgtgcttcctgttgctgtcaatgctcaaattggaagtgaggagacggtaaatttgctccttgagcttcaatacaggtttttattcagctaacgtctttttttgcggctctccatatttcggttcattatagccccggactaatgttgtgtacagcatttttcttttggaggtgctgtccagagttttggagctcgacggcgccttttgcctatggacctatggaaggcagttcttcagtcttgcccacggtatttgttgattaatcttgttctttagtcttcttcagagttcagattgtttagattgtctgattttccacttgctcttaagatgtattataggttaatatagctagttgggtttctgttctggtttccttggtttgacactattcaggttactattcttgattggtttcaaacttcccatatttcctgtaaaattcggtaccttacaacaagtatgaaagtacaaactattcatataaagtacgtcttaataattaattaaaataaaagcacagaatttttccagcactattgcttagctcactctttacatataattccatttaagaaaataccttctcaatactgcacttgtacaggaagaaccagtaaaaatctaaaacaagtaaacatctgaacaatggataaattggggattttaacgtctttgtgagtgtcactgtattggcacatcactccccagtttacgctctcactacaggccctatttagttcccacacaaaaattttatactctgtcacatcgaaccacatcgaacgtttgaatacccgtataaagtattaaatataggctaaaaaataactaatttgcatagattgcgactaatttgcgagatgaaacttttaagcctaattgctccatgatttgacaatgtggtgctacagtaaacatttgctaatgacatttgctaatgataaattaattaggcttaataaattcatctcgtggtttaccaacggattatgtaattatttttattagttcccgaacaccccatacgatatattatataatacccgatatgacgtgccaaaactttacacccctgatctaaacaccctcgtagacttcagcatacggtagttgtgcaatgggcctacagtgccggcgctgagtcctccatccttggggcattcaagccctgtgacacggaaaatttggctttgtatagttcgcgaaattaaaatttttgggtatcacatcggacgtttgaccgaatatcgaaaggggttttcggacacgaaagaaaaaactaatttcataacttgcctggaaaccgcgagataaatcttttgagcctaaaatctgtcattagcacatgtggattactgtagcacttatgtggctaatcatggactaattaggctcagaagattcgtctcgcgatttccccccaactgtacaattagtttttatttttatttatatttaatgctccattacatgtgtccaaagatttgatgtgacgtttttgagaaaaaaaaattttggggaagtaaaccgggccttaaataaaggggataacatataacacaagatatatacatgtacattgttgtcgtgttacatctaaattctaatgggaaagagaatataagcagacagtaacaaaaaaaaaagagagaagaaactgcatctgcaacagttaaacccgatgcagaggtcgaaggatagaagtggcacaaaacacgatctgccaagcctgatggaggcaaccaaacacgccaaaatgtggcaaactgcacaatctgaccttaggaggcagaaaaaacatggcaaaaatagacaaaatgcggaatgtccccattagtgcttgagagtagctaccattggtcactagtcaggatgcaacgacaaacaacaatgcacttgaacatttaacaagcagatgctcatctgacaacgaggacaacatatcgatcctgaccgataataggtaggttactttggatatggaaggatgctgcttcacatctccttcatagagttaaagtggatccaacagtaagtccgacaagaaaaccgactgccaacatcgcctcagggtgtatttaattcataccaaaattgaaagtttggttgaaattagaacgatgtaatggaaaatttggaagtttgtgtgtgtaggaaagttttgatgtgatggaaaagtttgaagtttgaagaaaaagttggaaactaaacaagggctcagatttgccaacccgcttgctcgttgtcgctgtagcatttttccagcctatccaatatcccagcaaaagacctcttgcgagtccttcttcattagttgcgcatataaaatagagttccaaaaacaaaacaaaaaagagcacgacctcaatattttcattcaatctttataacataattgagaaagacatgacttatcatattgaattattagcaatgcgaacaaaaatatgcatacattaaatatattgtcacatcaaaatgtattaagcaaacgcaaacaaacaagtgcgagaggaataatgcttgtgttcatcccaaacaagtcgatatacttttgctaaacttttgtatgattaacaaaagtacagaacaaaactcagtttggaaatgaatacttctttaggagcgtatgttgaacaaactgcaagatcatttgctaacaaactctatgcagtcccccaattaagttgatttttcttaatgttgaagtcccatgttacatgttacattccctttgtcagtttggatgaaattttgacaactaaagcaataaggatcgcatccctatggtcagtgtacctccatttccactacaacttaattaatctattaagcaggaatcagaacatgccatgcccttattcggcttccaaaatctgcctcattccaagtcctctgcgtgggcaagccgaggtactcaaacacattgatatcttcactttgtgttggttcgaacgcattgatttacatgccggtgtcaaccaatctaagcccttcatttgtgaaccatcataatactataaatctggataggtagccaacataagtttcatatgtacgaatccaatgatcatagtacaaatccggactagaactaacacttgttatgaatccaacgattacactgcactatatatattatttagtgagtcgtgactttcgctatttactagttacatgcccatgcattataattagatctatagataaaaatataatttggttcatttctatatattttttatgatgtgttgtggatttttaacatttatttagatatatttttagaggatagtttttataacggtgaggaatcaactttttaggtaggaggacgaaagagcattataatttttttaaagtttttttaggggaaggaggatgaaagaaattgttaagagtaaaaagataatttttttttggaaatgtgaagagactgtgcttttaaaataattaatataaatatatatatttttatgttatcttatatagcttatatctaaatacaatatgtgagtaattatattttatttaatttattagttgagttcccgtacgatgtatcgggaaaaaaatatttggttattttccttcaattatttaatatatgatttaatcgcaatatcttttcaacttctaataaagataaaaaaactatcatatttttaagtatttgactataatccatttataattattgattgaaatagagtactacttgaagggtatttcggtcatgagaattagatagtgtaccatctcttactctcactgtaaagggattgagcagggtaggtacaattcaacaatatctaaatgtgcatgctgtgagatccacacaagcaattgagcagggtaggtacaattcaacaatatctaaatgtgcatgctttgcatgctttgagatccacacaagcatatggatggtccagattgctggtgcatatgcacctaggttcatattatccagctcctctatatatatgtatgtatatatatatatatatatatatgtgtgtgtatatatatatatatatatatatatgtatgtatatgtatatatatatatatattctacacccggccaaggcgccatcccgactggccgcccccaccatcccgtgatccgcccccgcaccccaccggcccaccccaaaatagcgaaaagagaaaaaaaaggaacgcgaaaaaagagagaaaaaaaactcccgcatccgccgccgagaggagggagtcgcgcgctgccctcagctacgccaacctcgggcgccgccgcacggaggctccctccggccggcctccttccccatccctctcctccctccgtccccctccctctcctttcctccgtctttctcctccctcctttcctccatctctcgcaacaactctcataccttccacagcgtcgtgccgtcatggggaaccctaacgacgcacccctctcagctcgtcctttcggcgccgctcatgactcccttctttttttcttgaggtgagttttgccctaaaaaatcttgttgttactgtctatagatcaccatgttactgtccggtttactgcatgcaagttttgtcaagagaaatttttggttactgcgttgttactgtttatagatctacttgttactgtctggtttactacatatgagtttttccctaaaaaaaatctcgttgttactgtctatagatcactatattactgtctggtttactgcatgctagctttgtcaggagaaatctgtggttactgtgtcgttactgtctatatacctccctgttactgtctggtttactgcatgtgagctttgtcttaagagaaagattttgttactgcatttcaactgttccgttactgcatttcctgtattattttaccgtctgatttactgcatgtgagcttgttcgagagagcatttgccctagcaatcaccatgttactgctagctcttgttactgcatttcaattgttttgttactgcctttcctgtactattttactgtccgatttacaacatgtgagctagttcaagagagcatttgccttaggaatcaccattttgttactacattttaactgttttgttactacatttcctgtactattttactgtctgatttattacatgtgaacttgttcaagagagctttttccctaggaatctccatgttactgctgactggttactgcaagtatttttttactgctcattggtgtatgtatcgcgtatgaaataactgtcggctgtctaagatattgcatatgagttactacaaataattagcggtttcaataacaaaggggagcggttacaataacaaaggggaggaagaaagacaaagaacaaccggtgtcgaaacaagctgagagcaagcagccgaaagaccatagcaaaaggtgcagcgtctgtcacaaaattcaaggacacaatgctagaacatgtcctagtagaagcaaaagacaaaaaaacaatcaaccgccaagcaatagatgattatgacgaagaaaaagaggaagaagaataagtgtacaagtgatagatacattgcttctgacttgtaggacatttgtaatatgttactgccatagtatataactgtgactgtctttaagcatattggttgctaaaatgttttccttcatcacgatgcccagttagggcagcacatcactgctatataacatgcttctagtactgctatattgtaatgttttatcatgattccagttgaaatgacatgttaccagtatgtttactgccatgatacatatatgttactgcaaaaatactaatctgttactgcaggaaagtaagaacaatataaaattgtattgctgttgtgaacaatagatacacgacgtaatgccgattgctgcaatgtcattatgtcctctcgtcaaccttggtaattataaacacgggcgtactgttacatttgtggtaccaaaataaatacaaaatcaggtatgttactgtcagacatacatagaagttactacaaataattagcagcattactgctagattctttcagcccacgttggactctacggaaagctacttttgtgggctatcaaaaatacatacttgttgctgccgaaattacgtagctgttacagctaaatacacacttgttacagccgaaaaatacatagctgttactgcaaaaaaaaaaacacgtatcttttgcatcggagaaatcgaaaaaaagaacaaaagaacaatattactaccgatatgactgagaaaaaatctgccgatatgactgagaaaaatgtgacacatatattctgataacatttgttttgcattcagaaaaccagaactgctagataagcttgctagaacggctgtttctgccaacagtactatgttactacgaaagtacatacttgttactaccgaaattacatagctgttaccgctaaaaaacacatatctgttgcatcagagaaaccaaaaaaaaggaaaaaaaagaacagcatgttactaccgatctagcaaaaatataatctgagagccaagtacaagtactactagtgttactgccaacacttgatcatatgttactgccaaaataaatgtttgttactgtctaagagccactgagtacatgtattttccatacaaagtgggaaggcaaaaagaaaactacaatactacttggtgtcaatctacggcctaaatttctcaagaatcgcaggcaataacggtttgttgttgttcaaccgatggtagaggaattcctgccgaaagtgtgttccatcctcctccataaaaaaacaacagaagatttggttcagttacttgggtttgagtacgattaagggaaatctccagattttcatcaccgtctctaaccacaacctttgttattgtcaaaatcttgccactcttcttatctgcatggaaaaggtagaaaaaaagatgtgttactacagagcaagaaggttgtcactgcaaattaagatatttgttactagaaatgtccatggaaattaaaatcagagtcatgcacaatataggctgcatattaagagaagaggctccgctcccactgccgtcgcgcctagtggagagggggaggaaggtggctggggaagggagggtcggccccagccaccgctgccgcctatctgcggccgcgctaggggaggaaggaagggagggagcccggggaggggggtgggggcgcggagaggagaggggagaggtagtccagacggggaggctccgtcgccgctgagggagagcagcgcgtgagggggaggcggcggagagcagcgcgtgaggaagagggagagcggcgcgtgagggagaggcgagggttctggatccgggtgggagagcgtttttcttttcttttcatcggttttcttttcggttttgggcgccgggtggtggggctggcgccaggtggtgggattgaggggatggcgcggttagggggtacagaatagtttttctatatatatatatatatatatatatatatatatatatatatagaaaaactattctgtatatattgtgattatgataaaaatatatatgctcataaggatataattatattttataagtactcttttagccatgtttctaccataagtaatcttttagtcatggtaaaacatacatatcaaacatatatgttcacgaggatatatggtaaaaacatacatgtacagaggatataataatattataaaggtgtccatttctatcatgagtattcttttggccatggtaaaaaaatatataacaaggatataattatatttttaggaaacttctgaatttgaagatgccaactttactatatgatataatttagagatgccaactttactctttatgttatacattttaaaataattttatttatgtaagtacactgattattaggtgtttaatttttttattttctttttttgtaaaagtgtttaaaaaaacaaacaatgactacgacggttattgatttaaatcgctgcttttcctgttcgttaagcataaattaaaatatgctgaagatgaccattgttgtcttagatgttgagtcctgaatttaggtttgtgttatgtatagtgtttgacacgtattttttgttagaaatatttttttcatacatattctataaagaatcagcttagacattgacatttgttttgattatatttacataatcatgtatatatatgagaaatgttaggaattctatattttcttaacttgtgaattgagaaagacattatttatctaagctctctcgttgtgtttttagaagcatacacatagtgttgtgatgttaaaagcatacacatagtgtgtggatgaatgggtaaagcatacacatagtgtgtggatgcatgggtagaggaattctatattttcttaacttgtgaattgagaaagacattatttatctaagctctctcgttgtgtttttagaagcatacacatagtgttgtgatgttaaaagcatagacattatttatctaagctctctcgttgtgtttttagaagcatacacatagtgttgtgatgttaaaagcatacacatagtgtgtggatgaatgggtagaggtataggatgaggtataggatgcccatatataaaaatgatgttagttaaggaaatataatgcacgattatctcgttcgtattgtctggcctaattttcatttctttttatatcaaacttgatatacttttttatcttattttctttctttttttgcatatgtattttctatctaggtgacataaatccatcaaatgaaagttcttttcgatgtctagatttagatatatactgtcatatttattttgtttaattgttgtgtgtgattatcggtttatctgggttgtcacccactcgctgaagaaccctaatgacatattttttatcgcataagtacttgttcaataatttcatgctccctctgtttcagattataagatgttttgattttggtcaaagtcaaactgctccaagtttgaccaagtttatagaaaaaaaatagtaatattttcgacctaagataaatttatttttaaaaaatatttaattattaatttaataaaactaatttggtaatgtaaatattacaatatttgtctagaaacttagttaaacttgaagcagtttgactttgatcaaagtcaaaacatcttataacctgaaacggagggagtatttagtatgctttagacttatgtgttacatcatgcttagcccaagcagtgtttgtttggattgccactgccatgaatgcaatctattatatactagtattttagaaaggttacagtggatggcactgaatctgtcaccaagttggttatttacagattatatgcctttacaacatttttttttccgaattgacctttgatgttaagagcattctaatatttggtttaaacaactgataacatatttaatgaaaaacatattttatttatggcatattgtaatagtttttatatatagcaaagagtgggcatttaactaatcattctaaaatcgtgtatgcgaatgcaaatatatacgaggcccagtcccttattggattaggatgtatagcgatttatatctattatgacggcggtttgtatagattccgcactatgctttcatatatcatgctttgatcaaattccggtcaaacttttcaaagtgtactagaatttgtttcatctcgcctatgtatatgcttatttgtaattaaaaaaatattttttgacatacttttatatatgtggccttagcgattcaaatgcaaaactataaaataaaccttggtggaaagaaaccgcaaaaatcaaaagttttaaaattcgaacttaatcttagaagtataagaataagtggaaatatgaggtcgaatgaattttgaaataatattcctttcatgatcaaataggtttattatatcattaaggtgcattatacctacatatattgtatagtgtgaatttggatatttgctttcatctaacccatatgttctgtttgctgtgctttttcttactaaagcatcaagcttcaaacgttgatattcttttgtgattgtgatggaggtttcatcaaacatgccctatctgataaacaagaatcagatttgataaaaattagtttttgtttacttgattttcagtgtgctgcaactagtgagtgcatttgctatttggctccatgaagctcatttgcaataacgtccacatcagaaaccgattaaagttagtgctttactttttatttaaagtagaatgtacagtttgactattacttagattcattcaactaattccatttggattatgctgtgtgcttttagcatttctctgcttttttttcctacttaaaaacagttaaccacttccagtttatttaagttgactactataaattacgccaggggtatcatctagttatctctctatctacatgtacttgatgttggaaatataagcaattcaccataatatttaatccaaaaataaagattgcaaatcatgacaatgtaagcaaaaaccatagaaatattattctcaaccataggaatatgcaaaatagatatgctataggtgtaaatcatataaacaagcatgtctaattcatttgcgtaataaacagaataaagaaaaaggaaagaagaggataataacacatggtgatggagcagtggttgcaacggtagcggaaagagaactgttgttgttcccgtcgttgttcctgttcttgtcatcagccatgatgaagaagaagtagtcgacgtagtcgtactcaagcacaagcgagcagttgcacaatgctctcccaaaaacttgattcgcttcctcttctcggtgcaagatctggaaggtgggggttccggaggcctgctctcccagcgcgtgtgcacacactcgtcgggatgtgatcattgtagcagcaacagaagtgcaaatggatgaaaatgtgtgtattctcacacgcgggagatcaaatccatcttcttttataggagaaaaaggaagatgaaggggaaaggactcatgtaatgtaaagagaaagatagaaactgattgtcatcaccaagccatcaatcatccttcactacaccaccatgaaacaaccattcgattaattaatcattggattaattctcaaaaaattcttcatcttaaccattgataactcatgagaagatgaatacacatatctcctagcataataaaacttagaatttaattgatttaaatggatcaattacctaattaaatctaacacttgactaatgagttttattgatattttagtgaaacgagtatagattatttggtaatttgaatcaaacagggggttttgtagtgagccttgggctctcggcactttttttctcgctctcacatgtccagtcaacaattaactctgttcagtgtcaaaaggaaaacaattaacattgggttgtcttggtttgacattaccagtgttattactggctaacctgcaaattcccttatagatcagaataatccgtttattttgatataagtggattcacggattagttacttacatccttagttattgctactccctttgtggacatcatgggtaccgcatacccacttggcctgcctatccgactagcggtaggaggtggaccgaatccatgtattatgtaatagagtaagacttcgttgccgtattgccttgtatcctaaagtagggtatagagcttcggctgaatactaacatataatagattagaaaattgatgccgtcactactacacaaaacattttcctggacatgggacacttttgttttcaggcgggccccgtaagagaaaccacacatgataatcaggggaccggcgccgagcagttacctgcacacaaaaatcaattttcgtgtgcaggccactgaacacgtccggacgcgaaaatagccttattttcgcgtgcggacatgttaagtggcccgcacgcgaaaataggtgcccaccatttaatccggccgcacgcccactcctccctctcccatctccctcgcccatctccatctccatctcccatctcctccccctcctcccaagccgcccggatctggtgggggggagcggcgggctcggcaaccgtgagcggcgtgcacacggtggtgagctcgtggtggcggtggcgggcgacaccctcccccccccccgccccgggcccatatccggggggttgcggggcgtggatccaggggcagcgaggcttaagcatccattggtgacggtgcgcaaggggaagaccggatcaatgcgatggcgcactttcttgatgacgttgagtgctcgtgtttcttgctgctcgatctttcttgcttgtttggatttggatgtgttgctgcttgatctgtctgcttgctgcccccttgacgaggaggggatgtgctcgctgcttgatgtgcgcgcggcggcgggcgaccgcccctagcccggatctggcagctgccccatgaagttgcatttatccccctagcgggttttggtgattaataataatagggttaagggactaatgagttttattgagtaatacttaggtgttttagtcccaagatggcattgtgtggtcaagagatgcttgggagacccccacaacatatattcgagcagaattggaactcgaggtgtgcatatgatagtttatttcttgtaatcgagttttaggaaaaaccgtactattaagaggggttccaggtgtggttctgggatacatcaagtgctcttagtgagatccaagtgtcaaaaattttttagagctatttttgagaatagccctatccaggacagatcaggacggccgaaagttccggtcctatggacccggaagttccggaccattgaagggtgaaaatttcctaagtgttgtccggaacttctggaggacaggaagttccgaacctgtttccagttcaaaaatgtgagtaacagctggatggcatcacctagccgtccccagttcactctttggccatttcacttttgcttttccattccatagccgttgctagcctctcccaagagtttatttgcttcctccacctgatcttgagccattcttgagagagagtgagattttgagggtgaaggagaagatttggagaaggtttgaaggttaggattggtgtgagcacttggggtatcttgtgggctgacatctcggtgcttattactcttggagataatctcctagacggttaggtgttgttcgcgagcttcctttcaattgtgcatgtcccgggaaagtttgtgaaggtattcctcacctccgcaaggaaacgaggtaagtgagtaaagaatcttgtgctgaagtcctagaggttttcctagtgtggtgttttctagaagaaggttgggttggatcttagtggtcactcaaattctagaaaatgacctaaaggtgttggggttgaaggctgtggatttcctctgagatttttgcacaaatgaggcaaggggttaatcgagacccggctctttggagcacctcaacgaagagtaggatcgtgagatccgaacttcgggaaaaaaaatcctctttgtcccttctgtgatgaatctgtgcatgtgtctgtgatattgctacctctctgtttacctgtgattcatctcgtgaattttggctaagttcctgttagtgattcctgaatttgtctgttgcccggaagttccggtataagaacaccggaagttccgaactttttgagcagataggaagttctggtgttctacacctggaggttctgggcctgtagaattttaccgctgcgatttgtttttgagttttctggcaagcctattcaacccctcctctaggttacatctatgcatgttcacccccccccccccggatcgtgcgacaacgacagtgcgcggcccctccctcccctcccttcccttgccttgcagatccggtggaggggaggggcgtcttcagccggtgacgggagcgggcggcggatccggcgtcaggagcaggcgacgacgacggcagtggtggcagcggtctcccagcgtctggatccgttgccagcgaccgcgggggcgacggcggcggctggattacggttagggttttggttttttttctttttttttgtttcaattttttattttcccgtgcgggtgcctcacctgcacgaaaaaattgtgattttcgcagacgttgggttccagacgggtgaaaccaccgcacgcgaaaatgagtttccactgcacggaaaaatcgttattgtagtagtgcgtgtctggctaagtttttctctttgtaactctgcctcccaactaatattagatgggcatgaagccctacaaggacataaccacaaattgatcattagatcaatacaacacccgacgaattcaatccccaaatagaagtagagggcatgaacctgtctaaaccattgacctctttactcattcacttttagaccttgtacactacacccttttcttattgccggtctagaacaatggcatcctccatcctaaaatataaggcataaccaccacaaactcaaaaatgaagaaataatttaattaactagattgtatcacctcgatatatgcacgcaatgtgattagagggcttgatggtagaggattttaaataaaccaaatttagaggaggaagatacactaattaatatatgcatatgtgaacgcattgtattatgagatatgagaaaatgttcaatcttatattatatttttgggatagcgaaagtaataatccagcttggttcagactttccatgctcactgataaattatttatacatgagatgttgtatccagggatgaatctaggataagattggagagaaaactcacattcccctactcttcctcctctccctcttctccatttcctccctccttttataaatggtgaatccgaccatagatgatgttgatgaacgaacattggagttgatcaggtgttacgtaccacacacaccaaaaggccatatatagcgtccgtacgtaccgtacgtggatcggtgtgttcggtcggcatcaattgggagtgccgccgttccgttccgttggggttgcccgtgacgtgacgctgacgcaagcatgacgtcggccgtggacagtcaatcaatcagtcgcctcggtaagggtacgtacggagtagttactacatcctgttttctggagtaacagatgacgccgttaactttttctcacgtgtttaatcattcgtcttatttaaaaaatttatgtaattataacttattttgttatgagttgttttatcactcatagtactttaagtgtgatttatatcttatacatttgtataaaatttttaaataagacgaatggttaaatatataagaaaaaattaactgtgtcatttattaaaaaatagagagagtactacgtacggcctggaccgatcagccacccaacgaagccgtccccatcacgttctgtcgatcaacggccggccattgccatgcacatgcatgcagatcgacacaaccaacgacatgttgactgttcggtactatgctgctcctctatttgacttcctactcgcagactgttaaaaggtgactttgattggtgtattccctccgtcctaaaaaaatcaacatattaacataggatgtatttagttcacgctaaaattaaaagtttggttgaaattggaacgatgtgacggaaaagttggaagtttgtgtgtaggaaagttttgatgtgatgaaaaattagaaatttgaagaaaaagtttggaactaaactcggccatagggcatgtttagatcccaccaaaaattttacatcctttcacatcgaacgtttgaatacatgcatgaagtattaaatataggctaaaaaaactaattgcacagatcgcaactaatttgtgatactaatcttttatacctaatttctctatgatttaacaatgtggtgctacaccctatataatgacagaacggactctttaattagttttttatattagtgcccgggcacctcatacgataccctatataatatccgatgtgacacgctaaaactttacacccctgatgaacaccccctaatttttgctgttctagttatactaggccgagtttagttccaaacattttcttcaaactttcaatttttttatcacatcaaaactttcctacacacacaaacttttaacttttccgtcacatcattccaatttcaaccaaacttccaattttaacgtgaactaaacacaccctactcctacatgttttcaaaatataatatcgtagcagcttgccacgagtactcccagaatttttattatattcttcactgttactgtaggtcaggtacacacggaacactgtacatactccgcgtgctgcatgcatatgtgtacggccctatatatcgtcgattaatttattaatacatttaagcaactaataagttattaaattaacgaagtttatataataataagttcagacttcatagggctactcgtaatccgaatatccgatcggtcaacgttagcgtgtcgccgaccgtcggtcgatcgatgacacatccacatgcctgcatggtcccacatacggttaattactaggataaatttaatctatatcattagggcaagtacaaaggtactacgttaattagagactatcacgttacaatagttaagacagtacagtctctaaccattaatgtaccaaaatattttcttactagccatttttcttttattagagcatgtacaaatgtgagtctaatatgagctctctatactaattatgtcactagagactatcctcctacaatagtagagacaatgagatttctaaaccattaatgcactaaatatttttttaattatacttctttccttttctccactctcatgcaacaaattttccattaataaatgctaagagttgactctacgccgttgtcatgcgtagcaaccatctttctctttccttcttcctctctcttccacgtcaccgaatatgcttgcatgacaataaagagagatcgctaataaatacattgtacataccctcacattttctatttcaaaagttcatcattactatttacgatataggtctaatgcttctgaaattttataaaattaaaactattccatcgtcatcgtattcttttctttcctccttccttccttatgttcccttctttttcttttttttctcttcattaattgtcaagcttagatagaaatgcaagcgaacagatccgcgaatttacttgtggtataaataaatggataacccggtgggtacgccgatctagctacccgcttctcacgctcgtgctcagcaaggatggggcgtgtgctcgagaacagcgacaacgaggtcgatggggactcaacgactatggtggtgtttttctcctgaagatgaagataaagataaatattaagtgttttacgcaaaacgatgtgatattaacgtatgattgattgagttttaattattacaaacttgaaaaatagattaatttgatattttagagcaattttcatatagaaagttttcgcacgaaatgtaccatttagcagtttaaaaattgtgccacaagtattcaaaattttatccaagttttgttggagatgaggtgcttgtgcgccacggccgcgcggatgaggaagacgacgaggaggctatggtgctccacacgtacgcatggcctcgaggacgatgactctgagagaacgctaagctgtgttctgttgtgaaaaatgatcactttgtacatatgtcccgattttttgagtaaatcgatcttgatgcatgacgtgaacgatgttgaagctagtacgttttctcgaggttgaacatactttactctttaatatttgtccttttatatatttagtgtattatatacttgaattacgcatatattaatgacttgaaaactatatttagatcatttataagtagcacgagcgttggtggtatctatctcgtaccaaagcaatattaattgacgatgggtttgcatgcctagaacacatggatatttatagtttgataacgtttattttaaggtgaatatggtttgtggtcatttgttatattactgttaggtactatggtcgttgtcacgtgttaagcatgcatgtgccaaataggcatcaattatttattttgtgttacatataaatgaccgggacatatcttggaatcctacgtatatacaagcttatggtacacactccattcacaccagctaacaaatgtcactaatttttttttaaaaaaaagtaaatataatagttgtgcatatataaagtatcaacttcaaatttattatattttagctataaaacaacaaaaaacctacagttttaagagtatatatgtgtaaggattttgtatttttaaaatataaaatataatgaattttaagatgatatgcatgtaggtataatactattagaagtaacgcatagttgtttgttttgaatttttagtgaaatttgttagttggtgtatacggagtgtgtactgtgaacttgtgcatataggatatgttgtctactcacctgatgtgtagagagaaaagcaaagctaaggtatataaatccctctgtccccaaactagtttatctttaacctctactatttatcctaaaataagtacattcctttatctatacgtgtgtgcagtccgcaaatcaattttactcgttcaataccccttagctacccatcaatactataattttctattaatcgaggatactttggtctttttactccacattaatttgtgttccaatggctaaagatgaatttatttgaggacagagatggtattaataatggtccaatttgtactcaattatgtacaaacatgtatatatacgtacaaaaaaagtccatttaattatcccctaaactatttcatttgaattaaccgctacaatattttttttcctaattttaccctaaactactaaaaatagttcactttagtactgaatattatttatcaccttttgtttctctttgtatcagtcctattttaagctaaaatttttaagacataaatgacaccctatcaaagttcccaaatatttctattgctatttactttaaatttaaaaccttgatatttagatcagcctatgtactttcaacatatgcaaacgacaataatagaaattctcaaaaatgttaagaggtatatgttataatgcatctactaacccatcaaatttcggagcataatatgacatatatatagacacagacaaaatattgttagggagtaagattgatcgtttttatatgaagtaagatggagtgctttttatagttgagggtgtgaaatgaaccaaaaaaatatttacgggttaaaagctcagcgaaatagttaggagtaaaatgaatttattttctagaattcctactttggcgcaaatgtgctagcaaccgaactggcgaacactttatccacttatccgttcactcgatcggttacccctccatctgattcccttggtttcgccccccaaccttgatgtttcgttccaccatagatgagatgccgctcctagctcccctcgacactaccaagcgaggttcatttcttcctcctcccccagcaccttgcacaccctgccccccttttcttcctcttgagcgattctaagttccccttcctgctcatccttggcgagacattgatggcgtcgaacggacctcggcacctcgctaccaacttccacacgacgcaacatgtgagccgccgctctcatagaccttatgtctcttcttctttggggagactcgattctcctttctcctcccagcgagatatcagtgttgtggggaaagctacgggaatgggatataagtgagctcccctcggttgaaaatttgagttttctaaatttggaagtttgttatgtaagttaaaacttttgaggttatgatttgaaacttttcaaaaattcggatataaagtttcagtatatagttgaaaatttctaaagtatgaattgaaagttttcgacgtcgagttgaaaatgttatgaattgtagattttatcgattgggttgaaaattttataccacaaatagaagaacttttgagaggttccgattgaaatttgagatttaggaggaaattgattaggagatgtattcttaatccaagttcaaatagggggagaaaggctgtgtttagatccaaactttcaacttttttcatcacatcaacctgtcatacacacgtaacttttcagtctcatcgtaccaattttaacccaaacttccaactttgaaagaaactaaacacagctaaagctaactagactgtattatgatagaatcagatagaagcgcaaacacgtttgtctagttcgccacgcacccctttggccctttcttttctgctatagtactacaactgaagaaacaaaagtatgaagctcagccgcagccgcgtcagcgtcatccgctgctactagtcaattgctatccgtcgaggtagagcggtggccgggtcgatctagtccgtccatccgtaagatccgacggttgcgaggaggcgaagaggtgtccgggcggcgaggtggaggccagcagcaggctaatccgcggctggggcgcgtgggtcccacctggcagcctccagccccccttgccatccgcacgaaggcgcagccaaactgtcgcaatcgcaaaatcgcaatcaatcgatcacgggatttctcggtgggccggtggggcccgcagcgggtcgagcctctgacaacgcggcttctcggtttgtcgcctgcctctctgactgacagactgacaggcgacagctgcttgacccaccccacgaccaccaccgccgccgcgagcccgcgactttcttcccttccccttgaagcaacaacaaccaggtgatcaaaccgtttcggtctgggtcgacgcccattgcacaatcaatttgtgttcacacttgcctgcctgacgcgtcccccatcgttactactcccattttgagtttttcttgtacgggttgaccactcgtttaattaaaaaagttagaattattattttttatttattttattattcaaagtatttaagcacaacttctcgttttttatatttacacaaattttttcaataagatgtatgttcaaacaatacaaataaaaactcaaaatctcttatattatgggacatagagagagtacagtccttttgatgatctggcggtgcacgttgctttttttttccttcttctcatggttgcttttatatgtatttttttataggataaaaagaatgaggtctgctagctaacatattgttctttctaaaataaacttttaacattccaaggataatatacctgactaggatcctacggtaatgactctgataatcgccgtgacaccaccagaatcctacgtgacatgacacacgggcattgactattttctttttttttctttttccccacctttctcttctcttctgccctctgcatcatgtgagcaaaaaaattggaaacaagagaagggaaataagaaacatcacactccctacgttgtttttctatggaatgaaaggattgtggcataacataatggtctattttggagaaaatgcaaattatggtgttattgaaagagctttagtactatgttccttgactaacaagtacggagggagagaattaaaaaggaacatgtacttaagctgtgttcggaactctgtgttcccaactcccccttcttgtttttcgtatgtttcaaactgctaaacggtgtatttttttacaaaaaatttctatacgaaagttgtttaaaaaaatcatattgatctttttttaaaaaatagtaaatatttaattaatcacgtgctaatgtatcgctctgttttccgtgcggaggagatttgttcccaacctaccgtaacgaacacaacgtagttgtcctaaaataaaacatgtagtagttgtggacttatataatataatattggctactattccctttgttttatattataatccaatttaactttttttttcaaagtcaatcttttaaagtttgatcaaatttataaataaaatataataatatccctaacacaaaacaaacatgtttatcaaactataaccaatgtcacatttaataaaactaatctcctattatagatgttactaatatttctctattaacttaaaccaaatttagaggagtttttttttgcggttatatagttctaatggaacatatattatttgttgaatattactactagtagtacatgattaacaatgtaaccagcgtggcatggcttgggccgcaagaagagttgactgcccagttgaccgacacatgccacagttgtactcccaccttgtgttgtgtgctcaggtaaaaataaataaaacggcgtggcttcctgtgcaaggagaggaggaggaggagcacagggcacatgcggatgcggcgatgtggcagccaagagggaggatagctgggtcccacggtagtaacggccggcttcaccagcagccagcagccagcagccgcccagaggcatatgcgtgcgtggcaccgcgcggcactccacgcggtttctctccagctctccttcacactccacacgccgcgcatgacaacccgcgccacgcgcacacgcacacccacccccccccccccccccccgccccccccgcgccggccacgcttttctctacctgtgccgcgcccacggttctagtaccactagaagtactagtacggagtggtattgagtttctcaaaattggtcttggaaaagtattagtttctcaaattaggcctttgaaaagtacaagttttttaaaatgcaggcacatttttttgccttaaattccctctactaatattttctatcagaaaatttcccccgacttttttgaaactaaaatatactactctaaaattacttactagtagcgaagacaccacacaaatgggacacattgggtttgaggtaaaaggcttagtcttaaaaatccactgaaatcttatcgaaatataatgaaaattcaagtatctagttttgaacgtgttaccataatctggcggcgggggctgactcaggtatcatcttaatgtaattaattgagtctaaataaagcttccattatcttaaaaaactataatctagcgacaactctgggtacattccgctgggtacacccacccatttttgcctcgaatgccttcccctcgactataaatcccaccgccctccctccccctttcccaaccacacccacccacccgcccaatccatccaccaagcaaccacaccatcaccatggcgaaccgctgcgtcagcctcgacgccacctgggcccacctccccgcgccgcctccgccgccgccgcaccacacctggctctcccccgccgccgacgacgcgatcaccgccgcgctctgggcctccatggcgccgtcctccgcgtcctcgtactgtggctccgccgcctcgccgacgccgtcgacctccaccaccaccacctcctcctccgccgcgtcggcagagatcctcgcgggcggcggagcgcgggcggcggcagcggcgacgcggccgagcgggcgcgtgttgaagcggaaggcgcgcccgtcgcggcgcgcgcacaccacatacatcaccgcagacccagccgacttccgccgcatggtgcaggagatcaccggcttccccgtccccggcgcccacaccgcctacccctccgcctccgcgtcgtcggccccggcggccccgcacgccgccgcagcgctcgcgtgcgtgctcccgactctggacacgtccgcgttcctgctcgaccgcgcttcacctccgccgccgccgccgcagccacagccggggcggaagaacgacaagacgcccaccaccacaatggcctccacgccgccgcagccgccggcggcggcggacgaggcggcggcgtcgtcgctgctgctgcaagagctggaggagttgatcggcgcgtcggccttcccgacattggagagctgggggatgatctgattctgacctcgatttctcctctctttttttttctcccataaaatttcagggttttttttggtccgtccgatgcgaggatcggacggctgcgggttgtcctccccttagccaagctgatgatgatgtcgtagccaagtagcgtagcactagaaaccaaatcagcctctctctctcgctctctttttctcatggtgtaattattactcctttctgtttgttgctcatcattgccttcatttagttaacgagtttaatgatatgcttaattagttctaaaccactgtgtcttgattcatccgctaatttgagctgccgtaataaccccaccgtggtgatgatggcaccacgtaatgatgtagtgtgaacgcctttaatgtggtatggctttcgttcacgtcgctagtggctcgactcgtgcgtggccacaaataaaagcgcaggcagggggtgacgtggacagtgttatcctcctacgtgatgaaatcaaattagctggaaagggttaatgtgaaaagcctgcaaagggtaatgtgaaacccggctttggccgtgcttgtctttattgtaccgtggtacggacagctttgaccccaccactggacctgcgacccgacgaccttgatcagccatgatctcgtgggaatatttgctccatctttttcaccttacttattgttcagaattatttgatccacgcttactattctttaacgaacttttatccacttcattttattccaactaaatgtatttcttaaagtatttaatttaccatataatcaatccgtgacaatgaatagtgtgctactatcccaaatataagaaattatggttgaatgtgatacataatggactgaatagacatatgatagtattacaaatctagacacaccatagtactaatgttggatagattcgtagtactaatgtattataatgtgcctcattcgatgctaggttatatatggagagaatattagcaaataatcattttgagatactgctattaaaggttgtttgtgatagtgataggccgagtttagttccaaactttttcttcaaatttccaacttttccattacatcaaaactttcctacacataaattttcaacttttccatcacatcgttccaatttcaaccaaactttcaattttagcgtgaactaaacacacccatagttaaggggttgttatgccatttcaaaccatatcattttttggtaaaattaacaaaaatgtgtatatatttagttttttgctaaactttggtaagtatataagaaattctgtcaaaattttagcaatattgtcaatttaccaaaattttggaattaccaaaatttgataaggtttattttggctataatctaaatacatgtatacgaacacacatttgaaatattaaacgtagtctaataacaaaacaaattacagattccaccagacgaatttatcaagccaaattaatccatcattagcaaatatttaatgtagcaccacactatcaaatcatggcgcaattagacttaaaagatttgtttggcaatttcctagcgaactgtgtaattgatttttttttgtctacatttaatactccatgcatatgtccaaacattcgatgtgacaacgtgaaaaattttgtttgggaactaaacaggcactaagacaagataaaagtaaaagacttgaaaacttatgaagtccgcaacatatttcagtcacccatggtttgagcctctttgacgtacacactgcaagtcgccaagtcctgtaaccggcactcttttgcatttgaagaacataagcatatacggggctacaacttaaatgagtactccaacatgagatactcatttttctctagcagagaatactgatcaatgagattacaaggatcaatcatgacttcgcgagaaataaattattcagaacacacgcattacaacatatcaccacctgaacaacagtatatgcacattggttttctacatatatgtatatatatacggaaagtcgatataacttctacctatttcccttctgtattttgaccttctcaattgattccatcgcatcctcaaatgatttctgcacattatttatcaaacagctcattacattacatcagtaaaaaacaattaagcaaacatttggcaggaagaatatggttcaaatggcttggactgatttctcacacgtcgtgtgtaatctcctcctgccatgcttctaatcaatcaagtgttcaacaacatatcaagcagacagctcaccccaacccaacagtactcaaacatccctaggatgctaacggtactcaaacatccctgggatgcttaatagaaacaggttatctatgacaggatatagcatcccatgtttgcaccgaacatttcagacattctagaatgagtaaagtgcataggcggtccttaaacttgtagggttgtgtcatctaggtccccaaagtctcaaaatgcagattcaggtcctagaacttgttaaagtgtatcatttaggtcccaaatcgacatagcccctctaggatcctacgtggcgctgatgtgacacgccacatggacgtggcgtatcattctctctcttttttttcttcttttctttttctttttcctttttgttttcttctaattcttcttttttcctttcctttcttctgctcgggttacagagaaaggagaagaaaggaaaaaaaaggagaagaaaaagagaagaaaagaaggaaaaaggaaaaggaaaaaaattttaaatgggttccatttgtctcgtcatgtccgtgtggcatgccacattagcgccacgtaggatcccaaaaggggttgtggcgatttgggacttagatgacacactatgataagttctgggacttggatatgcattttgatagtttaaggacctagatgacacaccattacaagtttaagaactgtctgtgcactttactcttctagaattccagtcattggtgcaactagactaaatgcacattgtagtaatttaaaaaagtaaggcatggacatattaaaaatgcaatgccatggtttcgtatgaaaaatggcatatatactagagcataggatgtgagaataacctgaatctactatacaagggtcaccctttactttctactaacacacaatacaagaaagtacacacactctctgactctcatagtaggcgctatatgagaaaaacaatacagtttgtaatccatgtgaaatcaaacattatatatgcagattagatacttttcaacatacaaaacaaaaacaatgacaataaagaaacatatactatcttctctccagcattgttaagttaaatacatggatggtttaatttcctgaaagaaaacttttgctctttctataaaacaaatgaaaatcacatgctgacaccctaaactcttccatagtgttcgatggtacacaattacaatgaaaggttttagaaatcaaatctaaatgccatagattttaattaagtgtcctaatcattcagtccttggctccttgcaagttgcaaggttcaatagtaaacaaccaataggggaaaaagcaaagctgtttctgctgtttgaaattttatatatgaacaagtcatcgaagtgatgccgcttttacttggtaaacacatttatctccatttttttctagacctttcagagtacactagtgaaagtttccaattaactccctccttacttgcttttattcagctcaaatttcataattaccgatgaaatgaacaaactaattgcatgcctaaaaatctgctatcagcctatcacatccttatggacaacaatgtgcaaagtagccactcaattcaatagccagtgggtgtttgatcaatacatcactaagttcaaaagtgtagagggtcaattgaatgagctgcgaaataattcacatagatgcaaggaaaaaaagaagtattgaagaaacgttatgcagggtgctccaaataaaatgataagctaacaaggtgtatacttaccccagaattattcatcttccagatttctaaaatacttccatcaagaaaagctgctccagtcagcagtacactgcagtacagagttgtcaacatgagctaacatctcaaactctaaaatgctgttacatttcaaatactaaaatacttccagcagtagaatacacagaactgctgcaaaaaagtagtgtgtggaatgacatgagtctccaacatcagggtgcgttatttgacagattttgacccaatacatggcattttgttcttcccgtcaccttgctcaaaatctatgtatagtaccagatctggctggtaccaacaatagctactctaatttattttggtagttgctatcttgctggtttaactgtctcagcagtcgttaaaatacaaactgaattgatgagcttcctttttacgaagaaccattggaacatcaatggtcataaagatttgatcctttttcttatggaacagcaacgataatacttttttatggaaccgttgaatccacaccaagtgaattcatgtttgacacaacagaaatggtcataaagactaaatcctcttctttcgtaggtcataaatgggcatgcaatttcaacggtattcattttatctgtactcggcaacatttgcaggtttggttctattttgatctcggtcagacatacatgaacatcctatgctgtcctattatttatgaacttggcaattgctttttccacaatgattccctcgagaaaagccagcaatgtaacggatcagcacaacaatcacgcaatggcggcatatcaaatcagccaaagcaagaaaagcatcagcgcatatgagcagcttcacctggcgaaacccagattgatgaggaaccctcgccgcgtgaccgacttcagcagcaagtcccaatcgaatccggccgaggcggcgccccctccgcccggaggcggccggcgccaggtaccacctccgcgtctgtggccgtagccgtagccgtagtcatacgaggccgacgaggaggaggccgaggccgaggcggaggcggaggcggaggaggaggcgcggctgtagaaggaggacgagcggatgcggaggtcgtactcggcgcggagtcggtcgtcggagaggaccctgtaggcgtcggaggcgaggcggaagcggcgcgcggcgtcggcgcgcgcggccgcgtcgggggagtgggcgtggcggtccgggtggtcgcggagcgcgcggcggcggaaggcggccttcacctcggccttggtggcgtcctgccgcagccccagcgtctggtagtggtcgccgcccatcgccaccggcggcgacgaccgcggcagcttggagaggatctcgccggccggtggatcacgaaatttctcggcgagggagaaggggaaggaggaggcgatggagcgcgacgacggttgcgtggcgtggcgtggcctttcttcccgccgcgcgtttcctcgggccctctaagcccggcccagttaggcagtcagtttagaaaatggaataagtgcactttcactccctcaaaaaataagtcaaatctgatctcgcacatgtcgaggagatatttaactatttgccacttttagacaactatttgccactggacccacatgtcatagacacatgtagacccacgtgtcattgatatagtggtggcaaatagttaaatactaaatctaaaagtggcaaatagttaaacggtgcaaaataactaagttcaacatgacattgagatatgttgaactcttaactatttaaacggtgcaaaataactatctcggtggtttttggggtggtttttcactgacatggcccattgacctagtctagccgctaagttcgcttcgccccggcaggagcttgcccccaactgctgccactaccctcgtcctcccatcgctaccgtcgtcgttgtggagaagggaaccagaaggggagaggaagataagggggagaagataaaggggggaggaggaagaaaggaaagagagaggatgacatgtggcccccataatgatgacttagcggttggactaggtcaatgggccatattagcgaaaaccacactaaaaaccatcgagggagtcatatgttacaccagttttaatagttaagggttcaaaatatctgacattgcaattgagggatacaaattagatttgatgtatatttgagggagtcaaagtggacttattccctacaaaattgtactccctacaagatgctcctaccccacgcgcgggggccttgtacggggagcttaaggtcctaagaacttgtttgttggtacttgatagccaacttctgagaatataaagaagctgattttctaacttctaagtttaatttatttgctaaaatatataacttctgagtatccgagtgataatttgaactattcgagggaagcttttagcaattgcagcttttaacaaaatctccaactccaccaaacatgtcctaagtcgcgtgtgcggtggactagaaaggtattggtggggtccactggtcgttccacttcaccaaaaagaaatcttcccacgcgcatgccccttcccttttttctttcaggaaaaagttccttctgcgtgtgtttcttctctcttatcttgttttggagttgacttgaacaaactttcaacttagatttaaaaattttcaagtcaagatttttgaaaactttcaactcagttttgaaaaatttcaagtcaagatttgaaaactttcaactcagattcaaaaaatgtttaactcagatttgaaaactttcaagtccagatttgaaatttaaacttagagtgaaaactttcaacttagatttgaaatttaaacttagagtgaaaactttcaacaaggatttaacaactttgaactgaagatttgaaactttcaaatcaaatttgaaaactttcatctcagaattcaaaacatttaactgaatgcatggttttttctcaacatactctctatgtccacaaacataatcattatgaccatttaaaatggcaaattttgttataggacatcaaaaatctgttgctgatagatattgtgaaaatgttccatggctaaaaggcactctaaaaaactagtcattttctagaggttatattttgggcttgattagagagataaattctgaagaaagacgagaatgcccctaggaccacatgcttcaaacatggcgttagagtgaaaaatctagaaattatgcaactctaaatttgccatcaccccaagtgcatcactagcatacatcatatttcatcttcactttagcctaagctaaaaatcttttaacactatgtgcttttcatctttttgaaaaatttctttctccaattgagacaaaagtgtccttcagcaaattacctatttttaggttaatttttcggtcatgacacttttttttatgtctacaagtaaattatataaatttttagtgtcctgtaataaattttgctatttaaaacttatcagtatttttacatgtcccatcaatggtacctatttaaaatttctttttgtcttaccccaccttgtaaattgggtgggatgggccaacatgttacctactccctctgtcccaaaatataagagattttagttagatgagtcatatcctctatccagattcatagtaatattatatgtcgagtaaattgtacccacggtacaatatcttggcaagtgggtacgatagagtgtaaaaacttgagaattaaatgtccgagtgtaataacttgacaaatgggtgcgttctagtacaagaacttaacaatttagtattttggtgtatcaacttggctaagcatatgctaggtgagttttttcatgatttcaatatgccattacataataatcatacggatattatcttataatattgaattcaatctttaagaattatactggcacatagtagtacaatttacatccaattacctttaagaatttttttgttttcttcaccttctcaaatatcaaccaaaatataataatttctacatccagtttaattgactttcagttattatttattaggataaaaatataatacacttatacaaatccgcgctagtatattgtcaaaataagtacttaaaacttgattttatattaaaaaatgctccaaataattgagttgttgcaaatttattgtatcaaaatcgtacctagcttgcaagttgttgcattcatacgatcacttataaagttcttatactaaattacacctacatatcaagttgttgcactagaacgctcatttctcaagttattgcatcaaattgtatccacctgccaagttgatgcaccttgaatgcaatttacttttcgtagtaatattatatgtcttatcctatcaaaatctcttatattttagaatgaagggagtacaaaactatactcactgttttatttggggtggcctatcaaagttactgtggataagatttttgatcgagtcgtctataaatatagatatgactatctgaatagtttcagactccgcatagtttacttaactgtacataaacgaaaaggccaaacgaaaaggctgattgtttgttcagtcttgaacttttcggtttataagctggtttacaatcctaaacaaagatagattaaatttaaactaacatataggaggctcgttgtaacctgagctaccaccaagtatatgcacgcagattatctggaaatgtctcaccatttggtgggaattgtttccttttgcatatttgcatgcctcacaaaacatcaagtcaatatacaaagaagcgtgaatcaagcagaaatagctgaataaatgaataatggatatggaaacttcacgacaatgttaacaaatactgtgagaaaactgagaatcatgtgtaaaaaggaaacaaatttgcacgtatgatattcttttcgcgattttctttttatgacaagtgctcgaacacacgaggattcgagaacgagatcgacgcttccaacagccaaatccggccatcaaattgctttctatatatacaacattaagagattcgcgaaaatatttttaaataagctagcaacaaaaccagccgccagagcctcacttgccatgcatggatgataaataccgattaaaaatcacgaggccaatcgaaaaaaaagggcaaaggtcaagaaagaaattaatggcaagtcatcaatccaagattagcccgacttctatataaatcaccaacccctaagcaatcgtcgtactcatcagaactcatgtgttcctaggctagaagaaacctatatcacaccccccccccttttttttttgttgcgtttgataagtagaagattgacgatataatattggtgtgatgtgaaggggatcagaagatgatgaagaagaagagctccctttcgatccaattcaggagaggaagtggtaggatgcagctgccggttcatggatacctctggagtgcagggcaaatagtcctaccctttcatgggtttgcatgactcgggagatgaacccgccattgtcttcctctattgattggattgaagggagctcctctagctacatctctgtcatctctctctctctctctctttgatattactatatcatcatgcatggtatgtgtattaacgttgtttgcagctagcttcttgttcttgattaatttggggttttttttatcaccacaggagtgagtatacaatgacaggaaagcagaagaagaggtataaatgtcacatcttgttttaggttagtttttatgagatagaaggagtatatattagttgtcggagggccggaggcagattgtccaagagccatgattatcaattacgagaaaataaactagcatgtacacggtacttttgtttctttttctaatttactcattctggtcaaggaacaatataatgtatatataaggacatgttgcgttctggttttctgcagtaatgaacgatcatttgtttttcttctcctttttaagctttgatatcaatctaaatatctaacgtttgaatatacatttgttcttgaaaaaaagtttccctgttatatagccctgtttatgtctttatttttgtcctttggattgtatatatattaattctcactctatatttaggcgttgttcagattgatgccaaaaatgatatggttgaaaatatcatgaatctgaactgcctcgaggttattaaatatttaggcgttcgtgccttagtacctcgtaaaccctattcttaatttatttatcacttttttatttttagtgcgcatgaaaatagatggcatggtactttatttagatcaacatgatttttaaaatattgatacaacacttagtttaattatcataaattgattctaaaattgtatatacattcaaaaggcctattgatggatttaaaaacagtagcttgtagagacctaaagatttgcaatcatctcaaggaaatccgttgtatttttatagcattcgctgtattttttaaaagaacagaaatcttatttttatttttctgtcaactgtttatttatgtgggagcgtaaaatcgtaattgatcgttaccagccacgaagcaccaaggccataactaggtgaatatcacgtttaacgctgaggttaccttgtaaatttaatttactaaaggaccaaaatacaaaattgcagtgacatccttatcgtctactccctgctaggtttttcaactcgacatcatatcacccgctatttacatgtaactcgaatagctaaaaaaaattggaaaaagaatagtaacatcaattaggatgatatgaatccataaacaaaaatacaagactaaatttaatttagaaccagagaaaaaataataaaatcaaggagtgaatagtacctacacaacgtagataaaattcgttatttttctttcttcatgtgtagattgaatttagatttaatgtttatatagtgtcttatattatcaaatatcttattaaattttataaatattttaaataactatttaaaccacataaatatatatgaacaccgtagcatataggtgtagaaaatacttttcccctgcccatctcctctctcgtcttctcacggagggccggcggggcatccggagatctcttccccaatctctcttgcccactcatcactctctcccagctcatcaatatgtttgagagaggataggcggtagccatgctttttttttttcctttctttttttttatcttttctttttcacactttaatcttcattattttcttcactttaaatcaattgaacaagttccaactttaacgtttcttcttatatattcaccaactacagttctacatccttcatccttcatttatcaaattcaacaatgaaaatcatctcagtttgatccaacgtcccaggctgtctacactggttcctcccaaaatcgcagagtgcagttctacatccttcatttatcaaattcaacgatggaaatcatctcagtttgatccaacgtcccagactgtctacgccggttcctctcccaaaatcgcagtgtgtcattcatgatcagcgaccacgaaaatctcgcctcggctttcacgataatatagaatgataagataggtcacgtgataagaaagtttaggaatttatggttttagtgaaggtcgaaaattgaaaggttaggacggtaaccctttttttttcttccattacgcacgtaggatttccggttcggcagaacttttcagctacgaaaagttgcaacataattcaacatataactcaatctgtatattaaacagatatcccaggatgcgtccaaccaaaccactcaatcaaaattcactagtatactagcaaaggtgcccgtgcgttgcaacgggaagtgtacaggaaaaaaaattgagaaaaagttaagaaaaatttatattatgtaattaattaaaataagcaaaggtgcccgtgcgttacaacaggaagtgtacagaaaaaaaattgagaaaaagttaagaaaactttacattatgtaacatgtgccagataacaattataaaaacagatagtaaatatctatttctttctttaattttcattttcttacgtttcaattactcaccccttttatatcttcttaatattaagagaattgatgcatggtgtacacgtatatataagagatacatgagctgtgtgtatcaactccaggtgtatagagaactatttaagatgtattagagcaaggataagagttcactttctattatcaacctatttagagacaagctagcatgagaatccaccagaattaatcggtttagttctttgcttcaacagactgcttcagctttggctttgctcaattcctacatcaataatttgcctgctgtctttgctccctggagaataaatttaagaaacacagtacgtttttagttagaatatgtagatatcatattcgcaaagaacaaaagatatatctacatatgcatatccatggcaacgttggtccctattttgaattttagtttactcttatttggaagactatattttgcagacttatatgaaaaaaaaactagttcaaatttctaattgatttgataattttttgcatctctatgtataacaaaattaaaatttgagattttacagcatcactattaattttgttaaggtccacgagaactctaatattgtgcacttagctacactcatccttacccgttaattttgaatttccacagtcaattttaccctagctaaatcgtataataatattattaaaatagcattcacccgttacagtttacgggcatttttctagtacttataaaaattgaggatgtttttgccggtattttgatacgtcatccgtgtttgagtcagtttttaagatcgttcacttttggaaatacagatccatgttttggttggattttaagcttgtttgcttttggaaatacaaaaggagtcctataagaaatctattttaaaaaaaacttcgcatgctaacttaagatgaaagtcagactcccaattgcggctcatgatttcttaaaaaaaattcaaacggatttccacagtaaattttatcctagctaaaccgtataatgataataagattaaaatagtattcatccgttgcaactcacgggtatttttctagtacttataaaagttgaggatgtttttgccggcattttgatacgtcgtccgtgtttgagtcggtttttaagttcgctcatttttagaaatacagatatgtttttgagttggattttaagctcatttgcttttggaaataaaaaagataagaaatctctttaaaaaactcacatgctaacttgagatgaaatatggactactaattgtagcttatgattttctaaaaaataaatatccaagcgaattcccacagtgaattttaccctagctaaaccgtataacaacaatagaattaaaataatatttacccgttgcaacgcacggatatttttttctagttaatacttatatacaagttatattatagttatagtatagttatagtgaaattatattataattatactatagttatagttatagttgaaagtttttcccttaaaaaacttgctgcggttttttaatagtctctaatttttttcaaaaaattacattgtgaattaagagaatttaagcatgattatatgaaggtaagcctatggctcaaacccaagttaccctaggcttgcctcctagagtctgagttttagcccatcctgtcttattggtgacggcgtctagttctccctctatggtaaagagagactttgatttgcagtttatttaatttttcgatgatatcttctgcttcggttgaagagcaatcgttagtggtgatatgtaggtgatcattcggttgaagaatcgagcatagatttcaatgagtctttgttgcttagagtttgaattcagaacttaggtggtgacgatgtgtatccgctttattgacattaggatcttgctacaaaggtttaagaggataagaactacatacatattatgcggattttcgccttccgcggagagaggtttagcattagaggtcgttatcattgtctttaggttggtgttgtagttagttttcttgttttgtatcaacatgcattttgtatttctgcaatcgttttggctgtagactttataataattggttataacttcttagaagcaaaggtcaaaatgaatttcccaaaaaaaaaaaacgccaggtggagggcgagagaatggtatacatggtgtacatgagatatacatgaactgtgtgtatcaaccaaattcacattaggtgtatataaaatactgattcagaggcattagccatgaacatttcacaaattaagagacaagctagcatgatgaatccatcatattaattggtttctttccttaacagactcagcttcttaatcgacgtagtctatcaaggccttgatcaatccatcaatttccctgtgccatcgttgctccctggagaacaaatttaacaacaaccgaatgctttagttacaatgtgtagatatcatattcgcaaatataaaaaaaaagatatctaggtatgcaaacgcttctcaatggtggtccctattttgaattttttttttaatttattctcgctcttttttaaaaacaacttttgattggaagactacattttgcagattttttgtgaataaaaaaatagttcagttttctcttaaaattggtaaattctcggatctataatgcataattttgtgaaaaaaaatcatatttcagttttctcttgaatttggtattttctcacacttataaaaaaattatgagattttacagcatcagtattaattttctgaaggtcgactagaacacaagaatgcacactgatcagctggcatactataaagaacacactcatccttacctcatttgctgctttgttttttcctcttgacaaagccacaagcagggcgctgcaatacaaaaatatattcttagaacaatttataaaaatgcatttgcttatacataatttgctccctcctgatttattactcccacttcgatctcccacagtcaaattaaatatatgtcagaaaaaagtaactaattctccctctatttcatattataaaatattttaagcttttttaatcaaattttattaagtttgacaaagattataaaaaaaataaagcaacatttagaaaactaatttgatatcgtaaatatttgctaagtttctaaaacaaaattttgacttcaaaaaagttaaaacatattacaatataaaaacggagatatcgaaattaactacgagctgatcagcttaagtataattacctgccggttacgagcgaaaagaacaagattacgggcagcttcatcgacggcggctgaggccgagagaagcagcggccgtagctgctacccgaggcggcggcgccgccgctcccgcggctcgtgggcggcgaggtggcggtgcgagggaggtggtcgtaggcggcgcgggtggcgtcgctgtggaggacggtgtaggcgtcgtacacccggcggaagcggccgccggcggcggcgcgggcggcggcgtcggaggccgcgtggcggtcggggtggtgcagcggcgcgaggcggtagaacgcggccttcacctcggccttgctggcgccgcgctcgatccccagcgtccggtagtagtcgccgtcgccgccgggcgccattgatcgatgtcgacgacgaagacgaagctgcaagaggtgtcgggctagctagcttctcttcgcgcgcgatgcagtaatttaggatccaaaaaactgtatacgaagcgattcaatttagatcacaattaatagggcgcttgtagccttttgatttcgcctgcgagtccgaatagaaactgagtctgagttcgagtaatacatttcgatagaattcgatcggatttgtgtttataggtcagtcaaatccgactctcttttgccggaagaagcccctatttttacacgcgcgtaattcaaacgttcgatcaacttcttgatcgactctaattaggaggtgtttcgctctatcaactccttcaccagttattaatctattcatttcccagccgtttttttcacattttgatcagcttctttaacaactgattttttacaatttgtccctttctaaaagcttatttacaaatacacctaaaaacttatttgtgcctacgtctaaaccccacgttggcgtacggcctggatttctctgtcgcgtgtgagattcacgagagttcatatagtggaatccaatttctggatttgaatttttttttacttaggtcaaatctattaccgagtttgaattttaattaattaaactcttactgtttgctgacaattaattgaacatgctctcggccttgatcagtattcgttacggtagatacagatctgatcaaacttcaaaagtcgcaaacaaagttgaaaaggaaacaaacactttggaagtaataatctcaaaccattacccccaactattacagtaaatcactcgcaataatcaaatctgatttccagttctgcattaccaccaaatactccaaattcaacggatgcagttcaagtatgtttcccatttgcaagtagtattctgattttgggggtgcataacagcataagcaaacgatagaatacctctatgtacaggcaactacaacacaagtcagcacaacctttgcattgccagaaaaccggctagctgacttcagatggattaataatcagatctgtatacagcaaacccgttacagtggttagggaacaacacaattttctctcgcaagtgtaggaaagtttcatccgcaatcttatactatactctaaagacccacgagtttccggtgcacgtgttcatggagagagtgttcgtcgccgtcatggtgatggaatacgtatgtcaaaaccccaacgaggcacaggaccgagccgacaaggatcttgtcgtaacgttccacccagtggaacttaatctggctagcaccgtagaatgagagggccaccaaggatgtcatcactgtgatggtactgcaagtggggaaaatacaatcaaacagaagaattggtaaagattttgataaatatctgatctattcacatgccaattaacacaaagcacacaagggaaatcttgaatcacaaaaacactcaattcagctattctagtattcagcaatcttactgatcatacattgcactgcacaaggtatttttataacgttcaatccagctattcttgtgttcaagatgactgaccggaatgcccaatagagtgcacaacatagagatggacctatagttcacaactgaggtgttgctaagacccacccttgaaggttcataacagtggcagggacgcagggtctcaggagattcaaagggttataatgtaagtggttcttaagaatctattaatcttgtcaggcacaccgttgaagactaaatatttatcaaataccaccatttgtttccatacatgtaaagcagtcagtttgtgggaacatttcacatcaactaaagggtaaattgagacataacttatcttaagatattacacctcatataggttacagaatgccatattgagcaaattcattgtgaattaaatattaaaacatttgtagaatccatagttataaacacaacattagctagttggtaaacgaggaaaaagaaacatcccaaaaggaaaggtggcacatggaagtataggagtatttatctttctactttaccacaacatacagtctactaagaaggatatatttcgatgttcattttgtcccaactcaatgtgcttttgtatatctatggtagcctggtaggtgataccttgatgatttgacccaatgaaaaaaagggttttcaatacaaggagattcctataagcctagagtgtgatactcctaagtcctaacaagagcttagaaaaacttctcaacaagacaatcccattattttagtggaaggataaactattattgttccctctttcataatgtgttgcggctataaaaaaaagtatagcaatttattgttcggtagaaaacaagcaatgcaactgaaaacagtggaaaggggtacccacctaaagaggagcacaatgatcgcaaggatcatcatggaggatgaattgccaacagcaagaaacactggaagagttgttgcacagggtgataatgcaggtacaagtacaagacctgcaactgccatcttctccattggatgattatgagcatggccatggccaccttttcccagtgcaaacagcaggatataacttccaccaagaacaatcagcaacagtgatgcaagtttatgcactgtttcctcgcctgctatagtatttgccatagtaacagcagttatcccaagaagagcagtggaaacaacatgaaggacgcctccaaatgcagctgcggaagttaggatattttattagtagtgatatatagaataagaacatggaaaagtaatatgagtattcatcactaatttatgtagaaaatactagggggtagggtacagtatgaaattacaaaatacaagtaactttctaaacgcgtatcatagctgaggctaacagcacaatagtaacacatgaacaaggaatcaaacagaaataaaaggtttattttataagatttagaaattagaacttttttaataaaaaattatacagtaagctttggaggtttgcagacaataaatacaacataggatggaaaaataactacaaagttaggagtctggtcattcaaatgcactttttgttatccaagtgataatgcacagttgaacagaaaaaagaagtgattgtgcgtagtttactgaaatcacaacaatcgtgcaagattaagggataacaggttggtaagctgcaaatattattacaagattaattagaaaagtaagcctgataaaggaacaccaatgccaatgatcaatctacacaaatataaacagcaatagacctcaatcaaaaattttctgtgtgttctgatttaaaaaaatatccccatacttgcgatgaaatacacatatccctgtaattatgacaaaataacatattcacagcataacaaaacagaaagatgcaatattgattcagtttgcattattgttcccaggaattaatcattgatcaacatcccaactaggatattgtgtaactccaagttggatcaatcaaatagttgcaggcttgcagtctataaatcgaactccatgcactcacatacggtacacatcttgcaatcatataataatagcgaagcagcaccgaacttagatgtattcaacccatgtagtcacacaaagtgaaagttgtattgcctgaactaccgttatgtacgaaacaaaaggcgcatggccctgaagttggaaaacatgataactacacattgttgacagaaatacatcccatggaacagagatccccactgaaaagatcacagtagaggactcagaagtttacctatcaaactatgagcagactactcgattgtccaccaattcgtcagtaacagctcaagattttcgggcgaaacttactaatcggtgcatgaaacccacagcatcaagcagttagccacaatccaaatactataacttcagttttgcgatagaacattgggttttttttagaatgcaacaaattcgtcagcacgagcacaccaaactagagtatcgccattgcaagaaatgtggcgcgtgccccctcaccactgaccccgaagatctttggggggggggggggggggcggccccaccgtaaagcggcacagcagaaccgagattggggaaagggaagcgggggggaaatttgggggatactgactgacaaggagggtgcgggagagcggccaccgctgggcgcgggcgacgatggagaaggggagccagtgcgtggggatgaaggagtgcagcagcgacaccgtcgcgatgcccccgatcgtcgacgcctcctccgccgtccactggaggccgcccagtccgaacccgcctcctcctccgccgccgccgccgtccatggcctgatcccgcctcgcgtcgctggcggcggtggggtgtgggagagagatctgggaggagaagcagaagaggagaggagagagaaggcgagcaagtgggagagggcgaagcgggctgcggtggggcccacctcacctcggcttatggcaaattaatcccagttaattacccgtttgctgtggaagtggaactgtggaaacctgtcgatcgtctccatggaaaagaaaatttttgatatttctgactttttatttataggcccgtgctttacaacggatctgtgaaaggactttagaggttcatcctaactctcctctcataaactacatcatattttgctagaaacacggtacaaatacatgcgctcacaatacgcacacataagcactttcagaagactaggctagtaatcttgagattcaaaagaagtcgccacaagcatctattgctggaaagataattagccataaatactagcactcatgtcaaatctaaagaataattagttataaatacgaacacccatgtcaaatctagaacttgaacccggataaactggttcaaccacatagaatctaatcacttgagctacgctcacttcatcaccttaattgtttgtagtatctggatcatttatcgatggcgtgggataccatccggtttaaacatattaggttgattagttttttataatgggcctgttcggctgttatgtttagcagttgtgctgttgcacaaagaaaacaatgtggctgttggctacaacacaatgaaaatgagtgcagccgaacagagccgatataataggttttttaaaatcaatttttataggaaggaagtggcttttaggaggaagtgggggagagaaagaaaaggagcatgactatctcttttaaacagtagaggccagttaaaatttaaattcaaacagaaaaaaatatggtgtttggagttatgttgcttggaaggtaaattttgagtcacggagaactaatttgatgagtagatagatctttgaaaaagttcttcatcattaatactttagtctttgatcctttatttcagttgagctgatcctttttttaaaatgaattaattgattttagaaccatcaaaataagattaaaaataactcttttcaaaggctgtttagatgatatggggaactacactttttatttgcactatagatggcctgataattaatttagagaagcaaaatgttatgtacatcattctttattttatattagacttttaaatagaaattgagatgtcactccatgagcattattacattaaccttttaaaacatttttgaattatgtttttatagtatctctgaagttagtggagagcgtgaattttctggaatgcttctggaaagaagctatccatctagcaaagccgctaattccacaagtgattagtataattaaaaagaattaaggtcaacaaacttgaaaggacacgccacctatttgcctgctcctatgcagttcttttttattttcaccgcttcagaatgtcaattgagaaagaattgacaatgaaagaaaggacaaactaataaacacatcaacttagcttcttccatttaaaagtatgcatgacagtaactcatcaaaatatgttaatgatatcaagttggctcaatgtattttcgtttctattctttgctgtccttttccccattagatcaacaaaatctaagaagaccaattgtttctttggaaaaagaaaataaagataacacttccggtgaatattggttacgtaccaggaaaacagttctaaagttttgcacaatattagtattgggtgaaagctcagatgaactcactatgtataagcaaaaaagaaaagggtgagagattgataactctagtaatatttttcatgccttggatagttatcaggggcggatctacagtagtatgagcggtgtcaggcgacaccgacgactttcagcaaaatctatagcgaaactgtttatccacatgttataacactatgatctaagcataactaacatactatgacaccgatagacacgttatgacactaacgaatcgattttctgaatccaccactgatagttataggtctaggtgaacaatcatgtcattttggtccattcagacagtcacataacaacaatgataagtggacgagtgaaatagatggtggtactcaccgccgaagcattcgtgcgtgcacaggcaaccgcacccttcaagtaactgcacttagtctaaaaagtcaaataaaattaactactaatacattttagcctgtcatgaataaatattagaagttcaataattcatctgtccaatacatactagaacttttcttataaaagcatctcgaatgtataagtaaaattgaaccatatattaaaaaaaaacacaacacgctatgacaaccaactgttgcctataaaaaaaatctaccacaaagaaagagtcaattagttgaacttagcgatgaaaaaaatggtctgccgtagttggctggccgcgcaaggaaggatgtgggcatgtgattagagatttttttttacatggttccacaattaatgtcaaacgttacggtcaacgaaagaaacaaacttttgttcaatcttagggcatgtttagttccaaacaaaattttttcgctgtcacatcgaatgtttggacacatgcatagagtattaaatatttaaatgtagaaaaaaaaccaattacacagttcgccagcaaattgcgagatgaatcttttaagcctaattacaccatgatttgacaatgtggtgctacattaaatatttgctaatgatggattaattatgcttaataatttcatctcgcagtttcctagcggaatctgtaatttgttttgttattagactacgtttaatactttaaatgtgtatccgtatattcgatgtgacatgaagggacgaaattttttgccaactaaacagacccttagtaatcaaataagaagcgcagatgctctaatgtataaaaaatactagttatttacttttcttaatcgtatcacaattagggtttaatgttttggtttgctgatttgtatcaagggtggccaaaatttctgaaattttggtccgaaattttacgattttttgaataaaatttgaataaaatattatcaaattcatgaaaaaatgaaaagaaaatggccgaaactatatcgtatcgccgggggagggggggtccgatagaaccaaaattttggaaatttcaatctgaaattatgacccctgatcacaatcaccctttcacttcctaccatccccatttaaggggagatatctaagccattttgcttccctgctaattcatgttttgaatactgtacaattgcattcttttctcagatggtgggagtatataacaagttgtatcgtgtttgatatacggcttcacaacaaacctctcatatgtgttgttcctgtggaggcagccgaagaggtttacgggtttgtcaagcgaagtgcacatcaatagagtccctcggatgcagtcgtcgcggcattgccgcagtaccctgtcgatttgctccttcattgctgcttagtttcattaggaagtttgcttcccttttttcagttaacctctctcttattatggttcaactcttatgtttatcatgggcgaagtattcgggatttcaattccctaaatgctgtcatttaataaagtgttatgtgttttctttttttaaaaaaaaacccacggtgtatgatgaaaatgtttcctcccttttgaccatgccactgagaattcccctaaaaaagacccgcattattccagacgaggaaaaactgaagattcttgcaacccaaactggatatgccgatttggtagagccagccgtcattagagccgtccaccaactcacgcagcatcaggtagtcaatcaggttcagtttttttcccgtcggaaatctctgaaatccaatcacaaaacggaacagcaaacggctgagcagtagggggacgggaagaatggtcgctttttttttttcgcatagtggacctcctgcaagaacctattatttccgtgcgttggtagagacattgacataatggctatataatcatgttcttcgtgttgaaaattttggaaggcaaatagtttaatgagttgattttgtgattgggactacctatatttattccgtcgtatttttcataaaatatagttaacacgtacatacatcgtaagtccctaagttatatatgtaattttaatgtatttacaatgtaagttaagttgacgtaaatagatgtaaatagaaaatgctagtgcaaatttaatggaaaacttataactagccattagatcttgactataatcagtcataaaatgtgatgataacattttagcaaacactttgtgatttatatttgtttaaaattttattatatgacatgcagatggtagacttcagccggctattatagagagaacaaagagtgatatgtattattgaacttaccttgtaggacgctgatttcttattgttgttataggaatttgaattttttgaaactcgtggatatttccatgtaatttggagatatgttctttttcgcaaatttttcgtcttttacagagtataaaaccaatattttcaggagcaccgatgccctcgtacggagttgctacgaaaatcaatgtgacgtcgctggcatagaaaactcgacactagtaggacttaactgcaaaacgtaaataaaaaaaaacatagctaaggtaagcaaataattccgtttactactacttccctcctaaggcaccgttttccaatacatgaaaatttcatcctgagatatctaaattaattcattcacttacttttctctaaaaaaacatgacctaaattttcgaacggcgattgtaattggtagggcctattcagaatcatgttattttataccataccattatttagtaaaattgataaatatatgatattatttagtttgttactaaatatttatcatacctagagaattgatcatcatatttaaccagtccttaaaaccttgatagcgttagcaacttaccaaatatttttggtaataccaaattctggaaaaattaaaaatgaatataaagtgaacaggtccgttgttcgtaaaagccacacgaattcaaaagacagtagtcttccatcggctgaccaaacttcgcagtaaaccccctgtactctccagaaatcacaatccaacccctaacccctttcctctcctctcctctcctctgcttcgcttcttcttcttcttccccaaaaaattccaaaccgaaacctctcgattcttcctctccaagctgcctcgccgtcgccggcgacctcccgcccaaatccgacgccaccgcgcgccgccatgcctccggtggtggcccactagccctgctcgctccggcttccccgactccatggcttccgggcgcccgctgctcgacgcctcgccgcggccgacgcagcagccgccggcgtcatcgctgctcccgccgccgcagccggagccgcccctccgagccgaccgcctcgcgttctccctcgaggtgcccgaccccttccgccgggagcccgacccgtcgtcggccgcgtcgcagcggggggaggaggaggggggcggcgaggaggagtcccgcgcggttgttgtcggggagccctcgtcttcggaggcggcggcggggttcgccgggaacggcgtacggacggcgaagtactcggtgctgacgttcctgccgcggaacctgttcgagcagttccggcggctgtcgtacgtctacttcctcgccatcaccgtgctcaaccagctcccccaggtcgccgtcttcggccgcggcgcctccgtgctcccgctcgccttcgtcctcttcgtcaccgccgtcaaggacgcctacgaggacctccgccgccaccgctccgaccgccaggagaacaaccgcctcgccagggtcctcctggcgccgcccgccgcgggggagttcgcgcccaagaaatggaagcacatccgcgtcggggacgtcgtccgcgtcgcctccagcgagacgctccctgccgacatggtgctcctcgccaccagcgacccctccggcgtcgcgcacgtccagaccgtcaatcttgacggggagaccaacctcaagacgaggtatgctaagcaggagacgcaactgaggttctcgcaggacggtggaatcggcggtgtccttcattgtgagcggccaaacaggaacatctatggatttcaggcgaatttggagattgatggcaagcgtgtctcgctagggccatcgaacattgtgctccgtggatgtgagctcaagaataccacctgggcgataggggttgttgtgtatgctggaaaggagaccaaggtcatgcttaatagctccggggcgccgtcgaaacggagccggttggagacacagttgaaccgggagactgtcatactgtccattatgctcattgggatgtgcacgaccgcaagtgtgctcgcggggatttggatactgaatcaccgtggggatttggaattcacccagttctttagggagaaggattacacgacagggaagaactacaattactatggcatggggatgcagatattcattacattcctcatggcggtgattgtatatcaggtcatcattccgatctctttgtatatatcaatggagttggtacggcttgggcaggcatatttcatgggtgctgacagagatttgtatgatgagtcatcaaggtcaaagttccaatgcagggccctgaatataaacgaggatctaggacagattaaatatgtattttctgataagacagggacgctgacagagaacaagatggagttccagtgtgcatcaattcggggggttgattactgttctggcaaagattcatgcggatactcagttgtaggtacgatgtctttaatgtatatttctggttttcatgttgaactttcctagtatggctgcttattttctggttttggacagtcgatgatctcctatggacacccaagatggcagtcaagattgatcatcggcttttgaagttactgaggggtggtggcacagatgaggaaacaaagcttgtcctcgaattcttccttgctcttgctgcatgtaataccattgtgccacttgtcctagatactcgtgattctaagcaaaagttgattgattatcagggtgagtcccctgatgagcaggcactagtgtatgctgcggcatcttatggcattgtgcttgttgagcgaacatctggttatgtggtgattgatgtccttggtgacagacagaggtaaggtagtctttcatcatttgctttatggacatgctaattttcaactctgcatgagtgtgttttcaataataattagtggcattatgcaatttagctaataccaattttggtgtatcaacatcattatgtgactaggagtggatgtctgctacagtgctagtgtgctacctgatccatgatgtttacatctctggaaaattatacctacaaaactttattcaactgcaatgtcatatagtcatcaacagttggtagcataacttattcaataacgattttcacaagtgttttatgcactttgctttatggtgtttagtgacgtcattcttttgtcttatcttattggtttgctggtgtgaatgctaactttgagttgtatcttgctagttatcttcctattcctattcttagcatacagttaatatttattcaaaataaaaataataatttggaatattttgggatgcaacgtgccaactccaaatgatttgtggcattaccccacatgagcgaaatttcagtacttagtttatcaggcttacctcttggagatatgttacaactctccaagtgcatgtcttgacttttccttgtgtttatagacatgcttgcatatcctattatagtaagctagtttgtggagccaatactgtaatatattggttgaatatatttgatgaatggagctctttttattggttaatcaccaactgtagagagttaaatgtgtttgctgtaagtccatgtcaaacacctgggctataggcaaaaccaagttaattatcactttgaacccagttattgtgatgagcacatatctgcactagggccataaatttgtaaggagctgcattgaacaggctggcatttataaacaaagcaaatttaggatgtgcatatggatttgcagctgaatttctggataatttggataaaaccatatcatttttcaccaaaccaaatgtttatctaacatttttaataacactattccaaaaggcattcttagttacctcatatgtacgaagtacgctagctttgtttataaatgcccgctttgttactacattgactactctgctccattctttcagttcgttgttctttatgtgtaaattttattttcaatatcttgtttacaagaatggcttatagttccaatttatcttctggtatgggatgtgcagatttgatatattaggacttcatgagtttgatagtgatcgtaagaggatgtctgtcatagttggctgccccgataagactgttaagctatatgtgaaaggtgcggacagttcattgtttggaattaccaaaaattcattagatctggacattgttcgtgctacagaggcacacctccacaaatattcatcgtttggtctaagaactctcgttattggcatgcgtgaattgagtcaacctgagtttgaggagtggcaattggcatatgaaaatgctagcacgtcagtacttggaaggggaaatttactccgatcagttgcggccaatatagagaacaatatccgcatattgggggctactgggatagaagataagcttcaagatggggttccagaaacaatagaatctcttcgacaagcagacataaaggtttggattttaacaggagataagcaggagacagcaatttctattggctactcttgtaaactgctgaccaatgacatgacacaaattgtgataaacaacaactcaaaggagtcttgtaagaggagtctcgaggaagcacatgcaacgattaagaagctcagaattgcttcaactggcacacagagtccagaattagcatcagaatctgctggtgtaactcttgcgttaattgtagatggtaacagcctggtttacatacttgagacagagttgcaagaagaggtactcatctaaatatgattcttttttttcatttcctttcatccttggtataaaatcatagttgatgcatggactttcttcttttgtttgtgtagcttttcaaagtggcaagagaatgtagtgttgtattgtgttgtcgggtggccccgttacaaaaggcagggatagttgcacttatcaaaaaccgaacagatgacatgaccttagcaattggtgatggtattattccctcctggttctgctattatggcatataatattctgtgagaaccaatttatgtacatgtgatatatgctaattaatcttttgttgttcaggtgcaaatgatgtttcaatgattcaaatggctgatgttggtgttggcatcagtggtcaagaaggacggcaggctgtaatggcatcagattttgcgatgggccaattcagattcttggtccctcttctattagttcatggccattggaattatcaaagaatgtcatatatgatcctctacaacttttacaagaatgcgacatttgtcttggttcttttctggtaagagcccttttgcattgaagttttcacactttgaaaaaaaaaactgtttttatgtagaaaattatctaaacgttactgtggaaacccccatgttagtaagacctagtgaaaagaagtggactctatttatgttcagttgaattaccaaagttgttgctttcttaatttttgcaatattcagagacattgtctccaaaatataacacttaattttgtgatctcaggtatgtactttatacagcattcactctgacaactgctatcacagaatggagtagccttttgtatactgtgctatatacatcccttccaacaattgttgttggtattcttgacaaggatcttagtaaggaaacactactagcttatccaaagctatatggatctggccaaagggatgagaagtataatgtaaatttgtttgtcctcaatatgctcgaagcgctatggcaaagtctggttgttttctacatgccatattttgcatatagacaaagtacgatagatatgtctagtctgggagatctatgggcacttgcccctgtcattgttgtaaatatgctactagccatggacatctttcggtggaattggatcgtacatgcttttgtgtggggaacaatagcagcaacaaccatttgcctctttgtgatcgactccatttggtttcttcctggatatgggtaagtacttcatttccagctttcttttatttataggcgaaccctcttttttttaaaatgttttggtgctaaaaatgtagtaaccaacctgatgtttggaactggcaatggctttttaaattctttcctgcaaggcattttgtaaatttcataactgtaaatttctgaaatatgtgttaatatcagttatcctaggaagtaaaatgacttttgagcttatgcaactgttatgggaggagctcctgagtactcttttcgtactcgtaaaggaagtcgtttaggataatgtttaagtcaaaccttgggaatataaatcatgaataactctcaagtcgttgagtttgaaaatgtaaaaattatataaatagatttgtcttgaaaaatactttcataaaagtatacatatatcacttttcaataaatatttttatagaaacaagaagtcaaagttgtgttacgacttcctttatgagtacggagggagtatgtggtctctattttctcatttgtagtattttgtgttgccttgttgctgttcacgttaatccttgtagagttcttttattcctaggaggatattgagaagtagagatatattcaagtggtaactatgatttattgagagggataagtgttcagattaagatatatagaaaattaacatagatgctgctacctctcaatatctcctatgtaaaagggataaaagttgtcctgatacatagttagattaaatgcctctttctttgcaagcatgtttgtgctacatccatcatgtaatgcgagcaccatgatcatgttttcttgaatggatctcctaaagtgaaataggagttctttttgcaatttcttgattgattgcatactgactcaatataactatttcagggccatctttcatataatggggacaggtttgttttggttactgctgcttatcattgttgttgcagcaatggtaccacattttgtaatcaaggcctttacagagtattttacccccagtgatattcaagttgcccgagagatagaaaaattcgagaatgtaaatcaggtgaaccgttcagaagttccaatgacacgtctgcatgacccaaggagatagctatagaaaattctcctttatagaaatttctttttttttctgttgtttttcgcctctttggtgtgtatacgagtaaattcatttagcactaaggtgataggtttagcctccaagatgtatgtatgtaggcatgtgttcatctaacatttactgaaaaggaaatataaattgtttgatgtatgcaagtttctcatccttgtgtcgaccagcacaactgtaaggtgaagagtgttatatacctatattacctcttactctatcactacgatgatcctgtcctattgcataagctgatttatctttgtatttttagtttcttagcttcagtttattcatgctatctgtcacctccacacaagtgcacaacatagggtttttacaccctttgattcagtgaggtaaatgaattttgataatttagaaatgggtgttcattttgacccaatggtattgacagatatggtgttagtttggggtaaatttcaatgctgcaaatgagataactaggctgatttgcttatgtccaaacggagttgatccccatccagttacaaaattatgcattttctgcaggttaacatagaagccattacatgaattttgagaagctatatacaaacgtcagaatgccagtctaaaaattcaaagaaagtaagaaaaaagagacttcacagttatccttttcacctccatcacagcgacagctattgactaatgatttcagatggagcatgttttgagctccggatcacaagctcacaattctctccttggggagaagcagagatttttgatcaacataaacattaccacagaaccaagttcatcactggcaactctgccagatttgagttgctagatttgatctggctctagcaacatatgagctcaagatcacactggatagaaacattgtgaccattcctgtggaggtagcagtatgatccttatgtcagaaaacaaacagaaaagctcctcaagtcgtctcttgaaacgattgagaacgcgaaaatgctgctggattggcctgcagagcctgaggcgattctggtgccgtgccatttttcgcaacatttggctggaaagacttgaatatgcctttatcgtcaggcttgatgccaagggtcgcccagattgaactctttgcagcctcagctggatcatcaatcctaagagttttaggtacccataagtaatttctcgtcttctcttcttcctgcaagctttcttctcttgaatgctttcccaacaccagagaactgcttcctgaacaagaaattttgtttggagcggttgacggcagcacagtagtattacctccagggcattgtgcattccacattccattaggccagccagggaagcagctccacagaggtggcacaagagggattggaacaacaggagtacagattcctggggccggcaccatcagttgcggtggccatgaaggcgggcagggtatcccatcttttaacccaagaacgggctgcatcgagcactgggtagctggcatgagagcaacactgttccatccaagactccaggggagcaccaaagcaggtccagtagggaaaggcaatgccacaccattacaacatcctgacctgttgtttggctctttcataattgcattatctggcatcagattctctgaacagctggatactaccacagaagatgcacatgatttttcttccttgttatcaccagaggccaagggaacaaggtcagtatcattcggctctccaatatcaaggattgaagctgaagacttacatggtggtacttctgatatgaattctgtaggtgtttcattttccttcagtgttgctggaaggagagaagatccatgtgtaataacctgatggtgaaccacatcagaaacatctccaggagctacagtattattgcacgtcatcatcgcctgacagtattttgacacatgcttatttctgcgtcttccagcaccaactgggacattcctcatagctccaccagcggtccaatatctttggcagttcctgcagaagtgcctgggctggtgaacattgtagttgttgaagtagcagaactttgtttccatgctattgcagcgtggacatggcagaatcttatctggcttcttgagtatcttctcagggacagatccatcaggctcagtcttaacatcctcagtcatggaatcgatttctattcttccatccggtctgctgatgccttgtaaatcatttttcttactattgttgggacaaaaaggaatacctttgacaatcaaaagcttgtctgagactaaaggtaagtcattattggtttttacaccatttcctaaattaggcatgacctgaaatggattatacataagaggtaagaaaataataaaatatcaagcagagattttggatcatttagctaaaagtatagcaaaatgttaaaactgtgatagtgtgatagtgtcaagtattcaattattatgaggcatataagccatgttatattcaaaatgatgcaggtgctactggcctaaattttcatgaaagtctttcttcagcttcagctgaatcatgtggggtcacggaaactacctgatggcacaactgatacatcgccattacaatgttctgttgcagtttcaatgtccttcagttaaatataaatcattttatgttatccctgaataatcagagtcgccatgtttgtgcgataagttattgcctaatgttactaagaatttctccccgttgggatcttttctctattatactcagtattcacttgcacttgtaaaactctagttcatacttggggttgctaaaaataccatatgttaacatttcaagttatcactgtgtggctatgcaactgttttctggcgcacttgagtttaagcataaagcagcacttcgagcaaaacattacttcagtttcatagctcaatacttcacatgttagtaccagagctactcagtatcaaacctgttacatagcaacaatacaatgtgcatatgtaaataagtaatgagtgggcattttatttttaaggctggtagtaaaatcatctttggagtcagtttgacatgcaaaattgtttgatgtatggcaaatttgctctgtagcaaatagcaatcgacatgtacgatatatgacacattttcagttccttcttgcagagagctgatcagagtcccttctccagtgttttgaaaccaaattgcaaaccaatacggttttcagaggtacgtacaactactgtttgaaaactaaggctcagttccactatcatagtacatagtataacactacttttccagactccaatttagcatttagagtctgttttttttttctttttttccagaattgcttgctggaataactcatatactagtacgtaaaaagtacctttggcaacaaaagttaacccatactagagtgcaagtgcactgaaatcaagtcctgataagcaatttggttcaaaggcacggactatccagtctatcaggtttcaggacaaacagacttagtaccatctattctaggttctgcatatggttatcgaaagatggttctttgcacaaagaaagctaagataagccaatcaaactcccagaatcttaccccaaatgttgccaagaaatcaagaaaggatagaacagaattttctagaacagaattttcctaccaacaaatatgaggttggggattagcatgggtcactaatataccgttgacccactctatttgttcaaataaatgagctaaaactgaaaaaaaaatgttcttttctctagttatattagtatatttaggccctgtttagttcctccaaaatagtactccatccgtcccaaaataagtgcagtcatggttttccgcgcccaactttaacaactcgtcttatttgaaaattttttgaaaagaattaaaaacataattcacgagtaaattagtatttatgttttatcatcttataactacaaaattgctaattataaaaaaatttaaaataagacggatgatcaaagtagggcgctgaaactcatggctgcacttattttgggacgggggtagtaaaagttttgctgttttggagtactttttacaaaatggatctaagcaaaagttgtcaatttagtatttgccaaaaagtgtattgagagccgtgcatcgaacaccatggcggtatttgaattctttggagagagaaaaaacaagaagaatgtgcttgagaatttgcatcgaacaccatggcggcaaagaattaatcccttttttaaactcatttctcaatctcctaattagccgacacgaactagaagagcaaacccaaagcatcgataccccaaaaagcagccaggaaaagagagaaagagagagagaaagcgaggcgcgtcgcatctcgtccaaagcggggagggagttagataaagattcctctctccgactacttccctattggcattggatgaaatcgatggctcacctcgtcggcggcggcggcggcggcggcgggggggtcgaggaggagggggatggtgcggccgaagagcttgatggcggggtcgtcgccctgcctaagcgcggccatagcggcgccccgatctcgtccgcgctgccaccaccggcaccggcaccggcaccggctcctcctcctcctcctcgggcgcagcacgacgacggcgacgagcggggatgatgccagcggcggcggcggcggcgggtggcatgtcactgggcggaggaggaggcggccgctcgcgttgtgttcggagtaatgacactatagtagtagtactagggggtggaggaagctcggggatggaggaagctcgtggctcgttagctagctctgctcgtgaccaagctcggctcggttcggctcgtttgattttcctaacgaatcgagctgactcgcgagccgctcacgagccagggcatatgagctatgggcctttggaattggattttggtagagaatggaggcccaagagcccaactcg

SEQ ID NO: 5604 - DNA, 16528 bp, Oryza sativa
catcactacctacaaattcacaatttttcacgcaatataacttgtatgctacaagtgagattcgaactcaagacctcaacctccatatagagctcccttaccaactcacctacttaacacatattgactactaacccaatgttattattttgtctatgcttgtctgaatcatttaacatatatttaacaccctaaataacttcaaatgaaaatattatcaactaaatagttatagatctcatcgtgttttataacttttacatagaaaatatcttcatccgatgttgtttgaagaattcaaaatttcatttttcaaaatatatctcactttataacatgtaaattttgtgaaatgaaaatattttcaattataatgttgtagatctgattgagttctatgactttgatacggggcatgtatccatccatgtcatttgaaaaaaaaaactcaaaattttgtttttaaaagtagatctgatcacttgtaatgcatgttcggggatgtaaacgatctctaatagaaatgttgttagttataaagttgtggatatcattgagagctacaacttttatataggacatgtttcaatccgaggttttttgcaaaatttaaaaatttgaattttcactcatcactgacgggtcataactaccacccgtcagagataacgttatctgtgacgtgtgttagttaaagacccgtcagagatgagtggtctcttttgtgatggttcataatactacacccgtcacagatgacatgtcatctgtgacgagccatggttgtgacccgtcacagacgatctgtgacgggttacaagtgcaagccgtcacagatgacttcacatctgtgacgggtcctccctggtagccatatattgaagaggatattttttcggcccgtcagagatgacttatctttgacgagttgcgttggcccgtcacagatgacccgtcactgaagcccggatttgtagtagtgtgaagcagtctccacgtgtatggtttgataggttcaggcatgcagtgtgtgatatggggtattctcagtgtaatggagatcacactgtcttttacaaacatagggggacacacatcaccatcttggctgtgtatgttgatgatatagtgatcactggtgatgatgtagaagaaatcaggtgtctaaaggaaaggctgggaaaggcatttgaggtgaaggatcttggtcctcttcgctacttccttggaattgaaattgctcgttcatcaaaggggattgttctctctcagaggaagtatgttttggatctgttgacagatacaggaatgcttgggtgtcgtgcaagtactacgcctattgataggaatcaccaattgtgtgctcaatcaggtgatcccgttgataaggaagcataccaaagactggtgggacgcttgatctatctttgccatacaagacctgatatttcctatgcggttagtgttgtgagtaggtatatgcatgatcctcgaactggtcacttggatgttgttcataagattctcagatatctaaaagggactcctggaaagggattgtggtttatgaagaatgggcatctaaatgtggaaggatattgtgatgctgattgggcgagtagtatggatgatagaagatctacatcaggttattatgtgtttgttggtggtaatcttgtttcttggcgaagcaagaagcaggcagtggtggctcggtctaccgcagaagcagaatacagagctatggctttgagcttgagtgagatgttgtggatgaggagcttgttcactgaattacgagtgctaagaagtgacactgtgatgcttcattgtgacaatagatcagccatcagcattgcaaacaaccctgttcagcatgatcgcactaaacatgtggagattgataggttcttcattaaggagaagattaatagcggggtgcttaggttggagtatattaagtcatgtgaacagctagctgattatctaacaaaggggttaggtcctagtgagattcaatcaatatgtaacaagatgggtatgattgatatctttttcccatcttgagggagagtgttggtgtaaatatgtattgtaccaaggacctatctgtaaagtgttatgctaatagaatagatgaggaaggggtgagctgagtaggctaaccctaaaaaaattccccaaattgaacaatagcaaaaatcagccgtacaacctgaccatgtgagtggttccttggatcggtataatcctctgcctgacaggcgacatttggatcagtcaacaaagtgcatcattgcactgggaaaacgctgcattattggacgcaactagtggagaggaaccaatcagctgctcgaattctcgtcctataattcatttttaagataatggattaagaaactcggcctctacattcatgagagaatgcacacagccaatctcgtgatctcatcctataatttggctgcgtcattgaaagaatcatatgaaaacgtcgattttgtacgtaggatgctaccaacaggggattgcacgaagaattaaagttagcaagatgttcgtatttagtccctactatatttatgtggtttgcttttcgtctctattatcactatttatcagacagaactcaccccttaatctatcaaaaccatctgaataatggtttttactacttaccagaataatccaaaactctaccttgcaacgttagtagaagaagcagtaaagacaagtacactagcttatacatggccggtttggaataaactgctctctcttttactgatcgacagatcgagtattcagttacaccattcgatccaataattcagggaaaaactggaaataagtaggagacagttgcagcagtttaatcagctcgagacggcatgcatctgcatataccatccaagctaatactagtagaaagtacgtacaacggacttacggacacgtactgtgtactaccatacgcgtcctttcaagttcagaaaggacactgaatttctgatcaacggtccatgcatgatgcatccccgattacaatttacaaatatgcaacacattccatgcaatccagtcattataatgttcgataatcaaaacaatcattttcgcctatttttcctggaaaaacttctattaaaagttgaggtcagagcatcagcaacttgtcgattgcaagtgcccggccaagaagggtagaataatcgtcagaatcttcagttagctgatcctgatcataattcataccgtattcataatagaataagtaccttgaagaaacagcgatcgagcattcgagccggtccaggtgaagctaggctaatcatgtgagtattgcataagcagattggaagagaagcagcagcagcagtggcgacatttgtcaggttcgttatggttgggtagccacgcgaagttgtgtactttgtgtacggactctacactaggcaatcattagtggtccaggtcagaaaactgaaaaaattaatatggtcatcggtggcgtacttagctcattaactatgatataatgttcatcattggtagtaatctaaatcactggagaaatcagctgagaaaatccgtaataaatttgctattcgtatgattttagtaagagcaagtttaaatagtatagtcaattgttagatccaaatcagtttaatatccaattcatacaataattacctataaacatatacaacactattaatgtctggtcccacttgtcatatatacattgcgtcttagagtctgtactgcagctgactacaaatctgtagtccgctactcatctcttccctcttttatctcgatatgtgttcatagctgacttataatctgttgttgtagctgctccaaccgacttgtgctttggaacggaggaagggggtgtttagatccactggcaaatcttttttccctgtcatatcgaacgttgaacacatgtacggagtattaaatattgaaaaaaaaactaattacacaatttgcgtgtaaaatgcgagacgcatcttttaagcttaattgtgtcatgatcagacaatgtggtgctacagtaaacatttgctaatgacggattaattaggcttaacaaattcgtctcgcagtttacatgcggattatataatttgttttgttattagtctacgtttaatacttcaaatgtatgtccgtatatttgatgtgacctgacaattttttttgccagtgaaactaaacacaaccgaactgtctctgatacctacagcttccgggcgcagtaaaagccctcctccgcacgccggcggcggctgcatcgatctcctccacttgagacttgagagcagtggcggatccaccatggggtctatggggtctcgagctcccactacctgtgttgtaatcatgggagtccccataaagaccccactaaaattttctgccatacattcattagaagagggggctataaatttatatagtttgtttaaactctcctattaatcctcctagatccgccccttcttgagagagatggcaacgacttcaatttggaggtgccagcaccacaggcccacagcttagttggttttgctggccactcgcctccccattagatttcaacctaataatacaagaaaacgatgtcctcactaaagactaaactctagctactgtcatagtacatacgtaccgatcaacacctctgttatatattcatcgtatactttatacaattattggagctattagcacactatcagtcgccgtctcaagtctcaacagaccaaattatcaaagcgtcgacgctgaattctttgtggtaataattgctggtggtatcgcatccgtattggtgggacaatatctagtgttagtctaagcacaattagcagtatagtatatgaatgtgtaatgtggatagctagacagatggaaaacaaaccgtcctttgatgtatactctagatcactaatcccagacgtaaagaagaacggcaagcttatgaaaacacgcagaattccagaaaagtttttcttttgtgtgcaatggctacttggctagtggcgcgcatattgattgatcgtattgtagctagatcccattatatggtcctacttgtactatgtccagtagttacccagtcgataccaacgggacccgcgatgtcgtatctcgtatgtgttccaactggcatgacatgattattggaagcgacttctgctatgttggtcaccacttcaccagatactcctcccgtctcgaaaagaaacaacgattgacttgattcgtaccgcgaatttaaaccttgttctttttttagacggagtaagtaggcaattccgcaattaaattagctgagcagtgcactgcgtgcatacacttatgtcttccgcatgcgaaaacaaaaatcacaaaaataatataaaattccccaaaatcaaaacctgaaaccatacccccccccctcctgctccatcgccggcggtggccgatcccatgcccaccagccgtcggaggccgagcctgtcgccggacccactgcagctgctcctgccgtcatgctagatcaccccgctgcctccggatccacgtgcgcactcgctgggatgggggaagggggtggagtggcggcccaatctgcgtgggagggagaggggatgccggatctcaccgttgccacgcctcccgcctcctgcctcccgcccgcccaccgccctgcactgatggagaaaccctttgtagtcccggttcgtaacccccctttagtcccggtttccaaaccgagactaccaatccgggactaaagatcgctatctttagtcccgggtgaaataaccggaactaaagatcaatctttagtcccggttggtaaccccaactgggactaaagatggctcagccgtcccggttggtgttaccaaccgggactaaagatcgagctgacctttttttttcatggccctgttgctgcatggtttatatatatataaaccatgcatatatatgtttcagtacatatatgcatatataatatatgcatatatatattatattatatttatatatgtttcaatacatatgtacatgcataatatatatgtatttatacatatatatgttatgcaaatgcatctgtgtgtgtatgaccaaaatatatttacattatagaaaatgtgtacacatgcatatagaaacatatgtagtcatgtattaattacaatccattatatgtcctagctagctacgatttcgatgtagtagtcgctagctcacaagctaaggacctatgaattgtgtttccgtcgtagtagaattcacccttgggatcaaagatttgttcgttgatgaatccaaatgacggaaccgataccaagccctacatggagtttaaagctatgattcgtagtagcaattaacataacaagattttcttaattaacagaggaacttatgacggtacctatctataagttcgaaaaccttgtcaaacgtagactcttttttatccattgagtcatatacgttgacggtgcaggccgacaggtcgaagagtaaaagcacccagtggaatctgcaatgtgcgtgggatgcattacatatgaaacacttagcaagttcgtacgggaatgaaatttggtataggaagacagtaaaattaaactaactctgtgttgtagggcaacagtatgaacatcttgtaatgctgcaccttcaggagatggacgagattgtcctctgtggcttgcggatattggtcgagcattgcgacgtttactttccgagggtcgatgaatccagtatcgaaaactccccgccgtcgggccttttgaatctccattctacaacgataaaagggagtatattattttctatagtctacttatatacaaggacctaattaattaaaggagacgtattaagaaatctaactgaacgatatacttacaaaatccagcaactcataatagagacgtcgagggcatccagttggtatagttcgtagattcccttgaaattgatccagagaatgtcatctccttgcaagaagtccatgtccctgatcctcgctccgatcatctctctaccagtggcgctcatctccatgtacagctgatggaacttgtacatttgtgtgggtagggactgcagcagctcaggcttgacaagcggtttaccgagttcgtacatgtatttcacttccgccttttcgattggtgcgactcctagcaattgatccgtagttagaccggtgtcagtaataaattcttctatcgtcatttctttaccggtcactaacggctcaatctcctggtttggttgctctccaagctgagggactggtttggactttccagaagatgctttcttcagcgttcgctcatagtccgatagcttaatggcctccttggcaggtgcagacatacccctgaagaagttcatgacactcgggtctataggaatcttcttttctggacttcgaggcttgaattgtctcttgacttctgatgccatgtaagcgtcaagctcctcttgcgtgcaatcgtaccccgggtccttgttcttggcggcgtcagctttcgccttcttcgttgcccttgtgtgggcaggcggtggagcttggggggcccttgactttgaaggtgccggaagaggagcttgcggaggagtcggtgtaggagctcgaggaggagtcggtgcaggagcctgaggaggagtcggtgcaggagcctgaggtggagacggtgctggagcatgaggaggagacggtgcaggatcctgaggaggagatggcggagccggaggagatggtgcacgagacgccgcttgtcgcccagggaggatgatgtaccgcctgcgccatagaataatggcatggcttgtgtctcgtagatgcgtctcaccgtctcctccagggtaatccagcttgaggtccacgtacgttccttcgaccaactcaacttcgaccttggagtatcctgctggaatcggcctgcagtggtaagtacctgaagggtccgttgggatggctatgcccgacgccaccttcatgtggtgagaggttatttattagtaatcaacatatataagcaacaactagcggaatgggcaaatctaaaatatataaactacgagcttacctttattgataagttcttgaaaggaatatgcagctcacatggtgtccgttgagtgatgtcatcaacggggcaggtggattcgtcctgggtttgcatggcgtccatgctctgtgatcctacctgccccgttgaggcgcagctgctacggtttcctgacgggctcaccattgcaggaggaatggtcggctagggatcattggaccgatgtgcggccatgcgttcatcaaccttccttgccacctcctcttgcatgctgagctcgtagctcgataccctgaactcaagatctgcaatcttcgcctcggtatctctcttgctcctcatccgactcttgtacgtgtggatgtcctccttgaacctaatcttccaaggaatcacccctttccctcgtgttcatcctggatgctctggagtctgcagggcgagtgacagctcgtccctctctctatctggtcggaacgtgccctgagaagaggcttccactgcgtctgttagtcgacgcgcagcctctcgtatctgatcgccgaagaccagtgagccatcagctgggttgagcgttccaccgtaagcatagtactagaacttcgatcgttccggccaattagcggtggccggttcgatacccctctcaagcaagctagcctccatctcctcccacttcggcatcacgacgctatagcggcctgaccccaagtggtgatggtacttcttcttggctgcattttctttgtttctttccatcatcgcctgcccttgttcactgtcttatatgcaacgaactcgtcccagtgatcccttagctttgggaatgtgtcgaagttcggtgtctgccccttcaggatatatttcttgtacagctctcccttgaaactctgaaactgttctgtcattttcttcagagtccactttttcactttgtcctctgtacccgcgggaagggtgaatgtctcgagcattgtggtccacagcatctctttctccgaatctaggacaaagctctcatgatctccgcgtgcccttgttcttcgccagtacaccgtactgacaggcacgttatcccgcacaacccaaccgctgtgacgtacatagttcttggcggcttctgccggggcactaggtcgtccatcttcttccacttccattacgatgtgccgaccctcaagcttcttcgcggcacctcattgcccacgtgccctcctctgtccaacggagggttgacttccactagcctcctcctcctggttcccctccacatccctttccacgtgctcctcctggttcccctccgcatctctctccacgttcccttcctcgttcaaatactggtttggatcctcgtttccctcttcttcgttccagtactggcttcttccctccgcgattgaatcgtacaatatctgttcatcattgcgatcagccatctgttcatacaggaaacatctgctaagtcatgagacatttatgttttaacaatcttatattaaaactcaaataatcttatatgctaagacaaaaatagccatgtatgctaagtgtaactgtcgtatattagaaccctacacaatcttacatgctaagtctaattacaaatctaataatcttatactaaaactcaaatagtgatatatgctaaatctaggtgacgtatattataggaccctagctagtcaataattatatactaagtctaattacaaatataataatcttatattaaaactcaaataatcttatatgctaagacaaaaatagccatgtatgctaagtgtaactgtcgtatattagaaccctacacaatcttacatgctaagtctaattacaaatctaataatcatatactaaaactcaaatagtgatatatatgctaagtctaggtgacgtatattataggaccctagctagtcaataattatatactaagtctaattacaaatataataatcttatattaaaactccaataatcttatactaaaactcaattagtcatgtattctaagtgtaactgtcgtatattagaacactacacaatcttatatgttaattaagtctaattataaatctaataatcttaattgcattacaaatataacaatcatatatatataattacgtcacttgcctgggcgaattccttcgagggctagctctaccactccggcttgagggacgactccgacaacgtcttttctgcaagatacaaaaagatgtattaggataaacgcgaagtaacatatattgcatttgacgttcacgtttcgttcacgatatcgttcacgttcgcgttctcgttaaggtcacgtttcattcacctacgtttgttcgttcacgttcattaacctgcctataattgcatttcacgttcacgttcgttggctcgttcacgttcgtccgacaacgttcttgttcacgttcattcaccttgttcttgttcacgttcattcaccttgttcttgttcacgttcgttctctcgttctcattcacgttcgttggctcgttcacgttcgttcgctcgttctcgttcacgttcattcaccttgttctcattcacgttcgttcgctcgttctcattcatgttcgttggctcgttcacgttcgttcgctcgttctcgttcacgttcattcaccttgttctcgttcatgttcgttcgctcattcgctcgttcacgttctcggtgtggcggcagcgggacggcggtgtggtggcagcggagcggcggcggcgtggcgccgcgcgcggcatcggcgtggcgcggcggcggcgtgcggcgtcgcggtgtctcgtggcgcggcgtcgtgtcgtgacgaggtcggcgtcggcgtctgaaactcggcggccggcggcaaccgagagggagagatagagatcgagatcggagagagagatcgagagggaggcggcgcgcggtggctctcaccccagagatgcggcggcggagaaggaggcagaggcggcggcgacgacgacgagcgcgagacgacggcgagatacggcggcggtgtcggcgcggggatgccctaggcagtggcggcgaaggagaagccgagagagatcgatcgggtaaaaacttctaagtgttggtggagaagacgagggcgcgcatcgggaatatatatagccctagatctttagtcccggttgttctcatcaaccgggactaaagatcttttcccgctatttccaaattctttttaaacccggttagggttaagaaccaggactactgataagcgcattgaatattattttccattacatatgtgtttctaaaatagaagataatgcattacaattatttaaagtacaaagattaatgacaattacttcgaaaaattattgttgtctgtaataaattaagtggataaaacgtaataagcaaatatatgatttaaaattaataaaaattctaataatcatatatacttagcatatgaatgatattattaaattggtaaaaactctaattaacatatgtatatacatacggcatgatttaaaattaataaaaattgtaatcatcatatatacttagcataggaattatattaaattaaattgttaaaaactctaattaacatatgtaaatgccacatgcatgatttaaaaattttaaaaattcgaatagtcatatataattagcatatgaatgatagtaaattaaattgtgaaaaactctaattaacatatgtaaatgccacatgcatgatttgaaacttttaaaaattctctagtcagttataattagcatatgaatgatagtaaattaaatgttaaaaactctaattaacatatgaaattgccacctgcgtgatttaaaacttttaaaaattgtaagtatcgcatataactagcatatacatgatttaaacttgttaaaacctctaataatcgtgcgtaattaacatatgccatacatcaattgatttatatggataatcaatacatccaaaatagtttacatcgtgtacacaataattacggcaatacatcggcggtgacggttgaccgcacgtactttctcctcactattgttccctccttgtgatcgctacgtgagtaaggggtgtcttcatttgataggaggatgctagggttaatcgtcaccgtgaaagggggttgcccatccaactgatcgtaatcctcgtcagtcttgtcctcaactccgatgatttttcttttgcctgggagaaccacgtgacgcttaggctcgtcaggccctctacccttctttcctttgctagacatgtccttcatgaaaaagacttgtgttacatcattggcaaggacaaaaggttcgtccgagtatccaaccttgttaaggtcaaccgttgtcatcccactgtcatcaatcattacgcctccaccagtcaacctaacccattggcaccggaacagagggaccttgagaggaccatagtcaagttcccatatgtcctcgatggcaccgtaatacgtgccagttgttccatcgtgtcccatggcatcgacacgaacagcgctgttttggttcgtgctcatcatgtcttgggctctcgtgtagaatgtgtacccattgatctcatatccctggaatgtcgcaatcaacccagacggtccccttgctaggaaggcaagttgttggttgatcgaatcgttacccatgagatgttgtcgtatccacgcggggaaagtatcaatgtgatgccgtgtaatccatgcatcggacttaccgatgttcctggcgtgaactagagccaagtgctcctcgatgtaaggagctaccaatgaagattgttgcagaaccgtgaaatgggctttacagaataaattgttgtctaccgtcattattgctttccttccgagagttccctttccccgtagtctcccttcatggcgtgattcaggtaccccgattgggcgaagatcttcgataaattctacgcaaaattcgatgacctcctctgttccataacccttggcgatgcttgcctctggacgagcacggttgcgaacatacttcttcagaacgcccatgtacctctcaaaaggaaacatgttgtgtaggtacacaggcccgagaatactgatctctttcacaaggtgacaaagcagatgcgtcattatattgaaaaatgaaggtggaaatatcaactcaaaactgacgagacattgcaccacatcattctgaagggctaatctatccggatcgatgaccttctgcaaaattgcgttcatgaatgcacatagctttgttattgttgcccggacattgtctggaaggatagcccttattacaactggtagcagttgtgtcatcaacacgtgacagtcatgagactttaggtttgtgaacttcttctccttcgtgcttattattcgcttgatattcgtggagtatccagacggtacctttatgctctccaagcattcaaacatactttccttctctgccttgctaagagtgtagctggctggactcaagtaatggcttcctttctcctttggttccgggtgaaggtcgtcgcgttgttccatatgctttagatcattacgtgcttccagtgtatctttcgactttccgtatacacctagaagccaagaaggtttacgcaaaggttcttagtgaggtgcatcatgtcgattgcgtggcgtacgtccaagaattcccaatagggtaactcccaaaatatagagttctttttccacatcgccgcgtgaccattttcgctctctataggctggcttccaggcccctttccgaacactactttaagatctttaaccatagcaaacactgttttcccgttgcgatgtttaggcttcgtacggtggtcagccttatgttcgaagtgcttgcctttcttccgtaccgggtggtttgctgcaaggaatcgacgatgacccatgtatacaaccttcctacagtgtttaagatacgtactttctgtttcatccatacagtgagtgcaagccttgtacccctttttggactgtccggataggttgctaagtgcaggccaatcgttgatggttacgaacagcagcgctcgtatgttaaactcctcctgtttatcctcgtcccacacggggacaccttccttcttccacaacagcctaagatcttcgaccagtggtcttaggtacacatcgatgttgttaccaggttgcttggggccttgaataataatcggcatcattatgtacttcctcttcatgcatagccaggggggaggttgtagatacacatcgtaacgggccaagtgctatggccgctgctcatctctccaaaaggattcatgccatccgtactcaaaccaaaccgtatgtttcgtgcgtcctttccaaattctttaaattttctgtctatgtttcgccactgcgaaccatcggcggggtgtctcagcatcccgtcctgttgacgctcttcagcgtgccatcgcatcattctagcattccccttgttcctgaacaaacgccttatccatggtattatagggaaataccacatcaccttagcagaaattctcttctttgttagctgcccgtcaacttctcctggatcgtctcgtctaatcttgtatcgtagtgctttgcaaacaaggcatgcttctaggttctcttactcctcaccgcgatataggatacaatcattcggacatgcatgaatcttctgaacttccagtcctagcaggcagactatcttcttagcctcgtacgttgtctcgggcaatttgtttccctccggaagaatgttcttgacgagttcaataaattgccaaatgccttgtcactaaccccattttttgccttccattgcaagaactccagagtggtatccaactttttgtgcccctgctcgcaacctgggtacaacgaagttctgtggtcctctaacatcttgtccaatttatgggcttccttttcactttcgcagtcctccttggcgtcctacaacatctgaccaagatcatccgcaacgtcgttaccatcagcatccctttcctcctcgcccgtttgatttccttcaaatccaacgtactgagcaaagtccggaatattgtcgtcttccacttcatcttcttccatttcaacaccttgctctccgtgggatgtccaacaattatagcttggcatgaaccccgactcaaacaagtggaaatgaatagtcctggatgcagaatactccttctgattcttacacttattgcatggacaacaaataaaacccctttgcctgttagctttggccactctcaaaaaatagtgcacgccgtcaataaactctttggaccgccggtcagcgtacatccattgccgatccatctacatgagtcgaaaaaaaatcgtacaaaaataattattcttacaataatgacagtcatacaataattataagataattataaactgtttcaacagtcatacaataatgacatatctttattcatacaaaaatcataaaatattacaccaaataattcttatttactatttctaaagttttaaactaattttaatgtgttttacttcttttaattttaattttagtttgttttctagtattcaagattaactttcactatagttttccttctcaactattttataaaaccttctttagcaaatcaactaaatttctatatattctttcttccccacacaaattttctccctcatcaacttacaactaaattttggagacaaaaaagtgtgcaaaacatagctgcaaatgtaatatgacaaaaaaacattgaaggatgaagttgcaaaccttttaggcacctccgatttgtatgtaattaccaaaataaatttactagaaattttggcatgacctcccctcttttttgaagaaattttgaagcttgctcgggcagctggaggaggaagaagacatatatatatataggggtgggactttagcccggtgggctaaagatccccgagatcccaaccgggactaaagttacgatctttataccaaccgggactaaagttacgatctttagtctaaccgggactaaagatcccggagggcctgacaggccctgacagcatttgaaccgggactaaagatgatctttaccaaccgggactaaagatcaaatatgcccgttaccttttttaaccgggactaaagatcatctttagccccggtttttattgcatccgggactgttgtggaattcggccgatcgacgaaagatggcttctccaccaatgctcccgcccgccgcgttcttgccaggcggtggaggaggaggagctaatgagcctcccgcccgctgctgccgcacctcctacccaccgccggcacaccacccgcccgccagtggaggatgaagtgggagaggagagaaaaatgagtggggagagagataatgtgagagggtatgaaaaaatgaaaggtgac

SEQ ID NO: 5605 - DNA, 30351 bp, Oryza sativa
cttacattgtgaaacggaggaagtagcaacaaatacctgatgttactaaaatactaataaaagctttacatacgcgtatataatttttatggtaatatactaatgtctataagcaattttctcatcttttgaaagtgcccgtaggggaaagatatgtgtacgtgtattcataggggtgagtgtgcgtaagttgtgagcgtatgcgctgtagtatgtttcaaaaaatgtatttttagaagcatctcaaaatataatatttttggacggaggtagtggaacagcccgacaggtaggtcccacatgtcatgccattacgggctggaccggttcacttcccttcaaaagcccaaaagcccacttatttgtttctaaggcccatggacaagtaggcctgacctgccatcccaaaccccaaaccccgcatttctctttctccggcggcaagcactcgacctcgtcggcggcgatgacccgcatcaccgcgccgccgccgccgtcctcgccgccctcatccccgcctcccctccgccactcccccgctgccctgggcaccccgcgctcccgccgccgccactcgccttccccgtccctcgcgctcaccccgtcctcctccgcctccgcctccgcctccgcctccacctcgtcgaggcccaaggtgcggccgtcgccgaggagggcctacgccgcggctcagtgggtggcgctcccctctcaccccgcattctcccgcggggacggcggggagggcctcggcggcggcggtggcggcgccgcgtgggatgcgtcggcgtcgcggctgtacgtgtgggacccttcggcgcgaggcgtacaccggatatgcgtgcgggttcgcgatgcggaggcggggaaggacggggatgatgtcgccgtggaagccgccgtgccttccgaggtgaggtcgtttcctcttgtggttgtgtcagttctcacttgtaaaagtgatgcaattcctttctagacactgaactggaggcatttgtttgagttttcacgtttgtgaattaggtcaacttgcaattcactaacaaatgttgtgctagtgagtgcaaaaaatggaattcttagtgtcgcctagggggtttgtagtttaaaatgtgttgcaggaaataaacatatcgtgtcatgctatttttgatactggaggtagtaattagtagctgatgttgcctatgctgtccagatgttgatgccggagactgatcttggttacaaggtcactcatttatcacttaataccgacggttcatcgctactacttgctggatcacataacataagtattctgtatgtgcatgagagggtttctgaagatggtgataaggtcatatgcaggtacataagtccactatagctttatcttatgttattagtattgtactggtatttttcccgaccatcttgcaattatttaagctgcaataggttgttgcatatatacatgcagcatattcatagccgtgaacactaagagtaggtttctctgagtactcttatcatcagggtattgaagaacgcaactccaaaattttatttcaccttgctctttagatttatgacctgaatcattatttctcttcctttttttaatatcattactcatatcttctttctttcattgtattgacttgtacatatggaccttacaacaggactgtgccagttgcttctcagatcttacctagcaacaatgatggcatcaaagtactgcaaacatcgtggcacccttttagcagtagtcattttggagtcttgacatcagatgctgttttcaggtttgataaatgagtatcgatgctagatggaggaattccactttatctatgcttccttgctatttattggatttgattggaatggaaatacgtcttttacatccacacttaaattaattgaagacaacacttgcttttaaaaataattattgcatgacccttttatagaagttttgttattatttctgcaggttatttgatctgtcatttgatttagagcaaccagagcaggagttctatttgcaaccaattctacctggcaaatgccagaatgcttcatcaatttgtccagtggcattctcatatgggagtgatcatctgtgggatagattttcggtatgtttcttgaatattgatcccctaaatattgtagaagtcatctggaaaaaaatatagtaaatgatctacagtgtctttattagctgaaaacaaaaccagaatgatttttcatccgatgggattgttttgtaatttagcaagcaatatcatagcatagttaatattaaaccacaaaataggatattagagtcctacccgaattagccttatagaatctactccctccgtcctacaaaaaaccaacctaggtggggatcgctccccacctaggttgcctttttttgggacggagggagtacttgtttgcttcacacatgggattaaccttgcagtttctttatttacatctgtagcaagatttagggtgtcacaagtcatattactacataaatgaacttggcagctgattgcatggtttctacgcccaaaccctttttttctggaacatctaataatgtttgtccccactattcatgaaagagttactggaatacttttgatactttatgcatcactttctttcatgtcaccttttcaattggttgtttcgacatatgtaatatttttagtagtttcggcatacttcgtatgtttaatggctcatttatgtgcttaatttcacatgtaagcctgtccttttacaggttttcatcttattcagcgatggttcaatttttgtgctctgccccattgttccatttggaaggtaagtattgcatttatttctgccctcccccacccctcttttctctctattgggaagaaggcttacaacaatttgacagcatgatggtcctaatttgttaaaacaaaaaaaatactgtactaattttgtttatgggaaataaattatggtccctgcagtttcacactttcactttgtagtcttgtatttatgaaatgcgaccttaatgatatgatcatatggtgccctttctttatctgcatattggttttgactttattttttttccctgtgatgcagcgattacaataagaagcatattcaagaaatatatgaagatgttaattcatttggattgaaatcctcaaaccaaaatgttgtcaccaactcacgtttggcaattgcttggttggaagcaacgtttcctgacttgtcacgtcagccagctgataatagtgcattgatgtctagagctcatccatacgcatcattagatgattctctaactttacaggtctgcttctatttgacttggtgaaatattgttcgaaccaaaagctagtggactatgctaatgcaatgaccagagaaatgtgaatttggtgctcatgcagctggtcataatcaatccattgttttttagtatatgagatttattgttttgtaggagttaggagctgattggtttgcgaccagacatttccacaacttgcatgtagcggcggtgtctaccgcagacatgtaccgcattcacatgtctgcatgaaaacttttgtgctagtacgatttgctgccacagtttggaattggtagtgcgccccagggttcacctttctgatcgaaaaccgcaaaagccgctcggttttcgtgaaactgttggggattggtttgtgaaaattgagtgtttttagatggttttcatacggagttgaccaaatttgtcagattttacccgtttttgcttagtttttggtaaaccgaaagtggttttcaccttgaaaatggaaatgtgaaccctggtgtgcacaagatttgcgcttcattggctcaagaatggccataattactattgtactcagttttggtcatgacctaaaccatggattaagttgtccagatagttcccatgtttttctgggccagttcgcaatggctatgacagaaagaaaggaaaacaagagacagcactaactaaaacttctgtcttacaaaatcatgtatgatttttttgaccggaaaacattaggggaggctatttgactttattactctaggtctacaaaattctgtaaattagtttctggtactgaatatggaatttcttgaattaataaacaaccgcaaatctggtacttaagatatttttttattaccattttttttgtattgttgtaatgtattgatgtagtttgtactttgtgaaagagaaattatcaaaatactagactagcttacttggtaatttttgtagaactggacaatcattcttgatatgacatctgataatccaaactatagctacctattgtcaatgtacatgtaactatcttctacatttttgtcattagtaaatatgatttgattgatactccatgcagggacctctttgtagagtttgcgaagaaaacaatgaacctgaaagcaagagcaactcttgtgaaggcaaagctgtgggttttgtgtatagttctgttggcaaagattccattcttgtaactgcctggggtagtgggcaactccagattgatgctcttgctgatgaaattcaaccacagtggagcataggaattcctacccgccttaatgttgattcacatgggcagataaagagtgttgctatgatatgtgactctaattcagaagattcttgggccatgcgatcgtatcgcccgtccagtacgggatcaaatgtgaagagtaatactgatgctgtctggatggggcattctcctcctttgctaagactcgcaattgtagatttagcactagcaaaaacttccaatgatagctctttatcattgtttctagatccccttgttccagagagattttattgtgcccatggtgggggacttgacatggtcacactgcacttcctgccattttcataccctgaaatggcatccactccaccctctgtgcatcctatcctcactacaggaaacaatgaggcaaattctcccttcctttctggttttgttaccatagcagatgcatatggccatgtgcagttagtcagcattacatgcccaggtgagtgctttgtggtggagatgaagggttggaaggaaccaacgcctcttcagcttgacatagacagcaagagcattaaggacgtggaatcttttacaactggaatgatcagtaaagagctcatcgcaggtccagatccacccatagttccatcttcatcaagcttgaggtcattgacccctgactctattgaaggaaaatccactcttcatcactatattaaagttttccatgagtactacgtggagtatgggcataaggtaagaaactgtcaccatgatactttgcatataactcttatcatattcacatatttccagacctcagaacatgtcatttgtcattgttggtgaatggttagcggcaactagaattaataggacctgcagatgcccaaatccccaaacctattagctataaatgtaccatcactaatcagatgagaataaatgggagtataggcaaacataatgatcaagatattattttaatgattcttaggttttcattgagctcaaggaacatggggattacctgaagacagaaattgaggacaagcagaaacgcttgcaagcagtgaagcaatcacttctatccatagaagccaaagaccaagatataaacaaccggataaatcgggcctttaaggtatacgatttgttagaaaaacgcatcgagggcttcaagatacttcctgcggcaaacaagaaaccattgtcacaagcagagcaggagttcaaagcacagctaggtctgtagttgagaaaggtgatctttaaactcttcgaaacagtttcatttgctaacattatttggatccgccttttcttttttgcagataggtttgcagatgtggagctggatgcgttgtgctcttcaatcactgctctgagtgcgaggatgaaacgatttgctcacccggccattggcagtgcggctggtacaggaatgtcaacatggcagacaccaaaggtcggaagaagccatgtttcggactcccagactgtcgttactaaaatcttcgcttgagaagctctctctccttaatgaggagaacaatgtaaagctgaggctcattgagcatgaactcaagaaccaggagcaataggtgatgtcttgttcataccattgtggcggattgtagctacaattctcaacactgacaagtttttttttcttttggcaggtctttcagaacaactgtgtattacaagtcctcacagattctgatttctcgagcttgttatcgcccttttgaatcaaatcgctaccagtccactgtctactgtgggtgtgtgtgcagagtgcaacttcaggtgttactctgcaaggggacggcatcatgaacaagcctgttaacactcgaagcgcgtatcagcgtgaaggaaatcatgtaacgctacttgcaatgaccaccagcatgtgtatccaatagcggttttgataacttgcccactgtagtagtttctcatcctggggattatgggcgtatttaagtcttgatttcttcgtgcttcactgaatttgcacggtcagaggtccaaaccgaacttcaaagctgacgaggttgagaatgttgctcggtcttgattatcaacatggctgcatgatgttaccagcttgtctgctttgacgatgtaaaccagttgggagagttctgtgcgctaatttgcttgcgtctcgtggtatggtttttcagttggctatattttgattcatggccaccaatattagttcttacgatactgtttgttccggcaaatcttctgctttagtaattactccctccgtccttaaaaaaactcaaactatcctcttagtacaatgaatctagaccacccataaatctagtttttttttgggggacccaggggtaactggcaataacagttttaaaatgttaccccaacatccccggagtaatcactgaacaagaatagggatggaaggcaacactgttgcattgcttagaagctaatgctcactgatttcgttttctaaccacaaaactcctgtaacagagaaaccgcagagctaaatgtttctacctgaacattaatcttccccaaaacaagaatacgaatatacgatgaataagaaagcacgctcatcttctctgaaccttctgacgcggcagctcggtgttcgctagctatggcgccttcctcgctggctttgcaagcaaccaatggtgaaaggaggaaggaaggcgaaagggtgtgttttgcaacaaatggtaagcagatcgcaaccgaagattgcaacaaagcaaagacgtgctcaaatcttaatgacaccttagcgttggagaacaatgcaatacaagcatgacaccttagcgttggagaataatgcaatacaagcatttcaagttctgataccttatcgttggaaaacgatggaatacaagcattgcaagttcaaagcatcacaggacgcgatgcaggttgcggcttgcgctgccagtcgataccccaactcaaaagacccatcgtataatctccatcaaagttctctacggacgattcatcagttattttttttccagcaacaaatttccgcgcattacatactcaaaaaagaataagcaacgtatacagtaggaaagaaaggatttgcgagtccagatctctattacaagcctcctacatttctaccatcacgaggtgtactcgaaaggttgtggtggctgcggctcgtcgtcgacagccatggcagatgaggcctgttggcctgtggcagcagcggcgctaccagtggtcgcagccacagttgagggggcatcggtgagtgcgagtacctccgcctcggttggctgcatgtcctggaggaggatgaatccagatggagcaggtttcaccgggacatatcggctgccctcgataaacttgatgaacttctcttgggtagggatgacgcgtgctgggtttgtgaggatctggaaggttggttcgggttcaggagccttcttctccgccgcgttatcaacctgggaacaaatgaagttggttatgtgctgaacagcagaagagttgacactggatcaacaaatccccacaaccagaaagcgagcagcagagtagaagctgctgctttctgcaaagtttgttatcttggattcaaacacaataggtaaaagattaaaaccaaagagttatactaaacccaatcattagaaattttgaattatagctatcattacctgcattgcatcggcatccttctcctgagttttggtggccttgcttgaactagagccagaagcatcttcggttgctttctcctggttagctttgctttctgcatccttctttgccctagatttcgccttggcgtatgttgacaaaatggctgtcggcagtttgacagctgaagtcgtagtctgttgcgttgtcggtttgggatactcaaagagggatggtttagcatgtgacaagaactcaaacttcggtactttaagatcggagttgagtccaatgaaggctgttggcgagaaggccaagctaataaaatacaggagaggataccagtaccagaactgactgaaaacagcaaggccaaccacagcagtaagcttgtcgtgcttgttccttgagagaagtttgattgtgacattcctgccaccagcatctagaataccagaagccagtatggcacccattttgctcatggtgtcctcatgtttgtcaagaatgatcttttccaattgacgcctgaatgttccaacacgagaatcaaaggattcattagtctgaatcatgaccatcgccatagcaatgagagctccctggcgaacaaagtcaacaacatctgatgtgagaggctccaacaaggaaattgcatcacttaatccacttcccgcgcatgatatcccaacagctaaagcagcaccataacggacatgtgggttgtatgattcagagagcagggacacaattctaggagtctgcataatcacaaaaaagaagtgagttgtggatcaaagctatcagtgtttgtttattctaacaattagctggaaatattatgaagagatgctgcttgatcaaacacataatacgttaaagcatgttcacagcacaaatcaaatttaatgaaggcgaatcatcaaattaaatgaagacataaaaagtacaccatttgatagtgcacatacctgctcaggttcattgtatagaacaaatccaagagccataactgcagtcctccgaacatcgtcactgacgtctgatacagcaaaatgcagcagctggtgtatggctttgttatttgcagttcccctgtaggctagagccaatgcatacatgccaccgtaacgtaatatgggatcttgatcccttgtcatttgttcaatcagggtgtcagcttcctcttccctgccataaactgtcaacgcaatgccaagtgacaaacccctggaaagagagagatgtcagaacaagagcataacacaatataagaaattaccctgacagtaatcaaacaacactgacctaataatcttttcatgctgtgtatcatgagcataagcaagcatctcactggccttctcactggctgtcccaaccataagcaagcccattccaataccagctgcttcaccagccacagcactgtccgtgtaaagaacattttttatgtcctcatatatctcctcatctgctgttcccaaagctgcaagcccaaggcccaaacaggctccgtgctggatcacctatataatttgcttagaagtaagcaaaatatgcatgacatgaatgacatgagattaaaaagacaggaaaggaataaaaggacacctcagcactggtattgcgaaggctttcacgaaggaattgtttgatcccttcaccatggttagcatgaatcaaacccagggcatatagggcacctccttctgagtatggactaccaccaccaacggcaccactttgaggtaggtagggggccatcaaagctcgcccttgttgaagatggcctctgtgaatgacacctagtccagcggttgcgctgaatttagcccaattggttgccctgcttaaccactcctgcaagaaccaacatgagacaagaacaggacaaaggccaaaatgttgcataacagtaagacaacaaatagaaactaaatgtaccagattctctcttaggaaggtgtctacagttgttccagcatgcatgattgcattggtacatattgttgcactgtggcaaacactgttcctcatttccacagcctgctttattgttttcaaaattaaaagatccgacctgttgagacaaacaagttgcatcaaatcagcaccaggcatggaaatttgcaagactggttatcaacggttagcaagtactccctccgtttcacaatgtaagtaattctagcatttcccatattcatattgatgttaatgaatctagacatatatatctatctagattcattaccatcaatatgaatgtgggaaatgctagaatgacttacattgtgaaacggaggaagtaaatagtacgctcagttagcaagtaatagtcagctcacctattgtggctatacaaaaattgcagtgtcaactggatagatgtctcccctgacagtattccttttattttcgcaagcctatcagcacgtgctacctcatttggatctactgtgtgagaactaccatttggtgtagctgtgtcatctctcatctgaacatccccagctggttctgtgctgcccgtacccgcattagcagcttgatcatccggtaaagccgatccactatcagggttagactcaggagtttgtgaagccagacgattcctcacattcaaaaggaaagcttgattttcattttcaacgagatcaaaggcaatttggtacgcaaggagagcatcatcctggatattaacatataatctttagtaagttaaactgacatttaagtaatgccatttaaaagagtaaagagacccataccttgcttccagaaagcagcttgtccaatatgtttgccacagtttcaggctcgcccaagaacattaagcattggcaaatactcaggtaatctggatgtggcaatgtttggtatatcttaacaagacagcgaagaacctgtaaagacagtatattggagatctggtcagttggaatatattttagtttttttagcagtacttgctgtatgctaaattgggattccacctctaaaatgataattatattccaacctgacagaagtaaactaagagcagagaatttgatgttccatgaccctacctcaaatcgatattcacggtggttaacatattgatgggaaaggttgatacaatacgaaagagccccatgaatattgtcacatcgaacaatcgccgactccagtttgtcaagtctcctgcattcaacagccattcccatggcctgctgatatttaccgtcaagaatacacctgcaataaagaataatcaacagaatatcagataatgtaaacaataggtgaatgatccatctcatatgctgacatatcaacaataagaggattttatcatacttctccagcattctctccactatggcctctaatctggggtccacattttcttcctcctcggcgcctttagaagctttcgtcctgaaactggcatactcgtccaatgcttttgctgaagataggaaaatcaggaattcatcatggtgagtagatgacaaagaaatattagtctggaagcaaacatcctaatggttgagaacatcagacaactcctcacctaaaagagcatgagcataatcagaatcctcggaaatgtcaaacagaggcccagcaccaagtgcataggacagtgcatcgtttagctccccaaggtagtaaaatacctgtgtgatatacaaccaaaaatcagtaaacgagataaaaagctcgttaaaatgtatacataattatgtacggagtgctaccttagaaacaacaagtgcagcgagctgcctttgttcaaaatcctcgtcttcatacatgctctcactgcaaagaaaaaggaacagtagaaagcgattatacaggctccatgatgtaacttttttatattttctcaacataccaagtactccttttccttgctcatcatttagcatgttcatgatttttcaaatatttaaactttgtagattttgaccagcagttagcaagtttagtgaataaaattataccattatattcatacttcaaagtcctttcacatcatactgattttgtaggtactagctactaacaaatatattttgtaaataaaaattgtatgaagcttcgcttcacaaaatagaccaagctagaacagtttcataaagaacataaagataaacacactagctgtcaaaaccacaaacaatacatcagtaacaactagctgtcaaaacttatactgcaactgaactatctgttccacctcaacagaaccacattggcccccaatagaaataaattttgacagaaaagaataaagcaggcaattttttccttgctatatgttaaaacaatccctatagttccaattaactcatacgatttcacttagtacacataaaaagaacaatagttgcagaatcagaaacctttggaaccctgaatgtttaaaccctttggatttatcattcctcctcagttaaaaccaactgctgttcaatacaacagctagtcctaagagaaaaattttcagaattttacactggggtaccaattcaaacatacggatgaccagcaagaaaaatgtgaattgcactccaaatcttatagattagtaaggtataacagcacagagccgcgcattaaactaccgaattccctaagtttacaggtcagaacaaaacctaacctactgtttccaattgcagatcgaaccgaaccgagtccaagctagcgaatcacgcaacatcagctgcaactagggaaacttcccctccacgatactcatcaatcgggcaatcgaatcaacacaccaacaagcctaggcgtagccacggcaccgggacggatcgaacagctacagcctccacaacggcggccgacgccgaggccgaggaggcggaaactaggtagggcggggggaaacccaagggagagatggcgggggagcggttgggagagggggcgctcacatggtggggatgctggtggagatctccgggtagaagaggtgcacgacggacttgaggctggcgagcgcgtgcagcttgagctcctccgccggctcctgcagcatcgcgaggatgccgctcgcggagctcaccgtggccaccgccgccgctgccatggccgcctccgccgccgccgccgaagaggtgggaagtgacgagggtttggtttttttttcggttttgggtgtcgcgagttggcttcgagacgagggcgacgatgcgagaagggaatcaagtgcgggaggagctctacgcaaatatagagatggagcgaggggtaaatcgtaaaggtaataatcacaccctgattttccccctctgactcggataaggagcgatttgattaaataaaatagtatagtagatttttgcgaattaatgctgattaatcgcaatttagcattggtaatcgacacgaagaacattagtacatgccagtaattaattagtctatcaaccatcatcaatggctcaaaactaaaaaaatacggcggtgcaagtttaatttgcaaaatgaaatgattcaccaggatataattaattaagttttaattttaatttttgtataggtaaatatgatttttataacttttctatgaatatttttatataaaacatatcgtttagtagtttggaaaaaaaaaatactcctaataagaaataagaacaacaaagtaaatattagaaaaaaataaccaattgtacggaccctttacccttacttaatactctctccgtctcatttcaagtgcaaccataagtttttcgcctaattttaattgtccgtcttatttaaaaaattttataattagtatttttgttattatgagatgataaaatataaatagtattttactcgtgatttatgttttaaatttttttttaaataaggcagacagttaaagtttgacgtgaaaaaccatggctgcaatgggttgaggctgtcaaagagtttattggaaatgacaaaggaccttagtttaatatttaacaaatgtagtcccttttgtgaatatgtacaaggggatatttgctaaatttgctgccgtccaattctcccgttttaaattgttcagtctcttttatcatcctctcccctgatttttcctgccaaatccgcgaaggctacgtggatcgaggaaatgtcgctgttttcaggctctccgttgagaaatctcagagagttttcagctgtggccacattcgattggtcgaagtgcttgtgaagttgtggtaagtgcttcggatcgctgtataggttgttcaaatctgaaaaagccgttcagaatccaatcacgctacagttctgagactacctcgttgttgcctggtatatgaggattgcggtcgtgatgtttttctattgctgttcgtgaaaataagatgatattcttctcttaaagtcttgaggttgagcctgcacggctgcacgctaggtgtttgatgaaatagctgcgtggatagctatatgagatggtccatcagttcatgagtgcatgagttacataaatctttggaacatcccttgccaagattatatatagtcacatatgaatacttctattgaaaaaaatcattacataactattttgttgttggaacttggaatgtgcacccatagattccatctgttaatcttgcattcagggacacagaacgttagctgttttttctattgagtgttgagtcccgtagtactagatcttaaaagttttttttttccagtgccacattagcactagatctgttggacacaatatacataaacgcatacatcattgttgtcagtatatttgaagtataaatatctcagatgtttacatcagtactttcttgcgcacaggttggatggagatcgaagttgcactgcttgcaagagaagacccagttttgccctttctgttggcactcatcgcatacataagccttagccatgtccaactcaagctcatgctcatgacggtgatctctcactcggtgaggcaggctgtccctttcctttttgagaacttcttccaactcataagctcttgattctgtaaaagggaatgccattgcaccatattttgaaattattctccttccgtctgttttgaacactttaccatctggtccaagtatcaagagtgttgggatgcctttgatagtgaagattctactgagttcttgcacagttgtgtcagaataggggatagcaaaccatggcattgcactcaggcttgcttggaattcttcctcattgcggtccatggaaatgaatatgacctggaaattcccaggtctcaaggctttcagctcatcgtacgcctccctgagttgtttagtgaaggcacggcaaggtgggcaccagtgtgctccaaagtacagtccaattgtcttgccattaaggtcagatataggagtctgaaagagttataatagaaggtgaaatggtaaagcaaagccaattgtacctgatggggatgaggaattcaaagcaatttccgcttgtgcatgttacacattaagtttgttggtccatgcttcctttcaaggatcatagtatccaaaaaaactgttgtgctgcacctgtagctatattcctttattttttatctcatgtagcttcataaagcttcacctaattcatattttgttggtttcattgttttgtgactagattactattattaatctagcattgccagtttactcagtttaatggttatacaatcattaagattttgatgactgtgctcatatattagcttgtattagtgcaatctgttggggttcttgctagcaggttactgtcatagcatgtatctatatactggcaccatctatcaagtctgcatcatctagccttatattttacctaaacatacgcaatgcataaacaagcaaattacgaatttataggttatgattttggtcacctttatgccatctgcacttatgacatattctctttccttgcatccaagaagttgcagaagattacctccttgtctcctggcatcatccataccctccagttcacttctcctctttgcaccaaaggggtaggcatctactccatactcctcaaccagcttcactgcatcctcttcgactcgaaatccatgagatagcgttgttgacagaggaatcaatgctgggatatgctcaatgtcaaattgcacacataatttttgccttaggccagtgtcaaaaggcaaggcaagccatggcatgcctttgaagtagtccaagaagctgatctcgtcgcggtcaagtgatatgaagattatctccatattcttgcaagtattcctgagtttcctgtagatttggagcaactttggggtaaagttcctgcatggcctgcaccagtgagccgagaagaagaggcagattctcttcccttcaatggacgacagaggtatttcctgtttttgatacacaatgacaaatttaggagacaactaattcttctctttctgaaaccaaaagcaaacatatttttgcagtactgcatagtgtgaagttttaatactgatactaatttggaaaaactatgccatgttagcagttttatacttaagcagagatctcagatttgatcatgaaacagaacagccaatccctggagtacttctatgtattgatgtttatttgctatatttaaatcatgcttggatgccaaatagtatatccacaagaaaattagagaatatttattcagaacaacagaacacaagctaagctgaagatcagggctatcaaatactatgatcagtctcacctttcctccattggagagaagagttccaactccagccaactgtggtatgctcacatatttctcgcctgcttcaacaccttctgccgtctctcccatgtctggcaatgacaacaagaaaagaaacagctgctggagttttatggttttgtcgtgtgagcaccgatgcttcaagtggtctgttccaacatggcttcctagggatggcatctttggcagctagtgtgtgcaaattggttaggtaatattctactaatatgctcccagaatcccagcagttggggtgaaaaacacaagaaggttggataaggataaaggttggtatcaagaacaggagaaggtgaaacagaatgagtgatcatccttccagtcagcatggatgcagatgatgtggacagccaccttgtgccctgtaatttccctttttttctgacgcaattgcctacttagaatagaataccttatctagttatctttgatatatgagaaaatgtgctcttgaatagtactatgaattagtatcacatatttcattctttatcttgagaaatctgatgaaaaaaaaggagtcaagagtcaagacatgatgtggccttgattgggtcaggcccagcagggaggaggctgtaggcccaagcccaacaatctccatgatccgattgcttttacagttcatcagccatcgctatcgcaaattcgcgagtgctccgccgcgcgtacggtctgtcgtgtgtgtggttctcttgtccactccaatggatttctggtggatcagaggaaggcgacgacgccattgtggaatcgcgtgcttagctcgacacctggtggagctgctacgcaaaggagcaccttctcatcgtgttcttctcctcgaggtgtttcaggctccgaaggtacaggattcttcaggttgatctaccgataatcggagtgattcttctccttcttgttgactgtttatcgttctttgttgcgtgcttcattgcaacagcacgtgctggaaggagaggaaggaagttgtgatgctctgtgattctctgggaggtttcttggctccattagccgtactcggggtgatgtgatgctgatgttgtatgggcacctcgaagatgtggtatcttttccatgaggtttatgagctgctgcatgctgcgcccaagtgccaacactgtccggctcactgttgaggagactcttcagaagagggttcatgcatgcaaggtgtttgttgttggttcccaaaggaggagggtgaggaattgggtggtgtttgccaagaggaggaggaggagtagcaagaggcagcgttgatggaagagttggttctccgatgcatgggtctggcctgattggagcacagatgatgttcttgatgcctttgatggagaggaagagcttcctaatgatgagaaatttaaagagtggaagggaaaggtgaggccattgttgagctgtggtaggcacaacaggaggcgatgaattcagaaggacgatcatgggaggatcggattgactcaggcagcttggctcattgaatctcaagtccaaactaaactttatttggaagggaaaaaacacaaatttcaggtgaatagtcttttttttcttctcccaaatgaaattgagtttgaacttgagattttgtgataatatatgtcatgcctatacctatctctagcatttttttcatgaatttagagaacttttaggtcaggttttcatgggttttcaccttttcgatggtttacactggatattttcccttttagttattcttgtattgtatattttagcatgttgtaaagtgctaacgattcaacaaatatgcaagtgtccacatcctattgcctgacatcatcataggaccaaatttctgatcttacagatattttactccaaaaatagaagataatttctccttttgcgtggtagcaccttgtgcatagcaggaacttttcattcacgatataccgagaaagaactgaaaatgaatgccagtatctcttctttcaactggaactagtctgtgcagaagccatccttatatgaacctcatgagccattgaactttatcacgattttactattaatttttttttgacgggaaacagcaggagaggctcctattgcgctatattaaatatataataaaaaggttacaatatttacaaagggacaaaaattaggaaaagtcatatatccatgattgccaatctagtttatctatctcctttgctctgtgcatattaattgcgtcatcctttctctgaagttctcccttctacaattttgcataatcattcggagtcaagttggcacacattagtagaagtggttctcgaacactatggccttgaagctgatcaagctgcaattaccatttttgtacgtgtggttccaattgttatggatgtatttgtgaagatatgggtaggttttgcttgtcttttgctctttgttcgttccaggatactgcagtaagtttcatttcttcatcagtaagtttcattttttttgtcaacctttgtgcggccatagaagatgaatggagaacttggattgcagcgggcttgattgtagcttcgtaagcggcggaggcggccgtgtgctgtagccttttttcttttctgtcttctcgcccttagttttcgggggcgtgtttgtaataatgcacattcttgcactctttcttaatatactctggccggcatccttttgctggcccggcaaaaaataatacattttcatgattaggcagttgaaattagatttggagttaggattctatactttcaatagctttttctaccaagcaattgcaacttttaagtgattgtgccgtttgttgccaccatagtgactgtgagtgaaaatgcattccaatgaggcctgcctggagggaggagcgatggggcgtgaggctctcacctaccacccggcggaccaccactccggtgcccgccggccaccatccaagccgcagttcggctcgtggcgcgacgtcgtgaagaaagataggggccttgccgccgctgaggaggcagcttggacggaggtccggcggaaggggagcacggagcattcactgcgggcaggtgacccaacctccaacaaacaggacagagcattcaagccgaggaaggagttcagcaaccatgacagggcattcaattcggagaaggagatccctcgctggcttctggggcgctgcttcaagtgcctaggattgggtcatcgcaagcttgactgcaagggagagacaaggtgtttccattgctggtacccgggtcacctagcgtgggcgtgtccggagaggaaggcggtctctgggggcaatccggggcggcagtgcgtctgggcgcagagaggtggccgtctgggagaagagaacaacaggggaaggtgaagcaggtggtggtaagggaggtgccgccggcgaagtcgaagatcgtcaagccggccccacaggcgacagaaaagggcgcggtgatagccatggcgggtgctaacctgggcgggtaccagatctgtgcggccacgccgccgcagttcgtggaaaagtaccgcatcggcgagcccgactcgtggctagaaagggggcgggtggtgctgtcctggacctccgggatggagcgccatgagaggtacctccaggaactctccctgatggcgtcggtgctcaagggacggccgcccgtctcgccggcagagcttgcggagacaatcgagctgcacacaggcgtgcagcagcgttacttcagggtggaggtcacgcgcccggaggatttcctgatctcgtttcggaaccagagggagaaggaggcggtcctgcggtgttcgaaggcgctgttctgtaatgaggtgcctgtttcgttcaagccgtggaacagatgctgctgggcggaggcctcggctttccagttcttcaccaagatctccctcgacggccttcccccgcacgcctgggaggaggaagccatgcacaagctggtcaacagcttggacggtcagcttgccgagctgatcccggcggcggacgcgcgctgcctcggtctcttcgcttggttcaagaatccgtccgaccttccccaccatctggacgtggaaatcccggaacgcccggccgcagggcgatggcgggaggggacgagcgcgacaccaccttccccgccgcgggagaagccggccctcacctatccggtcatcatccacgtagaagaagtcattgaccctacgccgttgcatactccgccgacctccttcgacgacaactccgatgatgaagacgtcacccggcggaacactttctcctgctgggcaggtcgctacgatggcgctggtccctggccgacggaggtgggaggcggtcatgtctacggcggtgcgaccggttcggcgggaggtctaggcgcgcgctcctttgcccccatcccaggggaggtctcggccccgccaaggcggttgcttcaacgcctggcgaccatgccggcggcggggcagtcggtgacagaggagagccaggatgatgctgtcttgacagctgcggtggtgggggtcattgacatggcagcggcggaccgggttctagaccgggctgacattgttgttcaagacatggaggcgggggaggtgttggcgtcacagccgcattcaccgacgttggttttgcaagcgccgggtgtgtggttctctccgcaagcggtgcaagcagtggagcaaccaggggccgacgtgggaatccctaccccgctggcggcgcctgtggttgcaacggcaaaggcgcttatcgttctggacgacgactgcagctgggcgctcgtggccggtggtgtgtcgcctctttcatcgccgctccaactctccctggacgagttaaccggcggtgaactgtcggcgctcggcacggagaatgatggcgaccgtgctgagctcagtgatgaggtccgggaggccactgtggaccacgttcacgttcacggggacgacctggcttcagggcaggaagtcgcattaactccgaatgggggatatgcattaacgcgtgttgcgtcggcctcgccgcgtattagagcgagccagtcgtcttttggcacgttggccaagaagctctcttttgaggatacgatggctgaggtgtcgctcgtggagcatgggtgcgagcggccagcattgaaggcgactggcgacgcgctgagctcaacgcaggagagcaggagtgatcgtgggtttgaatcggcggcaaaggcgggagagttccgtgtctatgtgcggaagcaggcccagaagaaaccgagccatgagcaacctgggccggaggggatcggcctcatgggcttggcaggccaggatctggggcaggctgacctgggacgggctgtggctggcgtgggacaggaaatgtcggtgggccaagttgtatgtggcgaggacgagccacctcaggcccaccaagaagaagtggcccacagcgacgacgagcggccggtccaggaaactgagatcgagagcagcagggaggcgctcagcggagagatgatgctcccacctcccgcctcgccgtcgacagcactcgcccgcgcgcggccaacctcggaggggtcgccggcgaacacgccgctaccccccgaggcggaccagattcttcagggcttcctcgcgtcggtcgctactgagcctcccccctccctgctcgggaggaggccgccagcgtcagtccccaaatccaagcctcgtcggcgcaatgtgatccctgaggggttcacgccgtggcgcagcccacgtctgcaacaacaagggaacggagctcgtcgccattcaacttcaaaagcgcagaaggtaacgatgaagaagatgggcatcattgaagaggaagaagaagcggatcaagacaccttccagcagtacactaccgtgtttgatcagccgttatcgacccagcacatgaaggcgctagcggagctgctggatgtggatgttgcgctggaggaagcagatgttccaccgccggacctggcttcgctggtggcggcgggggtggaatcccctgcttgagcggcgttccggcggcgtgcggcggtggtggagagttttccctgtttttagtttccatgtctcgtcttagtgtgctagtgtggaatgtgagggggttgaataatcctgcaaaaagaagagtggtaaaggagtctgttgttaattcgcatgcgtctgttgtttgcttgcaagagtctaaattagaggtagttgatttgcttgtaatccatgaactgtgtgggctggatttcgatgatttcgttgcccttcccgcgtcacataccaggggcggggttattgtggcctggaaggggtccgtattccgtggatcacaagtgcatttgggacaatggtcggtgacggcgaagttggagtggactgcaggcaaccattcatgtttcctcacttcggtctacgggccacaagatgataacgagaagattctgttcttggaggaactcgccgaaatcagaggaatctgtggggaggtttggcttgtggcaggtgatttcaacttaatagcggcagcggcggacaagaacaactcgcgggtgaacaggcggctcatgaatgctttccgcaacaagattaatgaacttgagctcaaagaactgtatctgttcgggaggaggtatacctggagtagcgagcaacaatttcccaccctggtcaaatcggacagggtgcctgtctcaacggaatgggaggatgcgtttccggacgcgcacttgcaagcgctgagttcgtccagttcagatcattgtgcgctactgctttcttgcggggaaaccccgcggggtagaagaaggtttcgttttgaaactttttggacgaagcttgaggacttcgatcaggtggtggcggattcctggcagcagacggttgagagcacagatccctacgtcatcctgtacgtcaagatggcgcgtcttgctatgtctctctgttcctggggacaaaagaagatcagtcgctttcgcctccagctccagattgcgaatgaattgatcttccgttttgatgtggcgcaagagaaccgactcctttcccctcttgaacgccgtttcagggcaatcctgaagggccgctgcctggcattggcgtcactcgaacgaatcagagtgcgccagcgggctcggatctcccagctccgggagggagacgccaactccaaatacttccatatgaaagtgaatgcgaggcgccgtaagctattcatcccagtctttgagtatgaagggcagacagcaacctcgtaggaagataaaattgctctggccaaggactattttcagggaattttgggtgtggcggatcccgactcggctgagctccaattcaatcaaatcttccctccggcgccgaacctgcaagagctggaagtgcctttctctgaagaggaagtttggaaggtgataaaagagatgccaaacgagaaggcgccgggaccggatggattcaccgggcttttctaccaacggtgttggcaagtcatcaaaggggaagtgctggcggcactgacgaaatttcactctgggaatcatcagaatctcgacaatctcaacacagcggtgattactctgctcccaaagaaggatgcgcccacgttgatcaaagattacaggcccataagcctgatacacagcttttccaagcttgcaacgaagattttggcgtcccggttggcgccgagaatgggcgatctagttgctgaaaaccagactgccttcatccgtggccgatcgatacacgaaaacttcatttttgtcagaggtttagcgctgcaattccaccgaagaaagaagcctatgatcctcctgaaacttgacatcactaaagcgttcgacacagtctcttggtgtttcttgctgaacttgctccgaaacagaggctttgggtccaggtggcgatcgtggatagctgccctgctcttaacttctgaaaccagaatcttgctcaatggccatgaaagtgacagcttcaagccggcgcgaggactgcggcagggtaacccgttgtcgccgctactctttgtccttgtcatggatgcgctgcaaggcttgctcgccaaagctacttcctgggggcttcttgccaagctggacactcgacgttccatcccaaacacatccatttatgccgatgacaccattgtgttcctgcaaccaatcgagagggaggcaacagcggtaaacgccattcttcagcttttcggaaaagctacagggctcaagaccaacctcagcaagagtgctttgacgccgattaggtgtgatgatgatgtgttggtcggagttcaacagctgcttgggtgtagggttgagaatttcccgatcacttacctcggtcttccactctccctgagaagaccgacgaaggcggaagtgcaaccgattttggatcagctgtccaaaaaagtggccggctggaagcccaaactgctctctcccgacggccgtctgcgcctgatcaaatcggtgctgaccgcgctgccagttcatttcatgtttgtgcttgtgctgccaaaatgggcaatcaaagagtttaacaagaaatgctgagcgttcctgtggaaagggcaagaggaggttaatggcggccactgcctagtggcttgggatatcgtctgcagcccgaaggagtgcgggggattgggagttaaaaatctggaattatttggccaagcgatgcgaatgaaatggctcgctagacgattggagcaaagaggaaggccgtggactctgataaactcagtaccgacaaacgacatcaccggtctgttccaatcagtggcgtcgtttcaggtaggggacggtaaagatacggacttttggagggcgaactggttgccgaggggctgcatctctgtctcctcacctttgctcttcacacacctgggcagaacgaagctgactgtggcggaggcgctctcgcagaatcgctgggtgcgcgacattcgagggagtctctctgcgctggccttatcggaatattttcgtttgtgggatgagattcaggaggtacagctgcaagaggatgcccaagactctatcagttggaagctcactcctaacggagttttctgcacagcctctgtgtatgagatgttcttcgcggcacgggtgcgatctcaatgtgcggaattgatctggcaagctaggggcccgtctagacttaagttcttcatgtggctaatcaccaagggcaggtgcttgacagcagacaatttgcagaaaagaggatggccgcatgaagatggttgtgtcctttgcaatggcgatcaggagagctgtgatcatttgttgctgggttgccctttcacgaataggatctggggtctgctgagaacgtggctaggaactcctttccccctgcctggcgatgacgactgggagttcgcggactggtggattaaaaccagactctgttttcagacgggctacaggggcgcttttgactccctttgtatcctcatctgctggttcgtgtggtgagaacgaaacctcaggatctttgaacaaaaggcgagaacggcagcggagctcttcagtgatattaagaatgaagttgcagtgtggagggagaccaacattttgagagaagtcggctaaagagcccgctggtggcggattgttttgttttcctttcttttcggtttctctcgactgtttaatgtcgatttgtaaatgttttcaaacccttccttcaaatcttaatacaatttgggcggcctgccttgggccgtcccagctaaaatgaggcctgccttcattcagaatagaaaccaaacaaacacagcatgtaattcaaataacaagaagagagtgcacttcgatatccttattttgtttagttgtttttcagatatatggtttccttcccaagctatcacctactgtactaaacattctccgagaaatgaaacggcattagagaaattttccaccagggattttgtctcttttgagaaaatttctcagtgagggtcgctctccagctatgcacttgctatgtcatactttattccctactgtgttaagcatgctttgtaatctcactgcacggatcattttgtttcgagaaaagaaatcacccagaggcctaggttaagaccctggaaaataataactaaagaaaaggttatcggtagatcacttaatataattacatttagatatttggctcggatatttctgtatagcactgtactgcttggaaatcattagaaaatttaattatgtgtcgctgtcaagaatcgtatctttcatttgaccagaatcttgagccattatttgctttggttaatgcttttcctttgtacaggccttgtctcgaatggggactctttggatatgccatggttggatgtcgcaggtgtcagggtccacctgacctcaatttgtctgtatagcagggcaacatatatacctgtctattccaagttccaacaggatatatatcagttgatcatgtgatgctagaataatcttccttctttccaattcactgtaatgcaaaacttctgattttctgaagcagctgttgctatatatacatgcataacaagagctcaagtatacagtcgcaaactctgttgttattctgtggtttcagcaagtaaaactgtaacactgtaaactgcagaagttcgatgcgacaagtggttcaatacatcttcgtctactacccgtcttgaaaatgatccatccatccctgctgcatcctgattgcttcagatggtggctacctgcccgcctgcctgccattggtgtcgcactaacttcaccagtttagggttatagttacttaaaaaaaattggaagtttgaagaaagttgagagttttgcactaacttcaccagttcagggtgttagtttctgaaaaaagttagaagtttgaagaaagttgagagtttggaaaaaagttgaaagttagtgttaatttctgaaaaaagttggaagtttaaagaaagttaggagtttagaaaaaaagttgaaagtttatgtgtgtaggaaagtttttgatgtaatatgatgtgatggaaagttaggaatatggaagaaactaaacacggcctgttcagatgcaaatatcatggtgatccctcccatgggcttgcaacgaagtttacgcggtctctgatgaaactcgttggcgagattggctggtttgattggcgagattggctggtttgatggtgtccctacgtgtaagttcgcatgtttctcacggccatctctttcacactcacagtcacaggacccggaaaggcaacgcttttgtttctttagcacggagcaatccccgccgcggacgcaccgcacatggttgatttttttaaaattttttgaatcatttaacttttattttaaaaataaattatttctaaacttattttcaaaatttaaacagcacgtcacctgcaccaggatagttgacgtgaccagaatgtttattttttaaaattaaaattaagattaagaatgtttaaaaagttaaaaaaaatccacagggttgcttccgacaaggaataaatcacacacaagtcaagtcgtcacggtttttcttctgcttttaccttagcctcgaatcaaagagcttgcttgcttgcttggtcttgaccttgattacagcatgagaggacgatggagacgcggattactcacggctttcacactcggactccagattaacagttttattattattatttttttgctactccaaactttcctcccaagaataaggtcggcatcagcgtgagtagtgacaagatggttaacaacaggaggaagaaagggacggtcaaagggcaagtgagcaagttgatgacattgtcgtttgagttcgattaataataattaagaaaagaataaaaactttaatcagcttggtggctctaactgcatggttggatagaatatagatccaaaaatattggttacatgattatgttaattactacacaattatagggcctataaatagcttagaaaaacttgtttaaagcaatgctgacatagaaatacttaagagaaacatataattttgaaagcgtcgcatgaataatctataccacattcaactatttagaacgcgatacttaattatcctagaggtggaaaagaaaagacttttgagttgagtagccacattgggtaccctaagtggaagaaaagaaaggccagagacaaatgggactcaaaaatatattttttagttacaaaacgaacgcgaatggtggttgtacttgtggtacttttgtgcaatctaaaacctctctttaagggacattgggtgaagaggtgagatgacaaggacaagcacaagatgcagcagtagcataactaatggtctgtttactttgatggcattttcaatcttaccaaattttgatacagttataaaaaaaagtggctatatttagtatactgccaaattttagtaactatataagaaatcatgtttttggtatagttgccaaatatttgctaaattttgttaaggtttttttcatcaaagcgaacaacacgatatactagtatagaactggatttgatttgatccttgtttaagctaatgataaacacggtgccctcgttcccaaatcgcaattgtgttcgtgccaatagccgtagttgagagggacaagggagtttggggtgtgtgtttaggtaatacgtgaaacgtgaaggggcgtattgcaaattttatggagcatatatagcgggggtaaagttgctcacaattcgctcgatttttttcccaataaatttgcccgagttttcctcttttggttccccagtttcagtttaagctcttaaaccctcgccgggagatttcgccgcaagattctcattctccgcgcctatttgcttgccagttgttgatcttggagatggcggcagctcagcaggcgcaagattcagctggttcgttgctttttttccccttttatttgggttgcttgttgattttggagttcttttttttttttgcttcactttgcatatcttctgtgttgaatttgaggagttgggtgggagtttatctgtgaaggtcgcgatcttggcggtgtttgttcgtgtggggatcgtggtaaatttgcgaattttcatggttttctggtcaaaattaaaattagcccaggactgagattttgtacgacgctgctgttctgatgctgtaaaatctcgaccttctcttctctctcttatttcttttcgttttttctttatttttttgttagggttgattggagaatagcaattttagatgccatttatccccaaaatcgattttgctgatagtgatttcttca

SEQ ID NO: 5606 - DNA, 30325 bp, Oryza sativa
tgataagggctctcttgagtttatgaatgagcaaaaccgtggtccacgggccaccaaacccaagaaagaagtgaataactcctcaactgaggacaaaaataggaaaagtgcattaataaatgattctaacttgtacaaccaacatgattttgttattgagtatgaggatgccaaattttttgtaataaaatcctataccgaagatcatgtacacaagagcataaagtatggtgtctgggccagcactgctagtggtaacagaaagttggatgctgcttatcgtgaagcaaaagagaaagaagccacttgtcctattttcttgtttttctcggtatgatcatttctgtcattgcttgttcttctcttttctattttcatggcaggaaaaaagataaacaataggaaatgaaaatttgtcctttgacttaccatttgattttgattttgaggcagtttttcatgcatgaaatgaatttgaaatttgactttccctataggttaatggcagcggccagttctgtggtgtggctgagatgattggacctgtggacttcgacaagagtgttgattactggcagcaagacaagtggagcggccagtttcctgtcaaatggcacattatcaaggatgtcccgaacagccttcttcggcacatcattctcgagaacaatgaaaacaagcctgtgaccaacagcagggacacacaggaggtaaaaagaccaatacccatgctggcctttttgtagttaaaactaacttcagaatgcaaatttaagctttgctctgtcttggtggttgtctattgactggtcttatctctagcaccaagtaactaaactaacattgtcaactcacaggtgagactggaccacgggctccagatgctaacaatcttcaagaaccatgaggtcgagacaactatcctcgaggatttcgacttctacgagcagcgggagaaagccatgctggatatcagacagcgacagaagcagcagcatactgattccgaggtccagaagccgatggtggaggccaaggaaccagtggatcttatgaaccaaatctcagccacctttgcccgggccgtgcagcttggagaaaccaagggcagcagggaggacaaaccaaaggttgaagatgcttctgctgctgctgttgctgttcctgagaacgagcctgttgctcttgctgagactgaaggattgttagcagattcagagccaagccctttgaaggaaagtggttgatcttacccctttcatgtctgattgcgagaagcagctgggccttgtgatgttcacatggaagcaagaagatcaaaggaggttgatatgtgaaaaaaaaaatgctgcttcttttgtacttcaccataggctgcattataggctggaggagaaggatttggttcacctccagttaggttatgatgttagtcttatgtttccttcccaatttcttctttctgttctgtcatctgttccacaagcgccaccaagaatggtgctcagtggtttagccataaggaaagctgcatatataggccagagctctgtacagtttgcagttaaattatgttgttctcaatcttttcctgtgatatcatacaattctgtagcaaagttctcctgttgagatgacagttttacactcttggtaatttcagctccatcagtatcaatcaacagagacaaggataatatggaaatgagctaatctcacagaacattttacacttgtgtattcatcaatggcaggcactacaaactcagccagtaactaggagctgaatctaggaaacgggtaaggaagattaaccgaaagcttggcattagcagaactctgccacgggaacatttcaaattgtacatactatatactctgaacgcagcaaagtttgtgcatgttccagcagggggattatataacacaggcataaagcagcaggaacatgcgtcagttacaacaaaaggaaatctgcatgatgtttcgacaaaaggatagagcctaacacaccaaagcagtctgaaaacaccactctaagagagaaatattttgaatatagaactgccttacacctgagtatataactcagtcgtacactcaagttggatttctacttcagcggcgcagagtctaacatgtgataaatacactcgattatgcttccttccatcaaggtcttcgcaactctctgttgtctcattcaatcagttgtcatcggttgggagatgcagcaccgaaatcgggccttgcggactgtgctcaggatcaccacctcagcatgctccagcatcctaactacttcggtgaatggagggcgaacatcagggtttggatcccagcaccttgtcatgatctcactgagaacaggcaagcagtcctgtggtatggctggacggacacccttgttcaccacagcaaatgcagcttgtactgctgtcatgttagcgaaagggagcatgccagtaatgagctcccatagaacaatgccaaagctatagacatctactttctggtcatatggcctgtgctgaatcatttctctgcaggatcaaaataggcgagtcagacatcaggaaccaagttaataagatgaatgtattgaacgaattacaatttgaaacagtaaatagaaaacaactcattgctcagtatcctattgaaaaatattacgatgtactaccatgaagtaaaacacaacaaggtcagtattggcaagttttagctttcatgctgttttcttcttttccagactgctaggaaacacagtgttagcaatattaaggcatgaggaataatgactaaactgactggatttcttatagagataaccatccacttgctttataaaccatcaatgtacatgcatgtgccactagacttgagaaagaatctagttagtactcactgatggaaactcaaaagtgtggccaaggatttagagttcaggacaactaacaggagattattcaaacaaattgtgaccttgtatgataaaccaatcaaaccatgtacccaacctcagatttaacttaagtactactacagtctactagcatcccgagatggtagccatgatgatcacattgaacattaaatattcttgactccagaaagaatctgattgacatttcacctacaaagttacacaaacctaaatgagtaacaactggtgacaggattagattctaatgacccaataacaggtaataagtattttaagggctgaaatgaagccttctagtgatgcagaagaaaaggaacgaggcaaagacatatgcacacatttgttatagtttgtaacagagattctgttaaggtaattcagatctatcagcaatcatatggtaaacagattgcgctggtaaggactaaggaatgcactgaagacaagcaattgatgtgcactaccctaccatattgcaagacctatatctgatttatggtaagtacctgcatatatgatatttcaacctggaatccttaatgctcaaggcccaacgtggttttaagcaaggcctaacaagaacttgctacatgaccaaacagaaccttaaggagggtcccacatggtaaaaaaaaatcccaactagactccccatccacctctcccttatattgagagtcagtcatcgggcaggcagcgaaggcctgctaaagtggtgcaatctgaagtcaggcatgtagatccaggaggcagtaaccaccaggcaacagggacagcatccccaagaggaaaagaccaagggagggcagcaagaacctgggaagttactcgagcgctagcatccaatggacccaggaccaaggggcactgtccccatcgagcagatttagtgttggcaaccatcggacggcggacgcgcggagctgtggatatagggtggtcatcagatgagcatgatcagtccaaaagctccattgctgcccgccgtcagtgcaacggctccagagctctgaactttgtcacaatttacaaagccaggttctaaatgcttatgaaacactcttattgtccacaatgtgggtgccctagctggaatatatcctctagttttccatttatgcatacggtaagctgtcatctcttcttaatcaaagcttcccttaactgtccgaacaacaaagcattaatttcattccatctatggctatgcagtctaaagatcctcaattaatagaacaaggaaaaattgttatagtacgcctttaactaacatactatatcctacttggtaaatagcattaatgtagttgttttattcagtaaccaaacaaaattctcttaactaaaataaagtgttgcacgcggctagaactaacagataatatggtaaatagtattaatgtagttgttttattcaacttacggggccatccaacgataggttcctgtttcaggtgtcatcccctcggttttgacttcaatcctggcaactccaaagtctgctatcttaatcgatttatcgccagaaatcaagagattatctgacttgaggtccctatgaatgaacccaagagcatggacgtaggccatgccccttgcaacatccaaggcttgcttcacagcaagctttaatggaactgacctgttctgcctcttcatcagaaactgcctaactgagccaccctttgcatactctgtcacaatgcaccaaaccatcggcttcctgcatgccccaataaatttaactatgttgggatgcctcaaagttgcaagcatcataacttcttgcacaaactgttgttccattagcccggctctctccggatccgcctctggcctctccaaaagcttgatggcaacatcctccccattgtaggtgcccttgtatagcttcccaaatgcaccctgtgcaaagggcatccccatgtggagcttacccaaatcgatcgtccactcctcgtaatccttgagcgtctcagtcgggtacctcgggtccatcagtgcccgtgcaagcgcatcctcactcaacgcatgcgacacccgcccggggcggaaaatgctgtgcccaaccgagtaattggctgcgacatgccccctgaggcccgggtggttgagcatcctggtgtgggaatcactagacccgacgctgctgttatccaccgacattgccacggagccaccgccatgcgtgctggtctgcaggctattgaggctatcgatcgacatgttggagctctccccgagcttccggtagtacgccatgtcgcagaaattcccaccaatgtcgtcatggccgccggcgccgccgacgacgccgcccatcatgccggcgaacttggggccttccaccatcctcctcctcctcctcctcccaacaatcagcgccttctcaactcctcctatctcctcacctcacctcacctcccttccctactccccaagggcggatctatcgtcgcgcatagagggttcagctgaacccccaaatttctctgcaaacaaaccgccattagtaccaagcttaaggccgaaacaaaagcttccacatctacaagagaagctaaggtcaagtgcaaagagaaatggcgcgggtggagagaaatgaggaagaggacgtgagctcaccggcgggatgcagcaggacgccggccgccgctactgctcgccggggtggagatcggcggtgctcggcgcaggcggcgggcgggcgagctcgcgaggaggagacggggagacgaggcgaaggggagatcgactagggtagggaggagcaacgaggagacgagtcagaggcagctgccggtattggctttttctatagccaggtgactgagcttagcagtggtggttaaggaagctaatcaactttcctactaatgaaaatggtattaattaagctaatctaatcacttgctgatggagttatgcaaatgtgtgtttgccctatctgcagtcgaggatacatgatcatacggcctgtttagatagtttaaaattatgataagcagctgattggtagcgaaatactgtgttttccaccttttttttctatataattttttagattctaccattacattttatcagaatatagacaaaaactaaatcatttagagagtttttaattttaggagaagctgcagcagttaatttttttttcaaaccgcacctatccatctcggtctttcactatcccatctttctctctcttattttattttattttttttttggctcttgtgaatttgtctatgacctgaccgtatcacaaagcaaaaggcccatgtgacacaatggggagagtcggtgattactagcggaggggaaaccggtagtaacgcgcacatacaccgcgacacagactgcacaggcccgtgatgatgatttggtaggtgatcacctcgaaatgattggggatttttttttctttgcgaggacgacgacgactccccggcccgttgatgcgtgccaaccccgcggcagctgtgcgcccgcgcaccggtgcaccagggcgtgcgtgcgccccgttctttgcgcgttacgacgttgcgctcccgcatcccgctccacgcggatgcacgtacacgggacacggctcgtggttgtggacggggcgcgatcagagtgcgattcagcggaagcgtgtgatggagggaggcatcagcatcaggcatgggacgatgggagatcacatcgaccgcgttcgtggtgctttacactacacgtgcgtgcttggtttagcattgagctaagggccggtttagatcctctaaaatgattaaaattttaccgttttagaacattttttagcaaaataaatgtaaaaagtaggcaagttggcatttgtcatttgatagtaatctgaagaaaaaaaaatcaggccccgtgcataagagaggcggcagcaattaatggcaaaactttaccatgcatctaaatactaacttataaaattgcaatgctaaatctttttccatcaaaacttataccaaaaaatttaccgcagcaagttgatctaagcagacaataagccagtttttctgtgtatgatgtgtctggtaggaggtggcacaagcgcacaacacaaacgggcaaagggtgaaagggtttcacctacaaaatgcttttgattgcttcgttttttttcactgtttatcagcgtacagtaacaacaaaggttgaactgtatatttccagtttttttaaagaaaaaacctgtatatttccctttccttattctatgggccgacaaatccctcatatacggcccatcactataagcccagatttatgctacaaggcccatagcgtcacctcgccacgaaacggaataagatcactttgacttcctcaactgaccaccgaatctaaatcgtatccctcaactgcaataccaaaaatcttgacccccccccgaacttgcaaaaccggtgcaatttgactctcttagtggttttggatggcggtttcactgacgtggcgcacacgtggcagtgttgacctgttctttgttccacgtagcattgacgtggcgcttatgtggcattaaaataaaaaaaatatatgcggggcccatttatcattcacacaaaaaaaattgtgggacccactgacatgtgggtcccacatgtcatcttctctctcactacccttcttcctcctctctcccttatttctctctctctccccttgacatgagccggcggcaggcgggggctcggtggtggcatcggcgagcgggtgccggagtggtggctgcggtgggcggtggacctcgagcgacaagcccgggagcagctcctccttgaaatgggggtggacctcgggcgacgtgcgacggaatgcgtcgggggagatgggagcacgctcccaaccgccgctcctcgtccccactctgtgttgtgggtagtgaggagggcggcggccgcggcgtcgacaacgaggtgggtggtggccgcggtggaaagggagcaatagctcgcgcgccccaacgcacggcggcggactggccttgagcgctccagtgtcgacctggccatgatgcggagcggcgattggagctcctcctcctcctccaacacgggcccccttgtcacaccctgaaaattcaaaatatttaaattgttgtttaattggaatttttagaaataattttaaaagtcttgaaaagaaaatctaattttaattaataaattccaatataaaatggggccagataaaatttcattaaatactttgcttaattctataattcctagatttttctgggatttatttgagctaaggaagtatttttaataaatggaattgcatttaaggaataatttaaattgaaaaaggttttaaaaagtctcttttggctttgggccgaaagtcggcccaaaaccgctctctctctcctcggcccagttcggcccagtccgcagccgtcgcgtgcgcgcgttcggacgctgacaggtgggtcccacctgtcggacccatcgtctaccttcggccgccgccgcccgaaaccctagcgcgccgccgccgccgttcctttccaaatccggccgttcctttccttctccggccgaattgtttgaggggaaacaatctccgggatctcctctaccttttctcctttggaatctttggctaaatcgttttggaagttcgtggaatcgagttcgtttcggatcggtttccctctctccaagccgagctttccttcgccgttgccgccgccttgggccttcgccgccgcctctgagcccctttaaaaggacccccggtgtctcctctacccgttgccaccttcgccttcgcctctcgtcgtcggaaaagccctagcgccgtgtgccctagctttgccgtcgccgccgccgctccagccgtgcgccgccgtcgttttagccgtcgccgtcgctcgggaagaccaccgtcgtgctcgccaagtcgtcgccgtcctcgtccgccccttcgccgtcgccggagatcgtcggagcttcgtcgccatcgtcaagccgaagagcttcgccgcttcctcctcgtcgccgtcgccgtccgttgaccttccgccgtcgttttggtcgccggtgagttcgccgtgccgcccgcttcgtcttggtgccctccgtttgcgtcctcacgccgccgttcgccggcgagcgtgcgccgttcgagccgtctcctccgccgagccgccgccgctgtcggtgacgtcaccgctgacgtcatcggggtcgtccgccgtgagccgccgtggacccgatcgatctcggccgtccgttttggattggttcgatctcggccgtccgttcgtgtgaaccgccgcccgtgcgcccggtccaccaaaccctagcccgctgacgcaataaaccctcttttccttttcaaaaataattcattattgcgtcataattcaattttaaccgatataagtgttttaatccgatttaatctttaaaaattcataactaattcatcttagctccgatttagttggttcaagtctctaaatttttctaaaattgagatctacacattaaaaatatccacatgtactgttcatgcttgtttatgtgctgttttggtgattttgctcttttctgcttagattccgtcgtttccggagagtccgttttcgcagaagaagagtttgaagagttccaaggccagcaaggcaagtcacacagatcccaaacaaccctttgagcatgttgatcctatttaaagctactgtttctattcaactattgcatctattttcgaatgtcattgggtggaattgacctattctttgttatggcccttttgtacttgattaccttattccttgataccttgggttattacaatttgactagttgagctttatttatattggttcaactagatattagatataattgcttagccctgcttagaaacattagcacacattcgggataactaatgactcactaatatttcatgatggtttcatgatagttcacgatggtcaatcgtgattagttaattaattaatgtgccaactaaaacctggtaatggtgggttgtgagcacatggttttgttggtcgtgctcatgacaattaaggaccggttcacgagtttcagttgtgaaacattaaccgtgccaaccacaagccagcatgggcaacggctttatcttttgtatagcatggttcattgcggggcaccagactgagaagtggcggagataagcccacgggggtcgctggggagtccatgccttgtttataagggggtgattatgatctaggaaggtgcgctgcagtggattgtgttatgcgaggggtattgtcacaactcctttccgagatactgtggtggtattgaggcacatggtgacatgatgtggggttgtgtcttgtgggtacagtggtacacctctgatcagagtaaaactattcgaatagccgtgcccgcggttatgggcgggtctaacaatgtctttcgtgattagtttcacacttctcaccatagtaaatgatgcttaaattggtaataatttgattagctcctggtttggaatggaatattcctggtgtggagatagaactgtgcagccggggtggttgttcagaatggttgggcctatacaacagggtatgttgtatagcgttggattaatattgtttaattacttaactgttttatcgaattctcaaatgtttgctaaatgctgcttttgcaaatgcaaccctactatgccatcctttgttatcctgtgcacttgcatatttgctacgtggctcgctgagtatgtcatatactcaccttgcaatcattcatcagaggaagagttctacaatgaggctgatggagtggaggattaggtgtagccttggtcaagctgcctgtggagtggagccgtctgcgccgtttatttattttccgctgcttagatctttattgattgagaggaactatctacctctgtaatgacattttattcgcttattaattagagtaataattgtactctattatcaatttgttattgtgtgcctcggctgattcctggacgagggttcacacacatgtaagcgtttggaattttggatagaaattccgggcatgacaagttggtatcagagcccctttgaccctaggttatgccaaatggttatccatagaagccctctaaaaatattggaaaagtagaactgttctcctccctttctcttttaattaaaccaaactaatggcacatgcacttcataatctcttttaatggttctcattaaaaatttattccagtgttattagtactgtacatctattactgtactaatggctcatttaccagcaaaagttttacaatactgttttatttaatcttgctgcaataaaataaatttagcatgttgattttataattttctttcatttcttttgaaaccagttattcaaaattacaaaatttgtgacctcgtttccaactgttttaacttatctcgcaaagcttggtttactttatttacttacctttttactctgattttctaactttattcaaattaatcaaaaaacttgtgctattaattggataaaggtcttaactccctcctttcacttgtctttagatgccgcgttacaagcctgagtacctgtttggtgttgagggttttgtccaggagttgcgttcgatgtcctttgtcattggatttgggactgcccctttttatgcccagattcctcatgatcgtcatgaagagaagtgccgagtcaaagtcaccttgaacagtaatagtgaagatatccccttagtgatgtttgaagctggaggaagaaactacatccatgcatgtcaggaggtggcaaggatcgccataggagagctccgtgatcgctacagtgatcaattggccgacactgagtatcgctaccatcctcgtcaaccccagggaagtgaccgtggcagctatcttgagactgaaggaattgagaatgatgctaccacgaagcatttggttgagatgttgtgggctatggatgaaagtcgtgcggagactgtgttagccgctcaagatcgtgaagaccggaatcgtggtaagatttgtaagttagaagacaaggtggatcgtttggagaaggaattagccgcattgaagggagaagcaccgccgcagaaggccaggattcgtcttaccgcaaggaagagagctctatttgtccctcgctatcaactggcgccaaaggttcgtgtggtggagaaagaagttgccccagctcaagcggatcctccggtcatcatcataagtagtgatgaagaagaagaatccaagcgcaacaattccaagattgagtgggtagcaactcaagatgataaagacgagccttcaatcgacctccgatgcttggaagaactagagtgacttgttaagtcgttgtcttagatcgttgtgttagtttgcttgcttaaagtttgcttgtgtgtggctcgcatgtgatttacatcagtggtgggatgtaagtgcatgcgtttgtttgcttttgagtgttaggaagttggtgagtttagtggtgtgagagtctttagtttgtaataatgaaactcagttaagatcaataaaagttaaagtaattctctgtcctaagtagtttccccggtttctcttcttgtgccctgtccatgccagatggtgaacactcgcagcaacgggaatggtcccaacaaccccaataacaacaatggagagaatcccattctggcccaagttcttgctcaacagacacagcttatgaacatgatgatgcagcaatttcagaatcaggaaaaccaaggaaataaccatgcacctccccagaacaagttagcagaatttcttcgtgtgaggccacctgttttctctagtaccactaatcctgttgaagctagtgattggctgcatgccatagagaagaagttggatttacttcagtgcactgatcaggagaaggtctcatttgcatcacatcagttgcatggccctgcctctgaatggtgggatcacttccgccttaacaggactactgctgaacctatcatttggcttgaattcaccgctgctttccggaagacgcatataccatcaggagtagtgtctctcaagaagaaggagttcaggtcgcttacccagggatctcgctctgttacggagtatctgcacgagttcaatcgtcttgctcgttatgctccggaagatgtgcgcaatgatgaagagcgccaggagaagtttttgggaggacttaatgatgagctttcttacccactcatggttggagattatcctgatttccagaaattagtggataaggctattcgtcaggaggacaagtacaatcgcatggagcagaagaaacgtcggattgctcaattcaagacacaacagggaaataatcagaagccgcatcttactttaggaccccagcccatgccacagggaggttcttcgtctgttgttcgtccgcagcgtcagttcttcaacaacaatgctggcaacaacatccgtaatcaaggtccacgtcctgttgcagctccagcacagcaacaacctgtcaagagggagcaaggcagcaagcccgtggtgtgtttcaactgtggagatccaggacattatgctgacaagtgtccgaagccccgacgcgtgaaggttgtccctgcccagaataactctgctgtaccagcatccaaggctcgtgtaaatcatgtcgctgctgcagaagctcaagatgctccagatgtgattttgggtacgttccttgttaactcagttcctgcaacagtacttttcgattctggtgctacacattcattcttatctatgagttttgtgggaaatcatgggatggaagtagaagatcttagacgtcctttgatggttagtaccccaagtaatcaagcactctctttgcaacgtagcccctctgtcagaatagaaattcaaggagtaccatttctggccaatcttatcttgttagaatccaaagaccttgatgtcatcctagggatggactggttagccagacataaaggtgtgatagactgtgccaacaaaaaagtaactctcaccagctatgatggtcgagttgtaactgttcatgcattgtcatctgagtctttaaggtcaagactgaaccagataactttggaagagatttctatagtccgggagtatcctgatgtgttcccagatgatttacctggtatgccgcctaaaagggatatagagttcagaatagatttggtacctggaacaactccgatccataagagaccttatcgaatggcagccaatgagttggcagaagttaagaggcaagtagatgatttgctacagaaaggatacatcagaccgagttcatcaccatggggagctccagttatttttgtggaaaagaaagaccatactcagagaatgtgtgtggactatcgtgcactaaacgatgtgactatcaagaataagtatccactacccaggattgatgatttgtttgatcagcttaaaggtgccactgttttctccaagatagatcttcgatcagggtatcatcagttgagaatcaaagaggaagatatacctaagacagcttttaccactaggtatgggttgttcgaatgtactgttatgtcttttggatttaccaatgcccctgctttcttcatgaacttgatgaataaggtgtttatggaatacctagacaagttcgtggtggtctttattgatgatattcttatctactctcgaaccaaagaagagcatgaggaacatcttcgtcttgcattggagaagctacgagaacatcaactgtatgctaagtttagcaagtgtgaattttggttgtctgaagtgaaattccttggtcacgtcatctcagccggaggagttaccgtcgatcctagtaacgtggaatccgtaaccaattggaagcaaccaaagacagtttcagagattcgcagtttcctaggcctcgcaggatattatcggaggtttatagagaatttttccaagattgctaagcccatgacacgactgcttcagaaagatgtgaagtacaagtggtcggaagaatgtgagcagagttttcaagagttgaaaagtcgcttaatatcagctcctattttgattttgcctgatccaaagaagggttttcaagtgtattgcgatgcatccaaacttgggttaggttgtgttctgatgcaagatgggaatgtggttgcctatgcctctcgacagttacgtccgcatgagaagaactaccctactcatgatattgagttagctgcagtcgttcatgcattgaagatttggcgtcattatcttttcggtactcgtacagaagtgtacaccgatcacaagagtttaaagtatatctttactcagccggatctgaacatgagacaacggagatggttggaattaattaaggattatgacatgggaattcatgatcatccgggaaaggctaatgttgtagcagacgctcttagcagaaaaggctattgcaatgctacagaaggacgacagttgccattggaattatgcaaggaatttgaaagattaaatttgggaattgtcggtagaggtttcattgcagccttagaagcgaagcccactctaattgatcaagttagagaagcccaaattaatgatcctgatattcaagagatcaagaagaatatgagaagaggaaaagctattggtttcttggaggatgagcaaggaactgtatggttgggtgagagaatctgtgtccccgacaacaaagatctaaaagatgcagttttgaaagaagctcatgatactttatactccattcaccctggtagtactaagatgtaccaggatctcaaggaaagattttggtgggcaagtatgaagcgtgaaatcgcggaatatgtagcagtatgtgatgtttgtcagcgagtcaaggcagaacatcagaaacccgccggtttgttgcagcctttgaagattcctgaatggaaatgggaagaaataggtatggattttattactggtttacccagaacgtcatcaggccatgactctatttgggtgatagtcgacagacttaccaaagtggctcattttattccggtaaagacaacctattccggaagtcgcttggcggaattgtatatggcaaggattgtgtgtttgcatggcgtccctaagaagatagtgtctgatcgaggcagtcagtttacttcaaatttttggaagaaacttcaggaagagatgggttctaagctgaactttagtactgcttatcatccacagacagacggacaaaccgaaagggtgaatcagattttggaagacatgttgagagcttgtgctttagatttcggtggaagttgggataagaatctaccttatgcagaattttcatacaacaacagttatcaagctagtctacagatggcttcttacgaagcactgtatggtcggaagtgtcgcactccgcttttgtgggatcaaacgggagaacgtcaggttttcgggactgatattctaagagaagcagaagaaaaggtaaaaattattcaagaaagattgcgagtggctcaatctcgtcataagagttatgccgacaatcgccgtagagatttgagttttgaagaaggagactatgtgtatcttcgtgtcacgcctcttcgaggagttcatcgttttcacaccaaaggaaaattggcaccgcgttttgtgggaccttataagattgtcagtagaagaggagaggttgcttatcagttagaattacctcaatctttggcaggagtccataatgtgttccatgtgtcacaattgaaaaaaatgtttaagtgtacctaccgaagaagctaatattgagcagatagaagtccaagaggatttgacttatgttgagaaaccaatccgtatcctggaaacaaatgagagaagaaccaggaatcgagttatccgtttctgcaaagttcaatggagtaatcactcggaagaagaatcaacttgggaacgagaagatgaattgaagtcagctcatccgcatctgttcgccagttcttccgaatctcgaggacgagattctgtttaagggggggtaggtttgtcacaccctgaaaattcaaaatatttaaattgttgtttaattggaatttttagaaataattttaaaagtcttgaaaagaaaatctaattttaattaataaattccaatataaaatggggccagataaaatttcattaaatactttgcttaattctataattcctagatttttgtgggatttatttgagctaaggaagtatttttaataaatggaattgcatttaaggaataatttaaattgaaaaaggttttaaaaagtctcttttggctttgggccgaaagtcggcccaaaaccgctctctctctcctcggcccagttcggcccagtccgcagccgtcgcgcgcgcgcgttcggacgctgacaggtgggtcccacctgtcggacccatcgtctaccttcggccgccgccgcccgaaaccctagcgcgccgccgccgccgttcctttccaaatccggccgttcctttccttctccggccgaattgtttgaggggaaacaatctccgggatctcctctaccttttctcctttggaatctttggctaaatcgttttggaagttcgtggaatcgagttcgtttcggatcggtttccctctctccaagccgagctttccttcgccgttgccgccgccttgggccttcgccgccgcctctgagcccctttaaaaggacccccggtgtctcctctacccgttgccaccttcgccttcgcctctcgtcgtcggaaaagccctagcgccgtgtgccctagctttgccgtcgccgccgccgctccagccgtgcgccgccgtcgttttagccgtcgccgtcgctcgggaagaccaccgtcgtgctcgccaagtcgtcgccgtcctcgtccgccccttcgccgtcgccggagatcgtcggagcttcgtcgccatcgtcaagccgaagagcttcgccgcttcctcctcgtcgccgtcgccgtccgttgaccttccgcagaccgcccccttcttcctcttggatttgccaccggccgcgcccgcagcggcctcgtggaggcttgggaagttggcggcaggagcagggggctcggtggccgccggggcggcagcgttttcgcgctcctccacctcctcctcggtgcgctcggtgtcccccgctgcgcacattccttcgtgccaccgcgcccgacttgctccctccccgccgtggccgccccgcgccatcatcgtcggaatcatcctgctcgtcgctgttgtgctctcaccgccatgccctcgctgagcgggcgctcaaggtgccctcgccgccatgccctcgccccgccaccatccccgaatccctactgctgctgcaacggcggcgatagaggaggcgcgaagactgtcggctgccgctccgtccattgcctgccgtcgccgtcgccgccgccgccgctccccacgcacgaagagaaagagggagagatagagaagggaggagggggaggaggaagaagggataggagagggtgacatgtgggacacacatgtcagtgggtcccacaattctttttttgtgtgaatgataaatgggtcccgcatatattttttttattttaatgccacatatgcgccacgtcaatgccacgtggaacaaagaccaagtcaacactgccacgtgtgcgctacgtcagcgaaacaaccatccaaaaccaccaaggaagtcaaattacaccggttttgtaagttcggagggtcaagatttctggtattgtggttgagggatacgatttagattcggtggtcagttgagggagtcgaagtgatcttattccccacgaaaccgactcaaattattctccagcccacgaagcagccgccgaataagatcacgctcgcctcctcctcctcctcccctctcatcccgtctccctcccgaattggggatctcgcgagtcgcgacgaaccaaaccgatcgaaaccctagctagggtttcgccgcaccaccaccaccacctccccggccgctccccaccgccgccgccgccatgtacaacggcatcggtctccagaccgcgcgggggtcgggcacgaatgggtacgtgcagaccaacaagttcttcatcaagccgcggtcgtcgtcggcgggcgggcccccgagggcggcgccggccccggggttcgacgacgccggcgggggcctcggcgggatgcggaagccgaacaaggagatcctggagcacgaccggaagcggcaggtggagctgcggctgctcctgctgagggacgcgctcgaggagcaggggtacacggagggggagatcgaggagcgcgtcgaggaggcgcgcaaggaggccgagatcgaggccgcggcggccgcggccgccgaggaggaaggacgcggcgcggggcggcagccactcccgggcaaagggtatgtgtagagatcgaagtgttcgtcttatttccgtttactgtgctggctatagtgtttgtcatgtgtactaggagaggaaggctggtgactcatgcttaaaagttaataattttcgatacagtgtttggttgtgtgttattcctgaaacaaattgttactcgtagttcatcatgctagcttgttcttgttactgtgctggctatactgtttgtcatgtgtaggagagcagggctggtgactcatggtttaaaagtttatatttgttcgatacagcgttaagattgtttcatttctataactgaactgttacttgtgtttcatcacgctagtttcatttctataactgaactgttattgtttcatttctactatactagtatttttttttactatagttccaagtttccaactagcatacgtgatacgactgcatatgcatgggtttctttatttttgctgttatatgttcatttgtttgttctgtttctgtacggttatttaatttctcacaggaaggttatggtcattcaatttcttacaagaagtgaattctctcagtttttcagacacacaaagccaccacgttgctgcaaggaaggagaagcagcttgagacgctgagggctgctcttggtttggatgttgatgataaagcgaagaagaacgctgatgtagaaagtgatgtggaatctggggagcttgttcctgggaaggagtatgaaggtttggaaatagatgggccagaagatggcaagactttaaaggatgacagaaggcatgcaaagaagggtaagaaggataaagggagtgatgcaaagagtcatggcaaaagttctaggaagattaaacttggtcatgattcagattcagatcatgatgataacaagaagaagaagaagaattctcgctatggttcagaagatgattctgaggctaaatatgatgaaaagaagcacagtaaacacttgaagaattctcgccatgatacagatgatgattctgagagtgaccataagaatgcaaagtgtaaaaagagttctcgccatgattcagagtctgattctgagagtgatcataagaatgcaaggcgtggaaagagctctcgccatgattcagagtctgattcagatggtgattatggcaagaagacaacaaaacatggcaagaacgatcgtgatgagagaaagaaaaggcctgccacgatctctcgccgacatgactcagaagatgaaaagcctagaaagggtaagcgcatggatgattcagatactgactcggagggtgatggttcgttcagtgagtcggacagcgactatgatcggaagaagaagaaatctacaaatagttctcgcaatgaatctaaagatgataagccccgaagaaaggctcctaaggacaagtattctgatggcccagaaagtggctcagacagtgatcatggtggaaaatcaaagtattcaaagatttctcgccgtgattctgaacttcagtcccgaaaggatgctgataaacaggaccagtaccgtgataaattgaagagtgagtttgctagcgatggctatggagagaagaaatctgttaagatcccatacaatgacttgaaagatgacaagccaagcagcaaggttgttcggaaggaccggtacagtgatgaatcagagactgattcagaaacttatgttaagaaaaagaagaatcttccgaagtcctatcaccatagtgataaaccagcacaaagaggtaaagaaaaggaagagaactctggaaagaatgttgataagcgcaagaggcatgatactgattctgattcagatagccatgctcgtgaaaggaaaagacaccttgatgcacgggcgagtttggctgcccaaaagaaaagaagtgtgactagctcaagtgagagttcagagagttcagattacagcagtagcagtgatagtgaatcagatgtgagttctgacagccgcgaggataggaaatcagcaagacagttgaagcatgatgagttagagagaaagaaaaggagtcaagacgagaagagaaaggagctagagaagcaaaagcaggaggaagagagaaaagagctggacaggcagaagcagagggaggaagagagaaaggctaaagagcttgagaagcagaagcagagggaggaagagagaaaggcattggagaagcagaagcagggggagagggacggagatagatatgagcgtgaccatgaggggaggaaaggcgaaaatgatgttgaaagagactacaaaagaaaagttggagaagataggtatgatccaagcaggaggcaggatgaggataggtatgatccaaacaggagacatgatgaagatatgtatgatccaaataggaggcatgaagaacatggtcgacgaagaaatagagattttgatagccgtgatccgaaaaggtctagacatgatgattcttatcatcattctcgaagggactatgaacagcgttattctagagatgaatatagagacaggaggcatcgttgaatgcaagtcatgtgtaagtctgattttgtcctctgttttgtttgtgtatatttggattgttttaaacaaacacattttgttcattccaaagtctgttgtttagtaatattagaagttatgttttttcggatatggagttaactttgtgcattgtcaatggtctatcacagattttagtgttcaaatacattggatgaatttcatcttccttcgcaactaatgtataatctcaccatgctttagtattttcctttgcagccatctctggtttcttcaagcagaagagggatgcatctttacatgaaccgagcagatgatcgatgtcctgctccctcaagtttttcagagtcctaccagaagaagacttgatgcagcagtaaatctctcctagcagtagagaaccttttgcctcaggaatgtacgtttgcttatgtttgtatgaactttcatacttgttgttttgttgtgtgaatgatcaatatgtattctggtggatataattaccttgtgtctgcaagaaatatatgatttaacactgtgcccatgtggtttagtggcttagtgctgaacagcatcacaagcatttttgttggcaaaattttgccgttgatttctgcatatgctggagtgaatatattacttttgatgataataacagttgaaaaattatgcgctacgcctacgctacgttcgtacctctgatcgaatttgaccgggaaacctatttgcactaatggtcggttcggagttcggacatcttccccaagcaggccagccgagccagccgaggtctaaagagagaggcaaggcaacccggtaggtttccagattgtgcagcgtcttgggatttgggaatcttggtgatcatcggacatgtcgaagcgaccgctgtcttcggtgctgctgctcctgtcgcgcggcgcagcgacgtctgcatctcattttgtcctagggcacccgcaatgattatctagcttagagcaggtacaatggcggactattagctagctataaacatattttaatgagataaaagatgagatagaagagcagcagccagctgtagcacggactccaagatgcagtgagtgtatgacagtgggactatatagtaactaactattgtatgaattgactattagattggctacaaatgaattagagctagtagtggtgatgtgaccatcaagtatatgcatacaaccaagtatgagaaatataaaacattgacaaagaatacattggatgaatggaggatctacaagatattaaagtccaatgagttttggaatccaatttggcctccggagacagcactgactacaaacagacctagcgccttcatgccaactccgatttgggtgatcttggacttcgtggaaagcttatctcgctacctttcaaacgcatccggtttcatgtccaaattcatctcgagtcaacgggaatcgccaaaacaagacagtgctgttgctgaaaccgaacttgggccttgcgccttgtaatagactaggcccatctcggaagtgtctccctccacctccacgaattagcacttaaccctagctttgttttcctctataaatagctttgtacatcctcaaaaacaattgggttttgtttagttgaattttgccaagtgccattcaccttgtctctagtcctcgctcgattagtcggtgactattgattcagagcccccaatagttggtgtgttgatttgctgggtcgattagatctaccacttcaatcgcaactattcctttgtgcttaattacctattcgcaatatttagattgcatcttatcttgttcttgcagtgttctctcgtttgcattgcagggatcatcaaccgcgcgtcacggttggtacgacatcgtttgtggtgtagcgattgtatggcgttctggacttgttctggttggtagccacgtcgtaaacgtcgcactcgatcaaagtgagagttatcccctcactagaagatcgggccacgagagagagcgtcatcaagtgggctacactattaaacttgcttttaggagccttttgcatgtagttgtattgttattatcgaaaatttttagatacacggtactctattttttttatagcaacttttagccatacatctaagcaattgcttgtctcatagacgtatataaaaactattatattttagggatgcagtgccaatttagagctacaagatactactcttcttcaagttctcttctcaatgtcccttctaaaaaaagttctcttctcaataaaaagaagtgcactaaatcaagagtacttaataagtatagtaagaaccactgtgcactaaatcaagagtactccttaatactccatccgtcccataatataaggaattttaaaaggatgtgacatgttctagtactgtctagattcatagtactagaatatgtcacatccattcaaaatctcttatattacgggacggagagagtaactaataagaaccaccgtatagcaagagcagcaacatttgttcgttcaataacataacaaaggtacaaatatcaatatgtaatgtaaatttcttgggagacggagcatgcataaacaatataccatgtacttacctgttatgatagaaaaaaaatgctactcatcatactccttccgtccaaaaaaaaattagcctagtattaaaatgtgacatatcctagtacggcgaatctggacatactttatatccagatttgtgatactagaatgtgtcatatcttagtactagattggcttttttttagacagagagagtatgcaagtttcaaagctagcaccaatcaaaactagcaggagtagtcaagtgtagacgagataacagggaccaattaggaatgatatacaacactgaccatcatcatgacgtggtttgcaagaatatttagcctaaaaagctcactgaaaaagaaccagtaaaacaacgttattttccttccaaaattaaaagggtcatatttgccatctaataattacatttacttatcaaaactaaagcacgatccaacctacaaattatgataacaagaaacctaaaaaaattacaggaaatcttctcttataatctcatctactcgttcatatgacacagaacgcaaagatattacatgttcagctcatttgctcattcaaactaggatgttctagctcaccaattaagcgtatccggaatctgagtcaagctctcatttaccccctcaaacttcgatattccagctctccaattacatgatatcctcttaaaaattggataatgcccctggaaacatctcttcttaaatgatgtaatatattttaaaattctggaatagtacttctctggtttattcgttgaccgactaatgtattatcatatgatttgcacaatgccgaagtattgaagtcaagcctctctcttatttatcttttatgtcatctattgatatttgtatatctccagaatagattggttgtgttcagcagttggcaaccaatttttctcatcaaatctcatatagcttactacttacctactttactttacttgtccagagctcattgttgttagtttgttcactagcatcctttggtgttacttgtggttcatcgtccattttatttcttctttggttgtactggcatttctttcataatctctgctctattttttttctcactactgcttcaatatatttaaatcgcttctgatgtgtgatagttggatcaatagctttatggatcattccttatatgagacaaccaatcctctaatagctcatttttatgggatcattccttatatgagacaaccaatcctccacgttctttgcatttagatttaggtatatttgtcttaagggtttggatgaggctacaaagttttagtgcatattacattggatgtttgcacactaattagaagtattaaacatagactaatgacaaaacccattccataaccctggactaactaattcgcgagacgaatctactgagcataactaatccatgattatccctaactaatccatataattagaagtattaaacgtagactaatgacaaaacccattccataaccttggactaattcgcgagacgaatctattgagcctaactaatccatgattatcctatgtgatgctacagtaaacatgtgctaattatggattaattaggcttaaaaatttgtctcgcagattagctcttatttatccaattagttttgtaagtattctatatttaatactccaaattagtgtcccaacatcgaatgtgacagggactaagtttagttcctaattgttacatttcagatactatttttaaccctagcactaacctggataataccaggaagagggtagagaaaccgaaaatgacccatttattcattacaatcaggctgtccatatttaacaagaggaattgaacaacaaagtcgattaagaaaatgttcaatatcattttttaaatgatcttaaattagataaacccacccacttttttttcttatttaaaatgatagtcttaaattaaaattagagaaaacatattttcatatctttctttcaacagtggctcaactttattcatgattctccatacataattccatacaaaaattcgatacaaaaaaatctttattaaataaattatttttggtggtataacttaaaatcaaaaaacctattatcaaatgaattattttttttagaaataatttaaaattcaataagaatattatcaaataaattatctttttagtaataactttagatctaacaagcttattattaagtttttcagaaagaacaatatataacttttttttctctaccttctaaaaattatgttattttttatttatgcttctcatgtttatctctctttctttccttacttatgctcatatctcttttattggtgaaaataggtaccgcgctatgaggagatgaatatagctttattcaaatttatccataaaatacactttcaaaacattttctcaaatccacgttagataaggctattttagaacctagctttataatataaacttgatggaaacaccatcgtccctatatacttcaatcacacaaaacacaatactaagcttacctctcttttcattgcaaggaatcaaaaaacaaaagaggtttgaatagaaaaacaattttagatataaatgcaacacattccataaaatttacaaggatgggagacaatacccgtacataatttaattgtaagaattgaacattcacgaatcgagcaatgaaaatttaaactctctaaaaaaagccctagagactcatacaaggagcaccatatactttaggtttgatcctctatttataagctaagttcgatagaaacccaataaaaaacctaaaataatagcaggctataagttagctataagcatatgtggaggtgagaagggaagagaagagtgaagaaaatcgggctacatatttgtagccagttgcagcataaactctaacacgttgtgttatatgagaggtgggaccatatattaatggtttacagattataataactattatataaatgagctattagattagccatagataatttgaaactagtagttggctatactattaatcttactcttagctcaaccgagggaatactacagatggctgccacgtcgcctggcagtaaagccactccaaggcttcggtcccgtgcggcccaaccggatagagacgcacgtcccagatccgtcccacgcgccctccgcagggcccacgatccgtgtcgatgcatgctatccgcgcccatcaccacgtgtctcagccgatcgatgccgctgtgctgccgagtgccgaaccggacaccgcatgccacgtcgtcgtacggttcccgcccgctcctcccgcgcatggcaagaacggacagctggagatcgcaggccgcatggctcgatcgtccaagccatacaaggttgccaacaaaggtttggctgatctgtcaattgaacccgtcgcgttttggttgtagcatagtatgtatattcagggcaacccgtggcacgatacaaacatggcaacgaacaagcaagtacacctcgttagcaaaatgttggtcgaccgtccacaaacaaacattcatgactaatcgaagtcacagactcacagttgtatttgacacttacatatggatcgacctgaacctataaaatatagtggtaaagattaacaaaatgtggcgtgacactggaccttgcagtcacactaggaccattggatgtaaatcaaacgggcagataatcaaagatactattcaaacaaaagaaatactgcatatttactgtagctcctgtgttgtagcttcaaaccctccataagaaaaatagatgaccaagatcacatgcagttcttgtcttgcagtccctagtataactgcacgtgatctcaaattcgcagtagtgaattaaacaccccttaacttcaaacttgtgcgtgcacatttttgggggcatgaacctagaaaaaggctttattatgtaacaacaattgatttcgaagactgaacaatatcacccttagcacattgctggaaatgttcaattaacaggggaacttcgtactcagcacagaaaaaatggtatgacaatacaatcacctcatcaattcataacgacttcggtgtcgttaagtctacagccttttgtctcaaaagggaaaaatgagacagccaacccggagaggaagattacaagctcaaagagaaggatcgctgtcgtctgctggcagctgtgtactagagcaacagcgacgagaggacagaggatgcctccaatcctacctacagagctcgccacgccaattccggttgttctgacagaggttgggtaaatctgaaaattgaagcaaggagaagaaaacagttagcattaacatctgatcttccattttgttgtcacgatgatgaaatgaaaacaaattatgtgctatctagtgacactgaactactgaaccatgtgaggcagcagaactgaaccaacctctggagcatatatgtatacaattgtaaagctagcagatatgcaaagccgggctccaaatagggagactcttgttagtatatccgttcgggagaaaattagtgggaataagaaaacacagcttgtgaagagcattgatgccattgacagctttctaccaatcctatccacaatcatggctgacaaaaatgatcctggaatctctgtttcaagaaaacagagcagcattcgttgttaaaatgggaatcatatgcactggaagaaaattaataatgtacagaaaaaacaaacctgcaaagctagatataaaaacgtttttgtataagcttgcatcatttgagtgtatggattcaacctcctcttttgcacatatcctattaccgttacttaactccgatgtgagcagaacaattccataataggaaaatgcatttccaaagaaagtcatccacaggagcagagttgcacgtatcaattttggcgacagcagcttcgcgacggacaaacctccaaaactggaaactttgtcttcaatgatggtgtcatcttcttcagcatcagcaagaagtgttgtagactcagatgttgaaagttcatctagctcaatgtttttgtcagatacaagccttccagaggggagctgtacattgttcaatctagccattttctccagtacatccatggcttctgttactctgcctttcatgcataggaaccttggtgactctggtgtaataacataaaataaaagcaggacgaaagatgggacagcagataatgctagcaaccacctccagccaaatttgggcattactgtctgcaattagcatgatgaaaagatagttacaataatgacagggcctaaagatagttacatacattttcacaatgagaatgtaggcttcattgaatgagaatgcagaacagggcactttcttattgacctttgcataacccaccaagtaaaagtacagatattccagtttaaaaataccagggaaaaatatcatacccaagcaagagaagcctcgaagatggtcccaacagtccaaaaggcagaaaatactaccatccaagttcctctagttggagcaggaacaaattccaagaaccaagatgcaaggacaggtccccctcccaatccaataccaactagaaatcttagagaaattagtgacacatagttaggtgcaaaagcactgaggaatccagctccactagtcacgatggcggtaaagagaaatcctctcctgtaaattacaaatgcaacagaatgtatgagcctgtgtgctgcacaccaagaggaatatatcaaggtagtgtttgcaatatcatgaaataagcatca

SEQ ID NO: 5607 - DNA, 11608 bp, Oryza sativa
cttttgtgaatgtagatgaagttgtcagggaccttcatgctcggataagtcaagaaactgttcccatggtgacatcttagggccttcctgcggcggcatcccagcaaaaagcttctgttgttggtccgcctttcctcctcccttggctcaaacccatcaaggcacttgcatgctgggacagcatctgtgttgtcgcagtaactgttgggaccgcaatagccgtagatattgcagtcatgcacaggctccgagtacagggttgtccatgctgagatgttgctctgccaacctaacatatttaccttgcctaggtaggttattttcatcctgatcagcacactgaaggggccagttggcatgccaaaggacatgtacacctcatcgctgtcatggtttatcgccatgtaaatcgtggaattgaggttgttcatgtatttaccaatgaggaggtagttgttccacacagggcttcgccggtgcggcaccgagccatgccagatgaagcgctgaagcaggttgttggggtctgcaccgtaggagaagggaccaggggatgggtctcgtatgtctttccaagaaatgaggcgctgcagtgggtgtgtattgtggctgagcctgaggttcatgccaggcaggagagtgtcggtcgggtggtcgaagctctgccatatgatggcattgtcagccaatgaccggagaatgaggtttccggtgttgtctagcatggcttctgttgagatgtttttggtgtttcggggggagctgatgctgattctgcttttggccattgtcgtccaaaggacatggccattgccatcagacaaggtgaggttggagctcctggtcaaggtgaacactgcagatgaaggaacagtgattggcgcggcacggttcgctacccacacaacggtgaacttggggatgttattgtaccatatgccaacataatagtgtttcttggggttggatggggagaaaaaacccagggcaaatgttccatcatcagagataatggtgctaccaggagagattggcttaccagggacaaggcggttgtcggatgcacagagatgaattgaactgaatatccaataaagaagaaaaatcatggtagaggcatgaagggaacacattggcattcttggtgccctgcttgtaatgaaatgggttatgcaaccatggatgctaatgggatatagaagcaatcaaagggtcaagttgccttaaaagccagaaccaaggaacaaaagggaagttaagctgttctaaaattggtactggctcctattgtcaactgttttctggaaatgatactaatcatgatgtgacattctgaatgctctactcatcccctcaattttaagttaaatgcaaaaagaaaaatcatttcaagcaaaaaattcacaccagaaagaagacaagttattccttgtagccttgtaggtcacttaaagttttttaataccacggaattagggaaatatctggagggaaaggtcttaacgtattttctctgaaagttaaaaagattcaggtttcgtagtcaataatttccaggtttcaggtggtaaggttcatttaatcatcattcctagtcaataatttccagatttccttctctactacatattcacatgatggaactaaaggtatatgaagagattaaaacttgtgtgtgttaagtagaatccaattcagataaactaacaagtttctactaggcaacttgtaggaaatgagaacaagacaggtttcatttaatagcatattaaatttataatatttaataggctaaacatctggtttattttacagcaaagcaacttacccatgcgaaagccatccaggttcagatccatcttcggtgctaagctgggaacaattgacatatttatattttagcaagttcagaaaaaggttagaaaactagaatatgaacaattgatattatccccgcaaaaaaaaagaacaattgatattatactgctgatgtaagttctctattggtcgagaatttgggttgtcctgaacacacaaaagccccagatggatacaccgtgaaatttcatcaagtgagcaactccctgagattgacgagtcgactaaatcctttgtgttctgatctttccatgaactccatgcctgaataaataaaaaaaaggatataattcttaagggtgtgtttggcaaatgggatatgggaggtgggattagaaaatggaaatggatgaatggctaggattaaatgaggtgtgaagaatggatggttaggatgcaatattgccctttagagggtgagatattatttcccaatcccatttgccaaacaaagcctaattgcacaaaagttaaaataaattttgagactttgaacattttgcagaacttacgaaagctatgagattgagaaagtctgtgattcggtgtggatggctgatctttaagccagaaacaattttcaaaagtaacacaccgaagctaatataggacttcaccgaacaagtgccttccaatgcatattcaggtgacatgtaaccactgtttgatgaatcatttcccagaaagaaacacaattgatttagttttcagtgaagattattaaacttaagtacaatttacgtatgaaattactcactatgttccaactaatcggttagtatttgcttgttgttgggcactaccaaaaatcattgccatgccaaaatctgataccttggggctcatgtcagcatccagcaatttgttgctagctttgagatccctgtgaactactgttaatcttgaatcttggtggagataaagaagtcctttggctactccctttattgtcttaaaccttgttggccaatcaagcattgattttcttgcatctgcgtttgagaattttcttgcatcatctaccaaggatagaaatcaataaaaaaaacataatcagccatgcatgttacttaactaattatttattgaaaagaattttatgcattccaaaaggagatgattacgtaagtttaaagaaattaagcagtaagtaggtaacaaagtgggtggtttgctttaataaaagttctttagaatctctataacttttttacaggagtttattttagagaagaccttatcgtctgatctatctttgccatcataatcaccagaacatactgaaacggaaggcatctaagcttttgttgggcaagtattcataaatcaatattttttcttctccgcgagtacagcaaccaagaagcttaactaggtttctgtgttgcaacttggcaattagaatcacttcattctgaactcctctaatccttggccagaactcttgcttagccttttcactgcaatctcagtaccaccttccaatgttccctgccaagttgcatatcatttaaacaaataaaatgggcataagttaatagagcaagtatatcctacaaactttctaccaatataagaattatcattaccttgtaaaaattgccaaaacctcctcgcccgagaatattggaatcagcaaaatattgggttgcaacagtaatttctctaaagcttataacaggaaattctacctttgtttcccccaagtccttctgaaacactcaaagctctttgcatttgtctttttgaaatctcctagttttcttgtttgcctgataagaatagtttgcaatgccttaaaaaaaacttgtgaattcacaaggacaacatgagtacatgactgttaaaaagtgaagtggctaatgcaactgcagttagacaacatggagagaaaaaaaaaggataagcggatcagaatataactaaaaactccgcttcacctttgcagttgcagatccatacaagccatagacataagagcatcagcaagcttgacacaacaggcagtactatttccattatcctccatttgctctttccgaaattaattcctggtgagaatcaggatttcaaaatatttttttaaaaggatttcaaaatatctactatgagaaaatttaaacatcaagaatttttatttattaacataataaacatttaccatgaaaaatatattattccaatttccatcctctggcaattgcttgtgggggttcgaattaaagtcaagaggacacaaatgttaattaataagtaatatccacatagtttcttttgtatgtcttcatgagaacagaccttggtttcagaataaacaacttgatcatgcctttttttctctcttcctgcaggccatttagtgatatgcccgaagtgaccaacatcaaggtagaggagaacatccaatacaaatttcacacaccaactacattttatcctacctacaactggactggcaagccggagatataaattctcaccattttcaccaagctttgctgtgtcaataagctctcccatccatagcaagcactggggtggaagtaaacttgttgaattggtgtaagcataagctgtgcacgaacagttcctactgcataacactgtgcactcctcaaagcttataccactgatgtacacgaacttatctggcaatttcatgccaggcaacagcaagaaatgctcatgatcaccacatcgcagctcctcctttctcgacagccttgtgaggagttaccggagacaggttcaaatccatcaaggcacttgcatgtatggacgcctgtcaagtcgcaatgaccatatgggccacatgagccatagcgaccgcaaccttgaacagataagatgtactgtactgcccacagtgagtgaccagggtcccagctcagaaactgcactttgccggagctgtccagtacaaagcgcacacttgttgaactgtacgatgtagagatcatcaggtatgagtaattcttatccctgataggagccaaatacaacaaaaagctttttgagtaaaggtccattccacgttgagcctgatccacgccaacagggattaaatccatgccgcacaaagagctgagggtatggcttcaagccactaccaagggagaagtcaccattggaagggtcatcggggctcttccaagaaatgaaagggctcaacggcaatatgatcatcacggagcaaccagattttcatgccaggtaggaaagtgtcagttgggcgatcaaagttctcccacatgatggttccatcgaatgaccggatgaccaggttccccgtgttaagcaacaccgtcgcggatgatctagtacctccaccagcaatgttcttgctgctgttcatcttccatagagtgccacctaatgaatcagacgcaactatctcgccctggtcggtcagtgacagcatcgcggacgattgattcatgatggggctgtttcgattggcaacccagacgacggtgcggttggggatgtttattgtaccaaatgccaacatacaaccttgcgcttttgaattttttttctcccttcaattaaaattccggcaggtcttctgtcgtcgttctcctaaaaaaaacaaccttgtgcttgagttgctgctgcctaaggggaagaaaccttgccaggaactcatatgagcctccccagcaggaggaaatcaagcccaatcactccccctcaattctctgatcctgaaacaaaaaaaaaagtctcaatctctactgctcactatgcagcacgaatgaggcatacatacaagaatcaagaacggacgcatcggctagtcagagaaaaaggaaaaaaaatcgttaaaatttggttaggtgatgtgtagggaggaccaattagagataagcagagaaggagaaaacattgatgttcacactccacagccggacgaatctttttgtacaaaaaaaaataagggtaaagttatcccaaaaggaatcattgctgcacacacagaagtgagaggggggggggaccttggaggtcggagtggtcgggaatggtggtgcggtggtggccggcgacctgagggttgaggcggcgaaaccacgcgaggtcggccgcacagcggcggcggcggcggcggtggtggttgcattgttcgaaatggagaaggacgaaacggaaccgcggtaaggcacggccatggtagtgctcatccggtggcgcgcgcccggggtggggtggggtggagggcggcgccgccgccggagcagcagcacggtgacgaagacgacgaggcgtttcggccggcttgggtacggacagatgttgggccgaccaaattgttgttgggctgagctgcctactatgccaaattagcagggctcgcgactgctatttggcgcgcgcacaaaaagtctactacaggtccctccaatttttggtctagtttcattcgtgtccccaaccacaaaaaaaaaagtataaagggtactccaacttctaaaaccaaggtaaatctagttccacgagagtatagatagtcaattttggttgataaggtgtctacgtgaaaagttaacccggtttttattcgaacggatgaatgtggcactctaatctaaaaatatatatatatggtgggtcccacatatcagtgagacatgtcatcttccgtctatatcttctcacacgggaggacgaatggacaaagtcaaggagctcactggtcgacacgggcacttgtgtaggacctcgctggcccacacgctaacatgtccaagtatcacgtgcggaggcactaatgtgtccgttgacctcaacgagagaggttgttgcggaagaaatagcaacctaatggtagtcgagctgctacaaagggcagcggcgtgcgatgatggatcacggcgaccgaagcatggcagctcactcctccttccatttaaccttcaccactctaattcaatcatcgtcgctacctcgctcctccttcgtgagcttcattgctgctgcagctcgcctcatgcctagggagggcgacgaggcgatggaaaagcagtggtgcgcctgaggggagtgtcactgtcgacacagctccgtgcataacctcttagactgtggtagtggagacagaggagatctacaagttcgtgccccatcggtcccgtcctctgagattgccacagatccactgtataacaacctgtcctccaaaattaaaccgcactgcctaacccatctgatgagtggccccacttacacagcacaaactaatatggttgaagcgacaaactcttataaactcgttataccctgctaaactagcaacacggtactaaacatgtgcatacagctcttaagttgattctacccttgctaaacgcggtactaaagttgtgctactcgtcattgtatcaacaacaaatcaagaaaaactcttgattcagtaattcagaaaccaattgtttcttgtctttcaatggagggatcattttatagcgcaaaacgcatgcaggcagctgttgcagctactctcatccactcagaaaatgtcactctgatttaccacagcatgagcagacggttaccgggaatgcagattgcacgatgaaatgctccatatatatcctgatgctcagcattgggttgttgctaattaatctgatcctgctttttggaccaaacttgcataatctcatctgcaggagattccgttttggggttgggatggacagagatcccatctcatgtcagaggataagttcttcaggataagttggttggtgtgcgtgtgtgtctgcaggacagatcaccattcaccaaccaaaagggccagtggctagcagtagcagaagcaagcaacagatcgatgcctttctgacggaatcgagatctgctgacttggtactagtactactgaattcatcaggaattgatttttttttcctttcttttggtgtagaaacaatcttgctgtgtttgcagccttgcaggggtcacaacaaatgcattggattaagtgattatggaggagatttagttaaccttttgcgcaggagaaagacttataataaactatgtaaaacccagtacattatcgtgggagttccgtatgataatagtagaaataacgtgtaatatagctagctagacaacgtaaggtaatagaatttgtattttttttaatcgatcattggaaaagagtataaaccacttgagttgatatggtttttgataatttaaatagtaaatagattgataatccaaaagtaaggtgatgtggctttacgagagaagaaaataaggggaataatttggactatgattaatcatctagaggatagaaacaattgagatttaatgagagaagatagaaaacattagctaggatgaagtatataaggatattgtagaaaatgatggagagatatacgttaaaatattatgtaaattatgtgcgatgatgatttaacatgttgtattttataactttaaaatataactaaatataaatgatatagcatgtttgtatgaggattaacatgtaataaaagctaatgaatgataacgtaacatctttgcatgttaatctttagaatgtaataggttgtaactctatagataatggcttcgttcggcaacactgtatgccgcatatgatagttgggtttcaactggttgtggcaaccatggcttccgaagaggcccaatatagatctaagggtctatttgggagggcttctagcagctacagcttatcctgtaatcagaaaaccccccttccaaacagtttaatttttcgtctagattctgagaagctgcaattatgtataatttagaaactaaactagagaccagaaactaaaaaaaactagctttcctaaattctcagaagctagctataaaccagctgttttttagaaatcttaagctcccctaagtacgtgaggatgcgatcgagcaagatgatacatccaactctttgcagcacccatctccacactaaggctacgttcatttgtgccgatggaacctcccctccggcagaaaaaacggagtagctcattagcgcagtgagtaattaactattagctaaaattaacttgataaatggcttaggaacttttctatagaactttatttttgcaaaaaaaacaccgtttagtagtttaaaaagcatgcgtacgaaaaatgagagataaaagtttaaaacattagatataatttattgaaagaaaaatactcctttctcttttttcattttaatatgtcattggttaattcatgaaagaaaatggaggagtacattagactttgagaagtgaatgtaatttaactagctagtttccttgtggcgaaacaaatccgctcgggttcaaattctagactcgcattatggctatttaatctttcaatggtaggtgatgtacccattaacaacgagatgcttatggtgatttcatcaatcttaatatatatcggctttatttgttgaaaatgctcataaggataaggtatacgagtgtacattcgtagaaatgatcgtattcgtattgtgagtgtatgcataactgtgtttatatcgtgcttttagaaataaagtatagtactccgatcccttcgtcctaaaagtggggatttgacaccatctaaaacgataaatatgaaaaatcatttctttagattccttgctttagacggtgtaaaatcatcaacttatgttgtctttttttttaatgaaggagggagtatactttagaagtactgtcatgggagctagcttgtgcggtgcaactccataattttattttaggtggtgaatctttttcgggcctgttcttgcgggcgggcccacctcgcagctgcgcaaagcaatccggcccacgccgccttcacgtggcctcccctggcgggcccacctcgtcgcgaccccccacagccacaaaaattcatcttccctttcttcttcttcttctctttcctttatctatctatcaatccctatctgatctactagtattgacacttgtgtgcacatacagtgtcagacagctctactctgcttcactcggtgtgtgtgtggccaatgcttctctctttgagtcactgtcatttcaccctcatgtgctaattaattactcttctatatgttcttttaacttgtcgtttgggatatcgacagtttttagtatgcatattttagcattgtatttccatgtcaagtgtgtttggcgaagattattaaaaaaacaaatgtttaaaatatgttttacgatagatcatctatcaatgtcatttttaccgatcggattatatttttaccattgttttcggaaatttgtgagttactataattttaaggtttgactgcgtgcatccgaaagcagcagtaatcgagaattactatcataaaaacttattactatggatgaaaaatcttctccaagccatatcttggatagatatgcatgcatgcatggaatagaaccatcttcatagctgctgtgcgtcactgtgctgatcttgacatatagatgtagattggccgttgatttaattagattagatagtgtttaatataataattggaacgtgtcgatcgatcgagtgggtagtggtggtagctagctgcttactgcagccgagcaatctacatcaaccgttgcctgtcaatgttgctagctactggtactactagagggttggttgttggccatacatgcggtttttatttctctccatgggctgatcgatcgattcagaggaggagaggaggacaaaacggaatcaatttcatggccgtaattgtccacacgtacatattcatttgtgctctattggcacgtgtgcggaacacgtttacgattcaacttcagttcttagtatattattgtgaggccaagagttaaaatcagagaaacagaaagagagcgtatgagctattatatatactatatattgatgcgaacaacgaaataaatatattcataaggtgatgttaagtaacgagttagatatttacaacaaacctaagatgcaagctatatttaattatttaattacttcctccatttcataatgtaagtcattttagcattactacattcagatgttaattttttattcattaacatttatatgaatgtgacaatacttgaatgacttacattataaaatggagggagtaacaaagaagccaccgaaaaatagattaagaaaagataaacctttagatcaagcaagaaaacttaaaccaaaaatagataaaaaagcagcattaagctttaaccaaagacatgatccagtcagttaaccaagtcggtggggtcgttcggctggattagtagtattatttggcgggggaacaggtgagaaacggcgggagaaagaaacaaccaacggaggtggggcccaccaggcagtgaccccacgcggccgaagcggtgggcccgagcacctcggggaacatgcggccgcggttgggctccgtcacgtgggccgtgggccccacgcgatccgctccatccacagccacccgtcccccgcctcgcctcctcggccactagttgcaccggacgccatcccagccgtccgatcttgatcgcacggtcaggaggagctcctccccgcggcgccaacgtgtggccaccggcgaaaccaaccaacggtgggaaggggagctctcgagcagaccaaatcatggtgctcccttttgctccgttttttctttttccttttgataaaaaggaaataaagaaagaat
